United States Patent Application Publication US 2007/0054278 A1 - sequence listing, part 84

SEQ ID NO: 96690 - DNA, 255674 bp, Homo sapiens
  misc_feature (1)...(255674): n = A,T,C or G
aacctacatatgtacattgtaactgagtggctaaaatcttggagtttctaaaaggaagaaagggaggctgggtgttgagggacaagtagcagtctctactacaatctgtaagcactgaacacttttcaactttcctcccttatctgagttcagttactcccccagttctagtttaatctgatttatagtattgtatgggatggaaatgactaagaagaatacatgggtttttaatatatagattcttggaactcagaactcatcatctctgcagtttcacaaaatctgtttagttgaaaatattataacaaatagttgttctgcttttttaaacataaatgagactcataatggtaagttcatgttattctataacagcgtcaacaaactgtggcaaacaggccaaatttggcctactgtctgattttgtaaataaagctttgttagaatatagccatactcacttatatatgatctatggctgcttatgcaatacaacagcagaactgaatagttccaacaaagtttgtctggctcccagtgcctaaaatattactatccagccctttacagaaaaggtttgcccgctctgatctgtagctgtatcatacggcacagtggacacaatcctttgttgctgatgaatgtctcttccagaaatgcattaaaaaacccatctgagttactcaatggtacttatatataacaatatcactgtgaaacgaagatacttctatagtgctcactgctattgccagcttccagattaaaaactgacaagatgaacttacagaatttctgaaaaaacaattacttaaaggttttagctttaaaaattctgggcctttaacagtatagttctaatattatcgtggtatgctaaaaaatgactccctaaaagatttccatgtcctaatccctgtaacctgtaaattttatcttatgtggcaagaaaagaactttgcatgagtgattacattatggatcttgagacaaagagattagttatccaggtggatcctaaatgtaaccacaagtgtccttataagaaagaggcagagggagatttgacacagaagaggagaaggtactatgactatgggatcatggattccttagccacaagccaagaaatgtcagaagccaccagaagctggaagaggcaaggaatagattctctactagagggtccagagggagcatgccctttccaataccttgattttggcccagtgaagctaatttcataattttttgccttgaaaacattgagagaataatttttgtaattctaagctaccaagtttgtaataacgtggtatagcagtcataggaaactaatacagatttgggtactcagaataggtttctgctataacaaatgcctaaaactgtggaagtggctttgaaactggataatgggcagaggcaggatgaattttggcacataatagaaaaattctcctagacttccttacacaggctcttggtagaaatatggacatttaagttgtaaccagtgatcttgatagctacatttacttattagttccaatattttattttaggttttctacatatacagtaatgccattagcaaataatgaccagtgtgtttctttctttccaatacataggcacttaatttttctcattgacctggctagggaagcttgtcttgtttctgatcccagaaggaaaggtttccatatttctctgttaattatgatgttttatatagaattttatgactataccattaaccagattaaagaagttccattctattccttattttcacatttaaaacatatataaatttgtgtatccattgagataagattttctttgtcacactgttagtgtagtaaattacattaattgcttttataatatgaaaacaatcttgcattcctgaaaaattaagttactgttggtgaggtttcagaagaaaatgaagaagtcagagaaagcctgtatcatcagatgcagagaatacatatatcatcatacacagaaagttgctagaaatatgaattttcaagtacactgatgaggactcggaagaaaatgaggaacatgcttgggaatttgagggaagtggatctttcaaatactggcagaaaaattagctaaattgtgttctacagtaatatggaaagcagaatttgtaaggaatgaacttggatatttggcagaggaggtttctaagcaaagtgtcaaagttgtgtcctgatttactgcttatagtaaaatgtgagaggaaagagactgaagggaaaactgctaagccacaaggaacttggtttaggaaattctcagtctatccagattgcaaaagttgctaaaattaggagattgactgttagtagtatgctctggagagaagtctgagagcatagctggacaacctttctgctagtgctgaagagattagttatgtgattcctagatctcctcaaccattgcagtagtaaccaggaaaagaaatgaggttatacaggaaagatctgtggtggcccctcctatttagtggcataaatccaagtgacatacataggagagtcacaagacttttgagaatgttataccagaagaaacactgccagcttagcctacaaagggacacgtttgtggtactttgttacaatagccataggaaactggtacaaatagcatttttaacacctactatgtgtcaacactctgcctgctttgtatgtattgtctcatttaacctaacattaagcctatgtagcaactatttatatctctacttttatagatgctatttagttttgctttttaataaacacttatatggcaattactattttctaattgctttacaaatattaatttatttaatattgttttatctccattttgtattagagttcggttaccctccccctttatttcaggagccaagtggccaccagacccttttacttttttaattcgttagtatttgggggggggggttctgtaatgcatttgagatgaatttaattctaatgatgttccttgtcacctaggtttgtatacagagttcttcagggatccctgtttccatctccaattctgagagctaagcactttgacagactaactccagaggagaggactaaagctctcaagaagtggagaggggctggaaagatgaatcaagtgacatcaaagtatgctaaccaatcagctggcaagtcaggaagaagacccatgcctggcccttctgctgtatttgcaatgaagtcagcaagttcctgtgctattgagcaaggaaacttatctctgtgtgaaactgctttagatcaaggctactctgaaactaaggcctttgagatggctggaccctccaaaggtaaagaaagctagataccctccttggagttgcaagtattctttcaaggttggaagagggattttgaagaggtatctctccaagcaagaatgacttgtttttccataagggacatgagcattttactaggcttggaagagctgacatgatgagcattattgtatgtttgtatatacatttgtgatagagggctagagtttgacctagagagagtttaaggaagtgaaatatttaattcagaaccaaatgcttttgtaaaactttttggattttgtaaaagcattttcattctcttagaaattcaagtattttcaaggggagtcatttgagatatatttattttactaggagatcttatattctagggaaatgctttaaatggtcaggctccagtcggaatttttttaagaaaaaagtagtttttaatacattggttaggactcagaggaaatacggaaaaaacattgtagatggttaatttacagataaaatcccaagagccttttaaacaacaaggtacctaaaatagggtataattatactgcttaaaatacagttagtgcctattaatagctttttatttcctatgggaagatgcttttggtcttctggctgaagatgtaggcatacctctcactcatttcaatgttttcctgaggtggagccttcattggaaaggggaaagagggattctagggtttcatcagggaccaggaatgcattcctctgtcaggttccaatcaagagaagaccttttatgagatctgcctctgtatagatgttgtcagttaggaaactgaagccataggtcaggcagacatcagctcagcctgtggcccattgggtgatttcctgtattttaaaactgacagtagcctgatcaaagtgatacaatcaatttcaaaacaatcttccagagaccacttgaaggttcatagtttttacaataccctgagacttttcaggtgttggagcctctaaaatatgagatataaacagaaactaatacaagttgttctctggaggtttctatgaggttcttagaaaaatttggttttaaaatcatttgaggacaggaatgtctatagcaagtttactcctattgcgaatcatgtatgctggctttagttgtaacaaacgattttattctaagtaaggccaggtgctactataaaatcatatattcctgttgaagttcttttgaagtcctatctctatttattatatttgaaagttgtcagccaccagtcatccagaatttccttcctgaatctccatgctcatatgcaatgtctacatcaaggtcttcttaatgactattattctcagggtttagttttctaccttctgcctactattttggtctgacatttttgtagccttctgttattattggaaatagtctcttacataagctgatttcgagaactttcaaaatctcacatagctaatggaagttgctttctgctttcttatgactgtttttataaataaactgtttcataaataatgtatactggaaaattgtcatcactcttgtaaacatttgccaaatccaactgtaattagtaccagaacttagaaggaaagtcacaaagcatgccttttaccagaatattgctttgccttttcttatatggaaaatcactgatgtcatatcatttattatcctcacagcagctggcattcattccctgaaatcgtcgtctcctgataaacaataatttagagatatgttcacttgtaaataaaaaggttagaatctaaggacaaagaatgatccaaaaatactaaggaaaaagaacaattttcaattttcagaaatgaattatctgtacatatgaatagaggaaaatactgagtgctaatgttacagggccacaatctcatatccacaattccaaaatctccaaacctctgaaaactgaaatatttttcataaattaggcgtaaattctatgccctgaacaaatgtaaagctatttatgtactttgcttaatgtaatcattcatatactttgctacaaaaatattaatatatttcattactgaatgctaaactgtatttctttttaaaatttggaaaatttttaattctgaaacacaatctagaccttaggctaaagaggttgggatctgtatgaagcctttaaagggtcacatttacaagtcaataactcttttacataaagttacccaagttgatgtgatctggtgttcagtgtatttcaccaaatttgggggggaccaagtattatatcattgctctcagtagataagaacattgattaatatatacattttgggatataatcttattacaaaagatgtataaaataattgtattgggttcccaaaatgtactctggatgttaaagatctgtgtgcccttacgaggactaaagttctcactggacacttaatgggcaatttgagactattagcaacctctaatttcagaccagtcaaggagccattgatcctctaaaataaaagagcatgtatctgtgagagtgagatataagggaggtgaattgtgattggtaagcagggtgccagcatgctgttatagagacagaaacaatttcttaggacttgccacccatatccatccaaaaaaaaaaaaaaggtgattagaccattaccattttatttgtattaagaattatttaaaataagtataatatatatatttcactgagcctaagttgagcaggctaaaagttgatacattgagtatgtagctacaactgtaacaaaactgacatatgttcttgaactttcatacaatcgtgaccacaattcagttgctggatttcacactctccttaggtttatacaaactgaaggacaggagatgaatagtatagaaattgctacaactttttgaatttcaactatgtttacacacagaaaagatacaaaaatacatgtataaaattgcaggtagtatctatttggaatgctgaggcagtccaggttgctggtggaggttagtagggaatcctagttgtttaaaaggcaaaatggatgcctgactaattaaattaagtatatatgaagatttgtgttttaaagttttttagtggggaaaaatactttttaccactaattgcttcagaaattgagttgcgtaaagtggcctagagctaaaaatcatttctaaaattttaattaccaatgagaagaaaccagatattaaacatcttttgaggaaaattacaaaatgttttactccatgcaaagtyttactgtgctctaaaatatgctctttatgactttgttggtatggatgaacgcaagaaaactgaaaaataaatttarttaaacgagggatgcaaattaattttctttttaaaaaattgcatctctcatctaaattctcttttgcaaagtttaatatccagttctttgccacataagtaaaacaaaatattgcccataaatatagatgtagttgttgcagtctcaatcagccaactcatatatcctgaacaaacccagctatgaggacagttctatagagactcttctataaaattatgatcttgatatacatccagaatggggggtccaataatgtcaagtgttaatattgatatctaaagaactttgcattcaatatgtcttgctacctaaatggatgacactggtcttttattgctgtcttttatcagttctcagaattatgcaaacattagaagggggtaatagtaaatactttaaacatgtaaattatcttggcttttaataaatcaaatgacgagttactgggttcagcacaccaacatggcacatgtatacatatgtaactaacctgcacgttgtgctcgtgtaccctaaaattcgaagtgtaataaaaaagaattgtggggtataaaaaaagaaaaagaaaagcaagtctccaatgttaacactgaaatttaccactatgcactgagcttgagaaacaaaaactggtagagataattaatcagcctaaatatctatgtctttttttgtgataggataaaagagaccattccataacctgttactgtagcacctgattttaaatctcgccagagtcgataattttgtgctgcagtcatggttaggcctggcaaaaggacaaagtctgctttgtttgcttttgtaaagtctttcattgaacttgaaataagagaaaaatgaaggtgaaaaaataaattgaaaaaaattagtccaaaacaaacatgcaaatttgcagtgcacgattgagcatttctgtccatgaaaagtgcttctgtasagctctctgcaggcagctcttcacagtcaagaaggccattttcttttagtgtagctggcaaaagtctctgatcatccttataattagtttaggagaaaggtctggatgtaaatctgtcttttaatccattcgacgaaatatgacacattactataaacgccaggccccaggactttggaaaagcagacggagccccatgaagttaatccaaataatgtccaccgtcctccaggcttctcacaaacaagaggcccaccgctgtcaccctgcaataagtaacgatgggagttaggaactggcatttcagggcagtaatgtgtgtccatgctatcctgaggatactataaagctaaacccagattaaccaacttggaaagtttcaacaaagctttccttgtcagcctgtggaggagttgtgctttccactgtaaaaacagaactttcaaataaacatcttaaactctgatcattaaaagggtggagtggcttgggaagaaattatatttttcccccaggaaattacctttttcaggcattttctgcacttataaaaatatgtcataaagtttttaaaaagtatcagaactaattacctcaaaattgacctcattctaatttaagcttgacttatgactgtggaaagyacccaaaatggaataaagatcccccccacacacagtactgcaaacatattctaaaatatctattttcaagattcttgctttgtgaatgaatacattaagcataacacaatttggggtcccttactacacttcttaatagttcttaggactttttaatttggcatagttgaatacaaaataagaccacttaaaattataatgaatcattaatagcctgtattttatttcatatatatagggattttcattcatgatatttaaggattccagttgaactatattcagtttttcccccaaatatagttaatgataaaatgctatggcattagagatagcaatacttgctacatctgaaaacaaaggtgtattctgcactgcctcaaaaaagaagagctgatatcatggaaaataaaagagtaaatacgtgaattcattgtggaaggttacaaatactccttgacctacaagactttcaaaattagaagcatatctatggtcttcctacttggtattgttgaagaacataggactaatgtttcctgatcctcttctaaacattttccacatattagctcatttaatctttacaaaatacctaagagtttatattatttattatatctgttttggagatgatgaaacagaagcacaggttaaataacttattcattggcagaggctagatttgaatccaggcagtctggtaacaggattccaactctataactactaggctaccctgcttcttaggaatattagggaatattattgctatgaaagagaaattaggcccggcgtgctagctcacacctgtaatcccagcactttgggaggccgaggcaggcagatgacttgaggtcaggagttccagaccaacttgatcaacatggtgaaaccctgtctctactcaaaatacaaaaattagccaggtgtggttgtggaaacctgtaatcccagctacgctggaggctgaggcaggagaatcccttgaacccaggagttggaggttgcagtgagctgagatcacaccactgcactccagcctgggagacagagtgaaactccatctcaaaaaaaaaaaaaaaagaagaagaaagagattaaaattttgattgtgctgtatgcttttgtgtaagtgatgatctttaaatttgtaactttccaataccctaagccaaaatcataagcatagaacttgcaaggagctgaatttttctgcctaagagcctaattgaatttttttaaagcaaaatttctttgttacatgtatataatgcttagacgaaaaagaaaaatttcctggaaacatttcacaaattattttcacaaatttgttttcacacatttcatatgcatagggtatttcattcttgatctctccttatataaaataaataagatgctcagctattgaagtggaactattatgtcagagggtgattaaaatggaatgtgtttagaatgtcagcacattttcacttccagatcagacatttagtaaaataattatttagcatctactctttgcaaagttctgtgctagtgtataaacaaacgaataaggcactgtttttgtcccagaacagccaaaagtcagcttgggtaacaaggataaccacatgaaagcaaaatctaatggctagaaagaggaggtcaaaggaatgagtgatgacttccaggtggagaggaataaaaaatgccttcctgagatgtgggttttgagttaggcttagtgagtcaggtaggcaccccattaagtgcaaaatgaaaggtgaaaagcaagcaattaaaaatgaaagggagactacagctaaaggcacaactgatctggtctgttcttttggtcctctttgtaatattgggcttgaaaccaacatttatatttggcttcagtattcagtattcaggtttatagattgtcacggagtaactcacgcttcattatgtcctgttgatacaattaaggaaaataatatctgtcatataatagaggtctaagtagaaaaatttgctyctgatatagtaaaaagtaggttttgtttggttttctacctgaagttgtgttagagaatatctggtatgcatttagtatacccagtactaaatgaacttccactgaactcagtatacaccactgaactcccactactaaagaagtcggcaagacctggttcctattaggcatcatgataagaacatgcccatgcctgtgtctgtgggccttcagctctctgtcaaggaatcatctcccttcccctcctttagcaactgccaagagatgatcttgaacatgtgccaagaggtgctagtttttggtaaacctccaaatgacattggagagaggaagaaatgtagttatattaatcattgctgccagactgactggtttcatgtcctcagtctaccaccttcatgctggctgatttggggcaaattacttaacctcctgtattcttgatctgtttagggaaaataaagacactgccatatgggttgattgtgataattaaatgagttattagaaagcgttttgcagagagcccgaaacataataagcactaaattgatagctgttaatattggtgtaattactattcattgaatgtctaagtatgtgccagatatcatatacagatatgtgaaagatatgggcttccaaatacattcacttagttaatcctcatggacagaattagtcccattttactcatgagaaagctatctagagaggttagataacttccccgggttatactggtctcactggcagagatgaattccaacccagatatttcaggcttcaaatcctgtgccccacacccacatcatgctgcctcctacaacactttattttgggcctgggaaatcaaacccagtcctcctgtagagaagggagggattcctttaccaccatccacgtcagcaggatgacttgtggccatgaagcagaaaggagggtggtctcagcgaaatgccaagggagctgtctgcctccctctttcccatgacaactatctaaggaatcaccacagggccattttcaataccctgatttttccattctaaaatggatcatcaaaaatatagtttatttaaattgagttagtacttaagagcactgttgtatcttttcttcattactaaactgtagggagcaatttactccmaattmaaggtgcttcacagcagcatagtataataactgtcttccccagtttttgttacaagcttatttgagcacttgcacttttccctcctttcctgggagccagtccagtataatgttcgatgtgtgtctattaagtaaaaataaaaaggcacctctacactattatgttaatatgttctgcaaactctcatggccatgaatcctgagtatctaaaggttgagttcagtgacatttgaggacatgctggcaatcaagtgagggcccagacaacaccagtgtgatgacccctgagacagaggtagtcctgtctcacaccctggaagttggggtgttgatgtgtggcttcctgccatcaccctaatggctgacaatgtcctttcatgccttccctgcttccccagggcagccaggtggaagccatggttactactagctcctcttagaacctcatttatcctagccactaaaatggttgaatgagatgaacaggaaaaattgtttttctcctgttgctgaacaagggtgatgttccccatatagtagatgagacagtagaaggcaccctgaataaagaggatgggtgtaattgtggggattgcttgtgtaccagctgcaggaaaatgtgctgttaataattaaacatttggcaacaaatgattttcaaaaaatgtttccaaagggccatacgtaataatgagtttataggaatccactgaagttattgttgaactgaatctccttggtaaccagaaagcaacttaccatgcatgaatcaactgtgccagactcatagccagcacatatcatccgagtggtgatggtcttcatgtcaaagtaggactgacaatgttccagagaaataatgcggacctctccctcttgcagcttaaatggcactgaatttttaaaaaataagaatatatatatgatgataaaatgactcaaaagtgaggctagtgaggctagccaaatatgaaatgcaaatataatataaatatttttataccaagagaggcatattctttacttgaaatgccattttaaagacatggctggtttggaatcagaattttctagttagaagcattcatagcaattatccggtgaaactcctttattttattaatgggkaaaccaaggcctagactggttaagtaagttggttcatccttaccatatgctacaaccaaaacaatagctactacaaagaaaagaaaaaaatcaagccagagctctgctggctgccagataggaggctgccagctcggcgtcaactcagcatgatagtcctgctctgctaaagtagagaaaacctgtttaatctaacagggaagggttgtcctattcttgatgaaaagaatatgcctcaatatgtgccccagcagccattacttgatgtaagaacctctaatcctagaggatatgacagagagatatcgaaaagcacaaagccatcccttggtattgacagagagaatatgtgaattccatcttgcttaaaagttcttgaagaatgacaatggatttcttgaagcaagacagcatgaatctttcactgtttagccattctgcaaaattatacacactgttcttcttttaaacagtgatggtgaagcactactgggtaccttattggaagaaagagccatttttaggaaaatcaatgtgatgcagacagtggatgtttcacaggttgtcaaaagaataagaacaatagctaacatttattgggcactagtgggtctcattgcctttaatctttacaatactcctgtgagttaggtagttgctatttttttccattttatagtaagcttgaaagttatacagtcagatcagtcaggtctttctgactgaattcagcagatcttttttttttttttgagacagggtctcattctgtcacccaggcagtggtcacttgcttactgcagcctccaccttggctcaagaaatccttggctcactgcagcctccaccttcaaggctcaagaaatcctcccacctcagcctcccaagtagctgggactacaggcacacacccccatgccaagctaattttttttttgtagagacagagttccaccatgttgcccaggctggtcttgaactcctgggctcaattcatgctatactacatgtgtggagtgtgcgttatgttgcactattgctctgagttcaatatggatattgtaggaggaatataagcagaaacaatatcaagcatagtctgctcttaaattacagaattaatcatagctttgaaaaaaaacagatgcataggagtggtgacagcatgtctaacattgccttcaaaattgttacatgtgagtttttttgaaaaagtcattgacttctgcctattgaatttcctttctgttctgtaattgatgaaatagaaaagaaactcaatgtaagtcaaaccttatctgactaaattttaagaaaaaattccttcaaatatacaatttctaaggccaataacagaatgccaatatacattattattcttgaaagccatggcattatacttgatatggacagagtaggcagcacttacagttttttttttttaagtttcaggtgggtggatcacctgaggtcaggagtttgaaactagcttggccaacatggtgaaaccccgtctcactaaaaatacaaaaaacaaaattagccaggcgtcatggcacatgtctgtaatcccagctactcgggaggctgaggcaggagaatcacttgaacctgggaggtggaggttgcagtgagccgagattgtgccactgcattccagcctgggtgacagagtgagactccgtctcaaaaacaaacaaataaacaaacaaacaattattatttctaaagtaggtcaaactgaatgagagagtccattataggggtttagagtaaatacagagtacacattttaaatttctatgtgttttatatgttaagtcatctacagagccaaactattttaatcaatttaaatagtcaaatagcaaatcaatatactttcttgaaggatttatagtttgtactacagatgttgataagaccaaatcacaacatagaattggaaatatgaccatgcagcttgactgcagagattcccagtgactgtctctatcattgggctatctgcaggcagatagagagagtccaaagcacagttcagtgacaggtctcctcctgccacaaggaagctccaaaacattaatagtaagctcccagagagagattctgaagtgtggagagggatttttgagattgcatctgagcttggccattttaaatgccatggttcattattaatgtctatgatttgcacagcagatgaagtgtgacacatcgctaagtatttaccatttgtggctatatttttgtaagagaaaatgggaaattacggccaaaagctacctagcttttgggtctgggtactgggtctcattctgttacccaggcagtggtgagatcttggctcactgcagcctccaccttccaggctcaagaaatcctcccacctcagcctcccaactgaggaacacaatgtttctcaggctcctgaagatcctggctgatatggtttggctgtgttcccacccaaatctcatcttgaattgtagttcccataatctccacgtgtaatgggagggatctggtgggaggtaattgaaacatggggggcagttaccctcttgatagtgagttctcacgaggtctgatggttttataaggggcttttcccccttttgctcagtacttctccttgctgctgccatgtgaagaaggacatgtttgcttccccttccgccatgattgtaggtttcctgaggcctccccatccctgcasaactgtgaatcaattaaacttctttcctttataaattacccactctcaggtatgtgcttatagcagcatgagaatggactaatacactggcttacttttattgcccatgtggccccagcctgtgatatagcagtacgtgtcaggctctagccactgctccgggttgggcaagcagacaggccggacgtagccagtctcactgatgtcttcactcagctcaacgatgctgatgtcatagtccaccactgctcgactgtagcggggatgcaggatgatggtcttcacaaagcgtgtctgcatgaacactgatggatggtctagattgttgatgccaagcaccactttccaaactgcagcattctctctcctaaaattataattcaagagctattggcatcttaaactctagtttatcatgtgaaattcacatgtaattttaaaacattttatttatgtaaataatggccattttcatgcccacctctcaatgtattcatataagtggcatttatataatagcctgagtgattagcaagtaagtattattgttgcagaaagcatagctcatgattcctgaatggggctagtctttaacataaaacttcttcagttttaaaggcaggcagagttagttacttgcttcacagaatgagcaagataatgaaaagctatgaagaagagagaggagcaagaggaaaagtgaaaaagaagaggaagccaagactaagagattcctccaagaaagagcaagtgacttgaagaaatgccaggggaacctcctacagatttccagctcagggcttaaaaaggtcacccacracctccaatggtcattcccatactccactgtttttgaatacttgtcaacaatattttagtcgattcccaccttaaaacactttcttcacttggcttccaggtcttgccatgctccaaaatttcttccaatctcatggacctttccctctcagtcttttcttctgggttctcctctttggctctcagtctccatgttgaaatgctctggaatttcactctcagctgtctattctcactccatactcccttgatttcatctagtccaatggttttaaatcccaccatacgctggtgaccccaaatgtatatctccagctctgtcctttccctgagctgcagacttaatgttcaatggtctatttaacactctcagttggatgtttcagccaacatttattgagggcttaccatgtatgccacagtatttaakcattcaggattcagtttacaggaacttaatactataatcaacccaggtgaatcttctctttttcttacacccaacactgaatgcatcagcaagtctttgccaatcctgctttcaaatatatcccacatcttactgtttctccctcctccatggctataatcctaatctaagctactctcaactacatggaccatgcaatggcctcccaaatcatggtccttcttctaatcttagtccctgtagtccattttccttactatcaggatatatattgactatatcctctatattagtcagagcaatatttaaaaaaaattagatcaatccatcttctgctcactattctccaaaagctttgtatcacacttgagacaaatcctagactcccctggcctctgaggccctacaccatatgttcattctcaacccaaggactttcttgctaattttgaacatgccaagagcatcctcaactcaggagctatttcccctgatgttcccccagctctcacatgggtcctaccattactccttctcttcatccaggtctcaactcaagcatcatctgctcagagctgtttccccagccaacctgtctcacccttactctgcccccttcactctacttgacactgctttacttttcttctcatactatccattgatatcaatgacattgatataaccatttgtctattctctgtcttggcccctagaatatagttatcwctgtgaaggcagggatttggctggtctttttcactgctttattcacagggcttggtacctggcctacagtaggtcctcaacaagtacctatttaatgatggctcaatgaatgtttttgactctaaccacaaagtcaaggtctgttcttcatcactccctccatcccttccttcactcccagtctctcctccaccagagtggtcaggatmaaaaatgtggacatttattggaccacattgttggggcaagggtagagctttaattgtgggcatttccttatactctggtaatgtgagtcagccacactaccactgttcctgcttgggagcttgtgatcaaatcaactaaagtaggttgatttgaccagctagaccaattgtttttcaacccaggctgaacactgaatcctctgggagcctttaaaatagtgattctctgggcgtcacttctaaacagaagctcatggactggggcctgggagtctgtatttttaagagctctctagggaatcttaggcaaaaccccacccacaacccttctttycttggcacgcctttctttaccatcagcatgccaaagattcgaaaggctgagatttcaagggagttaggaaggaggagccaaggtaggcactcacttggtttttagtattgttggatacttggggcagactctactaacagaccccctctatatagtcatgcatgttgtcctttttccattaaacaaatagtaatttcagggatatcagaggaacggacatcattcagtgaatagagagatagagatatatagcaattttctctatgccaagcattgtgttagggattacaagaataagcaagaaaagcatgattccctgcctatacaaacattgtaattgagtgaaggtagacaattaaataaacaattagattaaaatgcaggtagtactatcacatgarcattacaagataatgttacagaataatttctttttttttcttttcttgagtcagggtctygctctgtcacccaggttggagtgcagtgrcatgatgatagctcactgcagtctcaatctcccaggctcaagcgatccactggcctcagccccccaccaagtagctgagactacagacacacaccaccatatctgactaaatttttttggaattttagtagagataaggttttgctgtgttgcccaagctggtcttgaactcctgagctcaagcaatcctcccgccttgggcctcctaaagtgctaggactgcaggccaccaagcccagcccagaagaattatttttcattacataaagccgtcactagaagaacatgcttttcttatccttccttccttcctaccttctttccctccttcctttcttccctccttccttccttcctttctttttctttccttttttccttctttcttttacttctttcttcctttccttttttccttcttttccttatttcttccttcccttcctcccttctctcctttcttctttctctcgttccttcctttttcactaaacagtaataagtgcattaccatctgagaagttcaatatgtatttgtgattctattgtttcagacacctgaaatcaagcaataatttatttcaaatttctgactacttaatagcttcttgcccttgaatagcgttactaagttttggctgtgaaaaacattcatccacatgcttaaatcataagcagtattttgaataatcgaacattccaaattatttgtaacaaaattgaataacatcaaaattctggacttaattactgtattgagattaatgtaattctaattataaaaaattagtgtcaataaaactgctgaacattaatttgtacccagtagtctcttgttacataagctactggccttatggtatagacaggcagatcasgaggtcaggagaccgagaccatcctggctaacgcggtgaaaccccgtctctactaaaaatacaaaaaattagcccggcatggtggcgggtgcctgtagtcccagctatttgggaggctgaggcaggagaatggcgtgaacccgggaggcagaacttgcagtgagcccagatcgcgccactgcactccagcctgggcgacagagtgagactccatctcaaaaaaaaaaaattccaccaaaagaaaaaaaatgtacacaggaaattcacataattttttgtattcagtgatgacagtgttcttttcttctttttgttatgagtatattgtgaaaaataatgtctcttttgatgtcttcccttctgtcaacccgggtatggcagaaaccaaaaacagaacaagaaaaaacccaacctgttgtttgaaagagtctcctggggtgaaggacatgtacatacatggtgattgttacatcaagcaagtgctaaaaagaaggagtcaggagtaatggcaaagacagccctgtgtctgggtagaagcaaaaagaaggaggacaatttcaggctacatgaatgccacatgagtttagtatcagttctaaagtacgaattaaccggatgtggtggcgtgcacctatagtcccagctactcaggaggctgaggcaggagaatcacttaaaccctagaggtggaggttgcagtgagccaagatcatgccactgcactccagcctgggctacagggctagactccatctcaaaaaaaagaaaaaaaaaaaaaagtaccattggagaaacacatggaaacagactctgatcatatgactattttagtaaaaaccattaaattatggccaggtgcggtggttcacacctgtaataacagcactttgggaggctgaggcaggcgactcacctgaggtcaggagttcaaggccagcctggccagcatggcaaaaccccgtttctacaaaaaatacaaaaattagctaggtgtgatggcaggcacctgtaaccccagctactcaggaggctgaggcataagaatcgcttgaacctgggagctggaggctgcagtgagctgagatcggccattgcactccagcctgggtgacaagagcaaaactccatcgccaaagaaaaaaaaagagctaaattaggctaccaagaaaagaaagccaagtatagcagctgaaaatcttcagtttaaagggaattacttgccatttggctgtcaagcctcaaagcagcagcaaggagagctggcacatctgaagtgcaaagaacttcagactgtgagaggaaggaagcaggccaaggtgaagccaggtgagaatccaccaatcccagggaaaacaactgaggaagatgttaaaacaccttattcttctttgtcctcactgtggttagtattttattccttgaaatcacatttagagtctaatttgcttcacgtttacactattgttttaataataaatgtacttcatagacaatattgagcttgtatgatttcaacttacaattcttcaattattaactctagagaaaaamaaaaactcagccacttacatatgtcagacacactatagcatccagaggaatttatacagaattgcaggcacaatgtctctggaggcaaaaatcagtctctttggtttgcaatttgccacactcagctctagtttagacatgaaatttttcactcaattcagctagtcaaatttaaagatttctatctttatcttttcttaggagtgaaaawtttcccttctctcaccctctctgactttgcttagaatatcttatatttaatatttttcctgtttaataaagttaatattataattaacaactatgatagaaatttatctattttacaagacttactccagaaatagcatagctaagtggtgatttggagatcatctgaaggttaccaaatctgcactaaataaagawataccacactatggcatcattgctgttctacaaatmttaggaatctcttacttttaatattgtgctctgtccttggcatttcatttttattatttatttattttttttgagatggagttkcactcttgtcaccccggctgaagtgcaatggcgcaatctcagctcactgcaacctttgcctcagaggttcaagcgattctcctgcctcagcctcctaagtagytgggattacaggcacccgccaccatgcctggctaatttttgtatttttagtagagacagggtttcaccatgttggcctatctggtgttgaactcctgacctcaggtgatccacccacttcagccttccaaagtgctgggattataggtgtgagccaccgcacccggctatccttggtatttttaaaaaattatctgtaacaggcaaggtaaacggattttttttttcttgaactgttattttaagttccgggatacatgtgcagaaagtgcaggtttgttacataggtaaacgtgtgccgtggtggtttgctgcacagatcaacccatcacctaggtattaagcccagcatccattagctattctccgtgatgctcttcctcacccacccctacccccaacaggcctcagtgtgtgttatctcccactatgtgtccatgtgttctcatcattcagctcccacttatcagtgagaacatgtggtatttgattttctgttcctgtgttagtttgctgaggataagccttccagcttcatccatgtccctgcaaatgacatgatctcattccattttatggctgcataggattccatggtgtatatgtaccacattttctttatccagtctatcatcgatgggcatttgggttgattctatgtcattgctattgtgaatagtgctgcagtgaacatatgcatgcatgtatcttcataatagaatgacttatattcctttgggtatatacccagtaatgggattgctgggtcaaatggtatttttgcttctagatctttgagaaattgccacactatcttccacaatggttgaattaatttacactcccaccaatggtgtaaaagcatccctttttcttcacagtcttgccagcatctgttgtttcttggctttttaataattgccattctgactggtgtgaaatggtatctcattgtggttttgatttacatttctgtaatgatcagtgatgttgagctttttctcgtatgtttattggccacatgaatgtcttcttttgagaagtgtctgttcatgtcctttgcccactttttaatggggttttttttttcttgtaaatttaagttccttatagactctagatactaaacctttgtcagataaataaattgcaattatttttctcattctgtaggttgtctattcaatatgatgatagcttcttttgctgtgcagaaactgtttaattagatcccatttgtcarcttttcctttcgttgcaattgctttcaatatttttgtcatgtaatckttccctgtgcctatgtcctgaatggtattccctaggttttcttctagggtttttgtagtttcgggttttacatctaagtctttaatccatcttgagttaatttttgtataaggtgtaaggaaggggtccagtttcaaatttctgcatatggctagccagttctcccagcaccatttattaaataggaaatcttttccccattgcttgtttttgtcatgtttgttgaagatcagatggttgtaggtgtgtggccttatttctgggttctctattctgttccattggtctatgtgtctgttcttgtacagtagtamcatgcwgtttttggttactgtagtcttgtagtatagtttgaagttgggtagggtgatgcctctagctttgttctttttgcttaggattgtcttggctatatgggctcttttttggtttcatatgaattttaaaatagttttttctaattctgtgaagaatgtcaatggcagtttaatggaaatagcattgaatctataaattactttgagcagtatggccattttcacaatattgattcttcctatccatgagcatggaatttttttccatttgtttgtgtcctctctgatttccttaaacagcggtttgtagttctccttgaagagrtcttcacttctcttgttagctgtattcttaggtattttattctgtttgtagcaattgtgaatgggagttcattcatgatttggctctgtgcttgcctgttgtggtgtataaaaatgctagcaatttttgcacattgattttgtatcctgagactttgctaaagttgcttatcagtttaagaagcttttgggtcaagacaatggggttttctagatataggatcatgtcatctgcaaacaaagataatttgatttcctctcttcctatttgaatatcctttctttctttctcttggctgattgccctggacaaaacttccaatattgtgttgaataggagtggtaagagagggcatccttgtcttgtgctggtttccaaggggaatgcttccagtttttgcctatgctgcatgatattggctgtgagtttgtcataagtggctgttattatttaagggatgttccttcaatacctagtttattgagagttttttaatatgaagggatgttgaattttatcaaaggccttttgtgtgtctattgagataatcatgtggttttcgcctagttctttttgtattgaaccagcattgcatcctagggatgaagctgacttgatcgtggtagaaaagctttttgatgtgctgctggatttggtttgccagtattttattgaggatttcaacatcaatgtttatcagggatattggcctgaagttttattcttttgttgtgtttctgccacgttttggtatcaggatgatgctagcctcataaaatgagtgagagaggagcacctccttttcaattttttggaatagttttggtagatatggtaccagctcctctttgtacctttggtagatttcagctataaatctggtgaatagactttagaatagagacttcaaagtaaatatatgaagtggctggggtaaattcagtaagtacagactgtgtcacatcacaagccctgcccatcctgagggccattcgcctctcagctccagaaaattgttgtcatgttggaatgctcagtggaatctgaccttccaattgtctaaggaaagccaaagttctggattttatgcaaagtatctgtggttttaaatgctacctaaaaatttaaaaatggatacaacaagcaaactagattggcagcctggatgtctcattagtatacaatctcaatagttttccaagtgtttctacacactttattccaaatgatcctcacaccgactgtgagatgtaaacagggattcattgttccattttagagaagagaaatcagtgactcagaggagatgagcaactcatctaaagtcacagagacagcaagtgatggtaacagactaacttgctggtcctttgaacctgctacaccacatccttacaactaaacttctctgaaacaaagacaagggtccacaggcatcaaaaaggatttaggtactgggcacaggagggaaagcatgtaggatggatggagactcttgtgagtcataaggtgacagatagcaggaagatgtgtgctctttcctgaatgtatccctcaaatatgatagaaagctagccgtcrgtgataaaattacaggaaatgaacaattctattatgctaggttccaaaaaatgcaagagaagggtttagtcacatgcatattctagaccttcaagaatcaagtttcagaatgtttcagggggaaaaagctatgataatatgtccagagattcttaaagcagtcatggctcaacaaagttgggagagtttaagtgccaaattctgatactaccatcacaaatagttgcagtatgcaagaaaatgaagaatcagttgaacagtaaatgtgactacataaagatttcagagcaggtgagtgcagtggcttacacctgtaatcccagcactttgggaggctaaagcgggcagatcacgaggtcaggagtacgagaccagactggccaacatagtgaaaccccatgtctactaaaaatgcaaaaattagccgagtgtggtggcacgtgcctgtagtcccagctacttgggaggctgaggcaggagaatcacttgaacctaggaggtggaggtttcagtgagccgagaccgtgccattgcactccagcctgagcaacagagcgagactccgtctcaaaaaaagaaaaaaaactcagagctttgaagtctatcataaaagaaaggcatgaaatcaaagtaattgcagcattattcacaatagcaaagacttggaaccaacccaaatgtccaacaatgatagactggattaagaaaatgtggcacatatacaccatggaatactatgcagccataaaaaatgatgagttcatgtcctttgtagggacatggatgaaattggaaatcatcattctcagtaaactatcgcaagaacaaaaaaccaaacaccgcatgttctcactcataggtgggaattgaacaatgagatcacatggacacaggaaggggaacatcacactctggggactgttgtggggtggggggaggggggagggatagcattgggagatatacctaatgctagatgacgagttagtgggtgcagcgcaccagcatggcacatgtacacgtacgtaactaacctgcacaatgtgcacatgtaccctaaaacttaaagtataataaaaaaaaaaaagaaatcaaagtaattgtccaaaagtcttacttattgaatgagcagggctttgtctaaaaagaaacaaagtgggaaaaataaaaatggcttcttggcaaaatgatgtgcaaaatagaacaagaaaagaggaaaattgttgtctgtagcagataatttaaatgtttgtagataagtaagacaaagcagaatgatttgaagcttactttacccccaatttctttttttgttgttgttgttttgagacagagtttcgctcttgttgcccaggctggagtgcaatggcatgatctcagctcactgcaaccacctccacaacctgggttcaagtgattcgcctgcctcagcctccagagtagctgggattacaggagcccaccaccatgcctggctaattttttctattttcagtagagatgcggtttcaccatattttatccaggctggtctcgaactcctgacctcaggtgatccacccacctcagcctcccaaagtgctgggattagaggcgtgagccaccatacttggccctttacctccaatttctatattcaaggagaataatcttcagacaatacccagatgattaatctatgtgatgaaaacatacaggtgcttaatacattggaaatggtgaattgatgtgcggtccaaggcatgggaggagctggtgagatcactgactctctgtagaagagttaacatttctagtttgagacaaattacagccctacatactgaaatgactacagacatgattactaagaaacaccaagaagaggctgacttgtcaactaacaagtatttattgagtggctgctgtatgccatgctgaaagaaataaaaactcaagagtgaggaaggcagatggagttcatgtcttcatagagttttcattccactaaactagatagtaaaaaaaaagtacataaacaaataagattatctcgggcacttagaagtaaaaaaatatatttatggtaatgtaatagaagatttgayggggcaatcactttggctaggttggttagggaaggtctttgagaaagtgacactcaaattgagacttgaacaatgaaaaggaagtagttttatgactctatgaaagtattccaaactgcagaaacagcaaatacaaaagtcctgaggcaggaatgagcttggaggatttcaggagctgaatgaaagmtagcatggttagagcccagtgagtgatgggagactagaaggagacacagtcaaagtgctgggactagaccttaataggctccaatgaaaagattttattcttgttataatgggaagccaatgtagggttttaagcaggggagtgacatggtgtgatttayattttagaaagttcactatcttactgtgtggataataggtaataagggaacaagagagtagtcaaaaaaagccaaataggaaactgtttcagtagtcattatggattggtcgtgtccctctaaaatctatatgttgaagttgtaactcctagtatattataactttattaggaaatagggactttatggaggtaatcaagttaaaataacctcatcaggatgggcttgaatccaatatgactaatccacatccagtataatgccggcaggcacacaaggagaacactgtctgaagaggaaggcagacattagggtcctgcttctacaggccaaggaataccaaaaattgccaggaaaccaccgggatctaggcaacaggcattctctctcaacactcagaaggaagaaaccctgccagtaccttgatcctgaacttctagcctccggaactgtatggttcaaatcacccagcttgtgatactttgttatggcagccctaggaaataaatagtccagaagtgagatgatggtggcttggagtaggattatagcattaggatgggagagatgcttggcttccacttttttggaagaagattctacaggatttactgataaagtaaatgtgagaagaattaaggatgactcctaggtttggtatattagcgaaccgatggatgatgccttttactgagatgggggaagtttgtgaagcaacaattatttgctcagtgggagaagtgagaaatcaatagatttgtttaggtcacataaagtaagatgtttattacatgttcaaatgaacatcttatcttcacagttaaatgtattcatgtgaagttggtgggtggtggtgattgggtggaaatctgggctgggctggagatataaatttaaaagttatgaagaaatatttcatatatttgatattcaagtatattcatattaatattcacatactttatattcatattaatattcacataccttatattcatatttttcaaatatgaacaagtatttgttcaaatcaggacaggtatataaaccatgtgatgagatgagtgagtgtagacatacaagaaagccaagaatttggtccctaggaactaaagcattcagtagcctaaaaatgagctgaaaaaagagaaaaagagttagtctctgacatatgaagaaaacaaggagtttttgtgttattttagaagaaaatgaaagtatttcaagaaggatgtagtgataaaatactggagagggttccagtgggttgaaaactgaaaatacatcattggactgcaagatggaagtcattagagattttaacaagcrtcacttctgtaatgatcttgayaagaacgcaaccagagtgggctgaagagaatgtgggacatggagaggtgtagacagtgactgtaggaaactcttttaggaatttttctgtgaacagtggctggaatggagcaacagatgaagagggatatgaattcaaaagaatggggctcaagtttgtgatattaagacatggcatggttgctgaagggagtgatccaacaaaaaaagataaattaatgatgcaaaataaaaaygataactttaggagtaaagtctttgaaaagatgaaaggggatatgcttgttttaaaatgggagcaaagacatgtcctccaccatactcaagggaaagcagtgaatgtggccaaagaggcaggtgatttgttggaattgggggtgagacaaggtgaaagacatgatggcatctattttattcatgaagtataaggtgagatcagtaaaggatgacaaagatttggagacagagaataagctgtcaaatagttgtctattcacaatcagagtagaaaagtgactttactgtggaagtatattgaaagtgtctgattgtgttagatgctcatttggggtttatgatcatatattttatgtgacytcagttagcagacaggtgtatgatattctccaaagtgggtcaggtgttcaggtgcagatgcaacatacatgactagggagtgacaagactgaaagacacaggcaagtaaccacaacaatttaaaacgagagagctccaagtttctgaaagccccccaaaacaatgggattgcacgttaggccacctgctagctatatcctagacccagacrttttccagtggagaggagagggtgacggaaaacatttccayagagggcagggcagtggggagtatgacgtaaggtcagagtcacctagggatttttaaatccacacttgctcactccccagtgatgctgagaaacagcaccccatgggaggtatggagctaaaatggaaaatttttcttttagtggacattactattgatgggaatgggccaaatccttagagtagatggaatagaaaracaaattgtgagtgactggcacagttcatacactcctagaagataaagaagtaggcagaaggacacagcatgagctcagtaataaaaagtcaaaccaaacttctcacttccttttctcagtgcattaaaagactgacagagcarggcaggtgggcaagcaagaacaaagattttgttcttgggaataggagagagagatgtttasaaataggtggaagattattgagtaatattaagggtccaactgatgttgaaagtcaggcatggcagtaatctgcattcttcagtaatgctctccctcagtcctraagagcatagacataggattagaaaatgtgggctgagcgcagtggctcatgcctgtaatcccagtactttgggaggccgaggtgggtggatcacttgaggtcaggagttcgagaccagcctgaccaacatggtgaaatcccgtctctactaaaaatrcaaaattagctgagcatggtggcaggcacctgtaatcccagctacttgggaggctgaggcaggagaatggcttgaactcgggaggcagaggttgcagtgagacgagatcatgccacttcactccagcttgggcaacaggagtgaaactccatcaaaaaaaaaaaaggaaaggaaaggaaagggaagggaagggaaaggaagggaaaggaaaggaaaaatgtgatcttgactttggaggcctgcccagtgtgttggaaaaatctagggaggaagaagtctaaggtcctagtgaaaagactgaagtgagaagtgatgaacccagggaacgaggtaagttgagggaaggaaaggaggcgagggctgggcgcagtggctcacgcctgtaatcccagcactttgggaggccgaggagggcggatcacaaggtcaggagatcgagaccatcctggctaacatggtgaaaccccgtctttactaaaaatacaaaaaattagccgggcatggtggtgggcacctgcagtcccagctactcgggaggctgaggcaggagaatggcatgaacccaggaggcggagcttgcagtgagccaagatcgcgcggctgcactctagcttgggcacagagcgagactctgtctcacaaaaaaaaaaaagaaagaaaaagaaaggaggcaagaaggagactctttggactgagatactagggcagaaagtgcagccaccaaccaaaaatcttgttggattgaagagctgstgtgaagggaatcaagacatgggtgacatggcaggagtatgggttgtggtcatatagtgggaggacagtttttcacgtgggtttcctggagaggaatcagatgtttctgaccattactagctgtgtgccagcctaggaagttcattcttaagtctttcagaagtggaagaaagcaggaaaattgcttgctaaattacccatgaaagtcaaaaccattcttccttagaacttttgaaagcgaattgtcactaggacatatggggcttgatctggtcaaccatctcatgattttaaattttcatttgggatttttatctacctcttcatrgcagagcaaaacaaacttgtctttttcccataaatataattwaaaaagagacaggctgaggatacccaccaatgggtcactctaggccctatcaaagtatgggatcaggatatgaagtaaatcccattaattgctgtaattgatagctccaaaagggagtatggcatacaattagaagttcccaaaagtttgctactcccctggagatgttataaaatagaatcagggttattagcccacattcaagcaaaagyttgtttaaagtggggcattttctaacttcttctggatagactaggcctctcttcacagttttgttaaatttagtgtttcatgaaacttaccaaggcctttaatattatgtacgtgcctttaattataagcacatatttcttctctattgcaagatttctcctgaactttacagatctgtcagtgaaagaggaaacttggataccacatgtggaaataacaaaagtgggatatgaacctcaattaactagcacataaagagtgctgttccctgaaaaaaactgttggattcatttaggtaatcatcgcttgatgaatgtactcttgctagtgtaaccttcttattaccatggagttacaaattaggtctgcaaaagacatctggaaacatctggccccttctaaagcaataacattccagtgtgttttttgacatactatgcagactcttccaataattctggatcttacacattgaaagctctcaagcgaaggtgctagttagatttttttaatgctttatttcccccaaaatagcaatcaaataactggatatacacatttccattttataatcactatcacactgtaatctaattacttgtttaaawgtgtgtctcctcactagattagccccttagagaacaaaacatgtatccatctgtgtaacttccttatgaaactacaggtatgtgctggaactgtatcctctacaaacaagagtactaataggtgagtagctttctttaagaacatttattgcagtattgttaaaatggcagcaaactggaactaaaccaaatgtccatcaagtggggaataattttaaaacttatartaaatctrtagatagaatattatttggcttaaaaaaaatgagttagagctgcatcagttgacctggagagatgtccatgatatattgctacatgagaaaagcaactaacaaayggaattatagagtgttattccaaattgtaaaagtaaacaatgacggcttgtgaaaaagataggtgtttatgattgtgggagaatattcataatgcactaacaggggttaccttaaggatgatcaggaattaaggtaaatgagtgtgggagaatagtgctagcaaaatgcaaaaatactcatgccataatgctaagggaaaatgcagaatgcatgattttagcaatagtttttttaaaagaaaagtttacctttcggtgtcttactggttgatgccaggcatagttcttaaagctctacatagactgtttcacttcctgcccgcaccaactctgtgaggtagggattattatttctttaatttcacataacagaaaactgtggtccatagaagttactgagctggccagtggtcacacaataattggctaagctaagacaaaataataacaggcaaataggcaaaaaatgaaattgcatttttttcctagaaactaatcagatcaaatgaaaagtatccatttaattaagtaatagacctgtggattattttttgcctcgaatttttgctattatttaatattacttcatttaaataaagtaaaattactaaaaataaatacaataaaatggctagtatggtggttttcaaaacctgtcctcaagtcctttgatgtgggaggtctgtgtttcttccctttgaattaggtggggcctgtgactgatggctctgggcaaccacataggagaagcaacattttgtgcttttggatgctgagtcaaaaaaggtaatacarcttcttcctggcttcctttttgggaagcttgctttggaggatgccagccaccatgaagtgagtctcatacagagaggaactgaggccccagccaacaggcagcatctactgtcagacttcagatggtgccagcctctccctagctttggaatcttctagctgaggccccagaaatcacagagcagagacaaattacgccaactacactttgtctgaatcttcagtgagcataataaatgtctgagtttttgtttgttgttattgttttgtttatgtttggttttgtttgttttgttttgctacaaattacatagcaacagatagctggaagagattctgcagtgatgttcgtcagtttggggtaggttttcccttagttttattcttctgctctctttaggcatattgtggtggttaattttatgtatcaatttggctgggccacagcacccaaatatttggccaaacattattctatatgtttctgtgaaggtgtttttttttatgagattaatatttaaatcagcggactttgagtaaagccgatgacattccatgatgtggatgggccttacccattcagataaaaatcttttttttttttttatactttaagttttarggtacatgtgcacattgtgcaggttagttacataygtatacatgtgccatgctggtgcrctgcacccactaactcgtcatctaacattaggtatatctcccartgctatccctcccccctccccccaccccacaacagtccccagagtgtgatattccccttcctgtgtccatgtgatctcattgttcaattcccacctatgagtgagaatatgcggtgtttggttttttgttcttgygatagtttactgagaatgatgatttccaatttcatccatgtccctacaaaggacatgaactcatcattttttatggctgcatagtattctatggtgtgtatgtgctacattttcttaatycagtctatcattgttggacatttgggttggttccaagtccttgctattgtgaataatgccgcaataaacatacgtgtgcatgtgtctttatagcagcatgatttatagtcctttgggtatatacccagtaatgggatggctgggtcaaatggtatttctagttctagatccctgaggaatcgccacactgacttccacaatggttgaactagtttacagtcccaccaacagtgtaaaagtgttcctatttctccacatcctctccagcacctgttgtttcctgactttttaatgattgccattctaactggtgtgagatggtatctcattgtggttgtgatttgcatttctctgatggccagtgatgatgagcattttttcatgtgttttttgtctgcataaatgtcttcttttgagaagtgtctgttcatgtccttcgcccactttttgatggggttgaatagaacaaggactgacctctccagcaagaaggaattctgccagcagattgaactgcaactcttgcccgatcttcctgcctgccacctacctcatcaggttttggattcaccaagcctccagaatcacataagccaattatgtcaaaacaaacctttgtttgtcatcattgttttgtctgtgttttggtttggtttggtttggatgggctcaagtgatcactcttcctcggagccaatccagttcaattaagttcatttcccattgctacccctctaattttctcaccttgttcagcacacagaagagaaatcttacttctgctatgacaaggctgcctagatttggaaacataaaatggcataacataacctctctctctctctctctctctcwmtatatatatatatatatatatatacacacacacacacactctctctgaatagcacacatattacacacattatacctttaactctgcttcccaaactactcaccagttgcgcctgcatccaaacctcattgtagtatccaaataaatcacttctgtttaagttattatatatgtgatatatttaagaggtctagaaaagagactaatagtagcatagagtcagtcttctaaacttctttctctctcttaggacaaaaattggaagcaatatgcagccatttccaacaaawgagcagccyacatattagatggcaacatcaaggatagaaaactttaggaagataaaggcctgggaagtagattagctgtggctttcgcctggatgtggcttcatggagttacatatgccactgagaattcccgagtgacaaagtgatcaaatccaggcaaaggaaaaaaggaaaggtgcagcttacccctcgaagcagtgggcaactgtcagaacccacttcttggcaatgaggacacagccacagatatgtccactgggttcactctgcagagaacactgccatggccaccttccagggcgactcgtccgacctccaaggatccttttgttcattcgggcagcagggcggcgcccacagtctaccaaggagcagaagacacagtttgtgagttgatgccaaaccttgctaaatgcttagctctttgctgtcacttacaagcgatcactcttcccctgagccaatccarttcaattaagttcatatcccattgccacacctctaattctctcaccttgtttagtacacagaagagaaattttacttctgctctcacaagactgcctggatttggaaacataaaatggtataacattaagttacatatttcttgttcaattcaaacactttacyagtgaaatacaagacagctccaactgttaccaccagaaatcacattctctgagcatttcctgtgttaccacaggaaagcacattcctcttggtgcaggaattctcaaggcaggagtgtggtcagatattaatcatgttgtaggcaggagtatatggaatatatatacttctttttttagtttatttaatgtcatcataatttaatttcacatttgtgggaaaagaaactattttaacaaaatttcccacatcattttggctggtggaaccaccacaatgcaaattcaaactacagttytcaaggggagatgggagtactttttagagtcagtggtgaggaggcagcatgtcagatttttatgcttatacaaagtggtgtgtrctcaaaacaagttgagaaatactccaagatgagtaaaatatgacttcagaaatttgaagaacagattaagaaatggaatatttagactggaaaggagtcttaccaagactctcaaggttaaatttctgctatatgagaagttgacaagaggaaaagtagcttaaatttgyttcatataactttagacgacatgatcagaactagtaggtgcaatttacaagaattgtgggttcaggaaaagaattttctaaaatctaaattcaactttgaatgcaagaacatggtccctgttaaaggatctttcaatgtgatggcacaagataattcagtttggggtagaaattttaatcactaagttctcttccaaccatgaaacatttacattacaacctcaatgtaaatgaaaaaggacaataaaaatccatattgggaytttcaaaaatactatgatgtacttagaatcctagatctatcagattgaaaaaaaaaaatscaaccctaaatatataatttccacattcctttctgaagatttactgtattttcatttcttgctaaatttatgtaggggcaagtgcaattatttgcatacaataaattatgtaatacaggaaaagctcatttgctttctaccctcccacagtctaaaatcctctcttccttactctctattacattattctaaatttatttgcagcacttaccaaagyctaaaattatttttactaatttataatctttattttcacccccatatagtgtatgttccctgagatgagggccttcgtttcccctcattcacttctacatcccctcaaagcctaatactgaacttggcattaaagaaatacttaataattagttgttatttgttagattgaaaacacatagctcttaggaataggaaaagtcatcaaagactattcatccaacttcttagtggaaattgcagttatataagataacacttgtagttagtaaaccaggactagaaccaagtttaccaactcccaatctagaatgcrttatttatttatttatttacttgacctgaaaggttttttctggaattacaggtttggggaaacaaatcacttggttaaaagatttaggtcattgttttagaggaagtacttcaattgacaaatattcagaaatttggctgcagagtttgttytatgaggaaaatgtcaagaactttttaagaggaaatggtccatttttagttttcctctttaaaattcttaagaagtagcaacatttatgagcttcagagtcagatatatttatttagagttcagacactatcacttagcatctgtgggctgtgagatttgagcaagttatttaaatattcaagctgtaaaatattggataatcatccatggttcacaaatctattatgaggtttaaaygagtcagtgtatataagattacctagctgtgtgcctataaagtaataagaacttagtaagtgtaaatttcctcaatttatcttcctcctacaccycacccatagacaagggaagcaaccctgtttaagatgcaatgattttttagggtaaacttaagtgtactttcaaggcaacttgattataatttcatttttgtgtctattcctctcttagacattccaagttttcttagttatcattacttcagttccctctgtttactagttctatgtagcatctgcaggaaatgcagacatgagggtttattttgaataagatatkaaaagtaatccaagattagaacccaagttcctctctcctcgccatgatagtttctgtaatcgtgaataaaagagaaaaaaaatctaygtctagaaagaagaaataaaagcaaccaatgttgaaatgtaaaggcaatagtaaatctatggaaactctttactgatatgacaaatttggattatcttaagttaaaaaatggaagaaaggcccaatgataaactcttgctctgtaatctgactctacacagctcttatgaatgcattcttacccatttactagaagttcatgtaaagtggtcccattgaggctctcccagttggagtgtaatgtcagccaccgcggctctttctcctgttcctgtatcaatttggtcacagatggttctctgatacaaggcaaatactggataagtattcaaagtacaatgatctttgaacaggcattatcattatttagcactcattccctttcaaaaagaagcactaaatcatgtcaacatttcaagaggagaatttggactgttacaaattgttagagctgttttagtyattctccctgctgacctgtgtttgaactgcatgaggtgttaggattataatgtgtatgatacaaaagttccaacaggtaaaacataagaataactttaggcagagatcaaaagtaaaataaaatgtatctagctaggtttttttcctcctcttttcttgtccattgtaattctgcaatatagcaatataaaataaaataaacaacacataaagagaatcagtggccatttagcatttatttagacagcataaaagttgtaagaattgtaatatttctatgtttgtaggttgttgttgttgttgttgttgttktttttttgatgaagtcttgctctgttgcccaggctggrgtacagtggtacaatctcggctcactgcaacstctgcctcagggttcaagtgcttctcctgcctcagcctcccaagtagctgggatcacaggtacatgcaatcacgcccagctaatttttatatttttagtagagatgaggtttcaccatgttgtccagggtggtcttaaactcctgacctcaagtggtctgcccacctcagcatcccaaactgctaggattacaggcatgaaccatggcacctggcctcatctgattattatttttaaactattgtaatcacataatagaaaatggacaaaaacttcccctaactcatacttttaaaaaggcaaggaagaaccctctaaagggaatacttgatgatagaataagagccaaagattaaaaacacaagagtatttcataatgaatgaattataaacatttgattttaaaacaaatgtcatacatcctagccacaatgaagaagagtggcttaagatataaatttatttagaaatttgaattgactgttagattaccgaagatatcaaaaaaacctcttacaaaaataagaatttttctttttcttggccaaaatgaatcyggctctccatcaattccagaagttctgaatgcagaggcaaagtgagatggaaagtataaaagtcagaggccacacatactggtcatggtgtttctcctgataacctgcatcctgagaattcccttctgcsatagaactacctatggacctcctaaatccaggtaaagccaaaagaagataaactttagattttgttatttaatcaggtcattcttaaatcaggtaktcatagggcaacaagatacttgcatggggagtgcaattaggagagagtgtgcactgatgctggataggaaaatcattgcaaggaacaccagcctttcaactcaaaaggcccccagctgccctgaggaagggctccacagacatccacaggatgtttttgcatttcattcattagcttccaagargaaaggcaatytagatggaatttctcagttataagtggaaaatttaagaaattaatcatcaaggataggggagtatcattatgaaaattaggtttccatgaaattcttgaacactggcatgtttctcatgcacaaacataaactttcagcaccagaaatgtcatccaatggcccatttaaaaaagtcagtgaatttgtttggttgtatttctgccatcgtacagaatctgagcatctccataacttcaatttccctttcktttttttccagctttattgaggcattcttaacaaataaaaattgtacrtatttaaggggtgtaatgtaatgtttgatatatgtataccttgtgaaatggctaccacaatcaagctaagaagcatatctatcaccacatagttacgtgtgtgtgtgtgtgtgtgtgtgygtgtgtgtgtgttaagaacactaaggccaagaatcttagcaaatttcaagtatacaatttagcatcgttaactatagtcaccatgttgtacattagatctccggaacttattcattccacattaccraatctttgtaccctttgrccatctccccattttctccatcccctagtttttggcaactaacattctactctctgcatttacaagttgacttttttagattccacatataaatgagatcatgcagtgtttgtctttctgtgcttggcgtatttcacttaatatgtcctccaagtttatccatgttgtctcaaatggcagaatttccttctaagaatactgagtagtgttctattgtgtaaagaaaatgtrgtgtgtgtatgtgtattctttgcataaaatttctattgtataaagaaatatatattctattgtgtaaagaaaatgtggcatcacattttctttatccattcacttatcagcaaacactgaagttgttttcatatcttgggtattatgaagagtgctgcaattaacatgagagtgcagatgtctttttgagataattatttcctttagatatatacccagaagtgggattgatggatcatatggtaggtagttctattttaaattttttgaggaatctccatactgtttttcataagtactgtaccaattaacatttctaccaagaatatatagggtttccccttctccacwtctccccaacattttttatgttttctctttttgatgataaccattttaacagatatgaggtgacatttcattgtgattttaatttgcatttccctgatgattagtaatgctgagcaccttttcttatatttgttggccattctatgtcttccttttagaaatgtctgttcaggtccttagtccacttttcaatcaggttatttggctttttgctgttgaattattttagttccttatgtattttggatactaacctcattggatatatggtttttttaaataactttgaaaattataaaagtaatacttgtacayagaaaaatatatcgacaattataaaatgataaagttgttttcttctcctatcatatcaacaaytataaaatgaaaaagttgtcttcttcctatcttagatgcatagaaacaaccactgtaaatagtgtttgagtatctttgtcaagctctttctacaattcatgtatacatttccctcctttgctacacacgttgttctgtgtggtcttgatactttcacttagtgacttatcttagaagtctttccaccataacagctaacaggtgttaactgttttctatatgacaagcactaaaagactaacttgttttatttaatcatctcaacaactctgtgacgtagactttataattatttcccattttggagatgaaaaaattgaggtagagaaaacaagtaacatgcccaaggcacaaaacaagcagacggcaaagctggtaatttaatccctatggtctcatatcagagtacagttcttaaagtgtgaaccctacacagttctcccccattgacagcacaccatgttcttttgatagctgcatagtgtttgttacatggatgttcatacatttacttaactaatctctgcacacataggtttgggggtatgataaaatagcagcagttaatatcrtaaacattcaccttcgcctacatgcaaaagtatgattttggaataaattcctagaaataaaatcattgaatcaaaatttgaatttttgattggtattatgaacttccatttcaaagaataatagtaatatacatgcacatcaagaatatgtgtgcctgtacttctccatttttaaaactatgtaaatcatcttacgtaaaaggtggctggaacttaagagctgctcaaattttgtttgatgattgggattgcttttgacttaaataattgaaaccgttttrtattatatgaaaagacaaaaaagtcctgttgtgtagaaagcaaaagagaaaatttaagcatcaaagtcactgtatcctaactgagtctgtgcaggtaatacagactcaaaatgcttccatagcatctatggattcatacacggagaaggaaattttagcaatgatctaatccagcagctagggcaagagtaccagtggaggcccaatygccatttgtctacatatttagaagttataaatcaagttatcaagctgttaaagaaaatttctctcctcctctcttgacaaacacatctgttaggttcaaatacagaactcttggactcctgagaacagtgggtttcaaactttagcattcatcagaatcacctggaggacctgttacaacacagatttgttggcctcatccccagattttctgattcagttaagtctcagatgggacccaaaatctgtctctctaccaagatcacaggtgatgatgatgatgctggtctgagaccgcactttgaaagcatcactctagaaaagggatgaggctccatgtgagcagaactccttggctaacagagtccttaccccatggggtgagctagaggaggagggcyggagggtgcctmtaaatcagggtttctcaccctaaatgctattgacaagttataccagttaattaattgctatgtagagtgattcctgtgcactgcaggatgttttgtaacatccctggcttctacccactabcaagtaagaccccatcaaccctggatttacaatttaaaaaataatgtctacagacattccaaatgtcccctaggacaggggtccccagccccagggcccctgttaggaaccaggccacacagcaggaggtgagtgcggggcaagccagcaaagcttcatctgtgtttacagctgctcaccatcacaggcattactgcctgagctccgcctcctgtccaattagtggccttagattctcccaggagtgtgaatcctattgtgaactgcgcatgcaagggatctgggttgcgtgcttcttatgggaatcaaatgcctgatgatctgtcactgtctcccatcaccctcagatgggaccatctagttgcaggaaaacaagctcaggtttcccactgattcaacattatggtgagtagtataatgatttcattatatattataatgtaataataatagaaataaagtgcacaataaatgtaacgtgcttgaatcatgccaaaaccattccccccatcccatcccagtctgtggaaaaattgtcttccacaaaaccagtccctggtgccaaaaaggttggggattgctaccctaggggcaaagtcacccctggttgagaaccactgctctaaatcatggagcccagggcaaggcccctctgctctgggcctgaaggcagtgctatacagagaagcaaaaggatttgccttatatttgcttcttgaggaattgtgtagtcataagacacacatacaaatatatcacttttctgatgctgaaatgagagaacagagctcattaggagttctggaacatcctgacattatgagagggattaaatatttcaaggcttaggagaacagccagatccctagacaatttggcctactctcccatcctcaagtcacttcgtttagtaataaatatcccatgcttgaattatgattatgttggggctgcttacttaaaaaacgaaggtcatcacaaattcccccaaaaccagggcttttttcttacctctaacaacaagacagaagtgcaggaattacctagacatgtaacacacttcagttgaaggataaggtttgtcctyttccatctattgatgggggaaaataatctaagcatccagcctcagtccttgacagttcatcttgacatataaatgcctttcacagtggataagataaattttttgcaattctaaatatcctgttycaaacttgaaacatttatactaaacattttgtrtctgatttcaaaaatctcttcttgaatcttgtcatattctccctgtttgggtcccayagatttgacatactaataactgaaagttattgtgtcaagtagaaattttaacaggcaggtactaataggtttcaaacaaaacatgaatgaactctgctacagaaacatttctcaggctggatagctcagttcaatgggagtttatacagcaaaactttcatcaatagaaatgcttaaagcagagcataagttctgagcttatttttctagttaactcagtattttaaaaacactttttattgcaatcctaactgacaatrgatgatagayagatagatagatagatagatagatagatagatagagatagatagwtagatagattttttttttttgagatggagtctcactctgtcgcccaggctggagtgcagtggcgtgatctcagcttactgcaacctccaccttccaggttcaagcaattcttctgcctcagcctcctgggtagctggggactacaggctcatgcsaccacgcccggctaatttttgtactttttggtggagrtggggtttcattatgttgcccaggctgrtctcgaactcctgacctcaagtgatccacatgcctcarcctcccagagtgctaggattataggcgtgagccactgcgcccagcctataattttattctttgactatgtgtttgtcyatctcagagatggagtgtagtaactgtattaggcaaggatctataggtacaaatgacaaaactatctcaaagcaaaggggggaggttaatggatcataaaattaacttgcagagtatttatatttcataaaataaactaataaacaaaactaaatatttaatccatttccaatataaaaattacaaaattgtaatgtgaactaaaatttaaatttataaaatatgactgttaaatatacattatcattctaatataaattagaaaacaaaattaataaaataaagcaccatttaaaataaacatcttattaaaagtgtaaaaataatcaatcataaacattttgaatgaaaayatcatttgaacatatataaaattcagtcttataaaataaacatgttgtaagaatatttttgagcagaagtgtctacctcttttggaatctatgccagtccagmtatttccttctggctattttattttcaaaaatctcatctccttttttcgagaacttgaccttttgggacaacacttttttttgagagacagaaatgcaacattttattgacaatttaattttagtttcaaagaaaatatttcttgtttatcttcacatcttttgtttcatcatgtaaagctagagattatcagtttcaatttcaacatgactttttaaattccagttcttcagaaagactgtgaaccagagtagaatgtatttttctaacacaagtcttgctttgttggctgctcttctcttcttcttgagtataacaggaatataaaaatgctttctaaaaatacgtgcatcacttttcacttcaaagttttaagtcagtatataactatatggatccattacaagataaattaattcaaaattmaaaaaaaattaaacaaatattgaattaactaaaaaatyggcattttaaaaatgcctaaaatagtgctggaatatatgagtatcaaaaagtggaaatgtaattgattactaaagagatgtggatggtcttcaggatgattgwtgccagggaaccagtaccctcaaggctcttcagctcgtctccacttccttctgtgttgtggggaggagggcaaaggggatggcagcttgattggcttaaagtaacttttctgcaagccaaaggactggttgcctacagctctaaactcacaggcattcgtctttataaccaaaaaagaaagaagtcatctctcccaggtccaatcaaaataaatcttgggccgggtgtggctcacgcctgtaatcccagcactttgggaggccaaagcaggtggatcacgtgaggtcgggagttcaagaccagcctgrtctacatggygaaaccccatctctactaaaaatacaaaaattagccaggcatggtggtgagcgcctgtaatcccagctactcaggagtctgaggcagsagaatcacttaaacctgggaggtggaggttgcagtgagccaagatcacaccattgcactccagcctgggtgacaaaagcgaaactctgtcttaaataaataaacaaataaaaaccttgttgaagatacaaataaaaatcttgttgaagaaacaagtatcccaaaaccaattactttggcctggcagtaagacactttgattggtccatcttgggataggtacctacccctcaaccaatcccagacccaaaagagaaagtcatgtacaaagaaggttgctcccatttggagcccaaggataaaatgggaagtgaagtaaatatcgagaaggaagggatgtaggtcccaaaggaagggaggaatgcagagaagcaacacaatatgtgcccgctgcatgtgatcttaattgaaatgtgttagttcattgttcttgagagtcaagattctacatgttcttcagtttgtatgttagttttaagaagacataggaaatgtaaaagattaggttgaaattagatttgacatgtttattaatgatacaatgggttaatcagtgagtgttcaagctgayataaagtgagttggagctcagaagaaacattatagtgacactttaaacaagtgacagagccagatagacaagggttaaaactgatgcttasaggttaatgaggtgggacagaaatggagacaacagattggtgttgtatcagatggagtccctctctgaggrgctattattttagttagaggaacaaattacaaacatgtaaaaaactattttggatactgataagttgttggaataagacaaaataaccaaatgtgatagagttacatgctgagactgaaagctgcctcaagkaggattgtcaaagaaagcctaagtcacagatgtatgagctgagacatgaatgatgaagccctagagttctgtattctatgcaaaaataacggtgaaggaaagtttgaaatgttttatgcttgaaatgttttaacatcaatattaaggtcaatgtgtctaaagtttagtgggcaagtggagaatactaggatatgtattgggtcagagaggaaggcaggggccaaattatgcagtgtctgacaggtcagagtaagaaatcagattttcagtccaaactgtaaaatagtaagaaaagaagaccaaaggcttttgcatgttggtaatattattgctgtcagtcctgtctttcaggtaaaagccagattgcagtaggttttgaagacaacatgaaaaagacaccttatcagaagttaagtcattactaagggtctcctggcatatctagcttcaaaagcagactgcttccttacaagggcttctaacagaaataatacaagccctctttggtcaactcctgatggattattcaagttataaatcatgttcttatttacccaggatccattcatatcatgtccaagacaatgctgcaaccatggtgatgactgggagtaaattttaggaggaagttaaagtgtaaacccttataccagggattattagggactagtaggtaatataatagatgttgtctttgtggttttgcccagatacagaaatattctttgaaaacaatgtttgaccaacttctattgaccaacactaaaagattagggcataaaatcaaattgcaactaactccataaaagcatttttgccaaaatcatatgacccagacacactgtttcccgattatctaactttagataaagcttgtggagcccagagatataaagagtcayctttcccttagactaactcactcaaataccagatgtttcaactgagcatttggcaaatattagaaggcagtctaaactctgatttgtatcatcaattaaataaatgtccataggttttttgatactgaacatgcaagtagcaaagtcaatatgctgttgacatgatttggctgtatccccacccaaatctcatcttgaattgtaactcccacaattcccacatgtcatgggaggaaactggtaggaggtgattgaattatgggggtgggtcttcctgtgctgttctcatgatagtgaatgagttttaggagatctgacagttttaaaaatgggagtttccctgcacaagctctctcttttctgtgtgctgccatccacgtgagatgtgacttgctccttctcaccttctgccatgattgtgaggcctccacagccatatggaactgtaagtccattaaacctctttttttcttcccagactcaggaatgtctttatcagcagtgtgaaaatggactaatacagtaaattggtaccagyagagtggggtgctgctgtagatacccaaaagtgtggaagcaactttggaagtgggtaacaggcagaatttggaaaagtttggagggctgagaagaagacaggaaaatgtaggaaagtttggaactccctagaaactagttgaattgctttgatcaaaatgctgatagcgatatggacaataaagtccatgctgaggtggtctcagatggaaatgaggaacttgttgggaaccggagcaaaggtgactcttgttatgttttaccaaagagagtggtggtattttgcccctgccctagagatttgtggaactttgaacttgacagatgatttaggatatctggtagaagacatttctaagcagcaaagcattcaagakgtgacttgggtgctgttaaaggcattcattttcataagggaagtagagcataaaagttaggaaaatttgcagcgtgacaatgcaatagaaaagaaaataccattttctgaggagaaattcaagctgrctgcagaagtaacgaggagcagaatgttaatccccaagacaatggggaaatgtctccaggacatgtcagaggtcttcatggcagcccctcccatcacaggcccagaggcctaggaggaaaaagtggtttcatgggctgggaccagggtccttgtgctgtgtgcagcctagggacttggtgccctgtgtcccagccatgacagctatgactaaaaggggccaaggtacagctcaggatgttgcttcagagggtggaagccccaagcattggcagcttccacatggtgttgagcctgtgagtgcacagaagtcargaattgggatttgggaamctctgcctagatttcagargatgtgtggaaatgcctggatgcctaggcagaagtttgctgcaggggtggggccctcatggagaacctctgctaggcagtgtggaagggaaatgtggrgtcagagacccccacaaagaatccctactagggcattgcctagtggagctgtgagaagagggccaccatcctcaagaccccagaatggtagatccactgatagcttgcaccatatgcctggaaaagccgcagacactctatgccagctcatgaaagcagctaggagggaggctgtaccctgcaaagccacaggggcagagctgcccaagacccatgggaacccactttttgcatcagtgtgacccagatgcaagacatggagtcaaaggagatcattttggagttttaagatttgactgccctgctggatttcagacttgcatggggcctgtagcccctttgttttggccaatttctcccatttggaatggctgtatttacccaatgcctgtacccccattgtatctaggaaactaatttgcttttgattttacaggcttataagatggaagggacttgccttgtcttagatgagacgttggactgtggactcttgaggtaatgctgaaatgagttaagactttgggggactactgggaaggaatgattggttttgaaatgtgaggacatgagatttgggaggggccaggggcagaatgatatggtttggctgtgtctccacccaaatctcatcttgaattgtaactyccataattcccacatatcatgggaggaaaccaatgggaggtgattcaattatgggggcaagtctttcctgtactgtcttcatgatagtgaataagtttcacaagatcatatggttttaaaaatgggagtttccccacacaagctctctcttttttgtgtgccaccatacacgtgagatgtgacttgctcctccttgccttccaccatgattgtggggcctccccagctctgtggaactgtaagtccattaaacctctttttcttcccagtctcgggtatgtctttattagcagcataaaaatggactaatacagctgccatgagaatttaggggcttgatttatgcattcttctaatcagagagccatcatacttccaatctgggctgaactcttgagatagcaacagatgaaagcaaaaagttttcaaattcaacaaagaactctaaatcttctcatctagacaagcactgagttgagagcctagcatttgagcagcaacacatgaaaggcataatttgggtctaaaacatcctaagtgcaggtgttttaaatcaactgcctctatcatgaaagcatttcagtagaatccctgcaacccatgaaatttgggagacctgcattcttgataaattscctccaaaatataccycctgaagtagaagaatgatccacttggaattagggtatgctggttccrgaccctacatacacactacaatgccgttctctataaatgtttactgaatgaacrgatgaatgaatgagtgatacaacaaatttatactatcaagataagattaaagttttatgtttttcttgtataattttaatagaaatgccatgttctatgcaataagtctacaccattctctgatggcaaaatatctggacttttttctaactttgtgttcttggctgtttacctacatgtcttccccactccattataaactctgatgatgttattcacttttgcatcctcgacccaatgcctagtccagtacaaggcccataagcagatactcaaaaataaaaagggaaggggaatgctgaatggaattagttgggagttgctttttaaacttcaagtttttgatgcagaatatgtctgaatgtacaaaggcaggctggcataaactccactccagaagctaagaaggaacaccattcccacttccctccttgtgcagcataggccaatcatggccagacaaacccttctagcaagggctttgatctggaggaaatgactsaaaggtgcagggtgacttagagtttatttgaggcatcggtggcagaatcatgaatttgcagcacagcagctggtctcragagacagtggtcacatggcagctgcctgagcctgttccctcagcaggaagatagcctcatcttgaccattaccatcattcccggcatagcctggctctccagatttctgtcaattcatgagccactcaagtcaactaaagagtaaacttcaaggcaactaaaaagttcaaaaactactagtactcatttctttggaggacttatcaccacttacccatttttcccattaaatcagtcaaataatggatatggktttccaaccacacctctatctcagattttcctagtccttctgtgaaataaaataatctaaaataaaaagtatctgcatgtctatttgaattttatatatctaaagatatctaaaatactgaagtttcattttccagctatgttgagaaaatggagcaaatggagtacataattttttaaaaatccactgtgcacacaatagccaaaggtgggaataatccaaatgtctgaatggataaacaaaatgtatatccatttaatggcatattattcagtcacaagcaggaaagaagtactggtacaygctacaagacagatgattgaaaatgtgctaagtaaaagaaaccagatgaaaaggcctcatgttgtatatttccatttatattgaaatatccagaataggccaatttatagaggcagaaagcagattagttgttacctggtccagtgggtacgagaaaatggagagtaactgcctagtgagtacacagtttccttttgggataataaaagtgttctaaaacaaagagtggtgatggttgcacaacattgtgaataaagtaaatgccactgaattatacactttaaagtggttaaatggtgaattttatggatgtgtattttaacacaataaaaatcccaatatgcaaatatttagaagaaacataaagaagcatatttaaaaacaggaacctttctatttacaatagaacagctatgttcagggtggcttgtcaaaaggactttctggttgtaaaatctttgcagtttcaaccttataccaataaggttttatcgagaagaaaaataaaaataaccatattcaaaagatttttcatttatctctgaacacaatcataacctatttcatttagacacaataaggaagttgtgagaatgaagtctaatttaatagatcttggcaaatataatttttccactctcacaaagtttaaaattcctttattatagatgagcattagttattcaattcctaaagatgttggtcttcacatgggagaaatggactcaagatggtgggagctgcatattagtaattctttaaactaggataacaaaaatgtgctgctagttgctatcccataactgcatgactcattattgtaaaattgtttcaagtttgttcaatggatcttaggaaatggcatttactcaattttttatttagtctagaattttagaactcctttgtcttcaatttctctaatttctacatttcccccaaatctcaaatacatcaatggtaaaagaaatacttacacattctaagaccctgaaaattattgctttccacccccaatggaattgaaaaagaaaaacctcacaaaatagcaagtatctaactttcaaaggatccatttcagtatatctgtatcaaagccagagtgaatcttttcattctactaagaagcaaatatactgaactatttcttgatttacatttactgccttacttagagtaaacagaaatgccagcaacttcagcttatttaaaaatgtgtgttgcwtaagaagaaattttcaataacctcttggggggaaattacaagatattttcatccagattcctcaaaggaaatgattgtaatgcttttataaataatgaaagcatttcattgcagaagtacttaaaatacaattacttcatttacttttagaggcttcatcaaagtacatttccagcacacactcttcagggcaggtgcctataattaaatatggtcctctcacctgattcatttcccgggttttgaaggactctttgtttgagagcactaactctctgtgcatcctaaggaagatattactgccaagttccacaaagccttctgagaaattcatcagtgctacaaactactgaccttaccctaaacccatctgcttgcaggccagctgactcaatatctcctgccagccatctgcacacacatggtgttctgtggcagctctgtgaaccatcagaaaggaagaggagttcacatttatagagagggtcactagggaaagaaaagacaagggaaaccctaattaaaaacatttcttcccatgaaagcacataactttacatgcctctgcttcattggcatacattcattttcatttattttagttaatcatttgatgtgtacctaccctgtgcaaatcactgccttcagtgtgctagagggctaaaaaaaaaatgaattagaaatgttctctaccctcaaagaaccgtagactctaatgaaagagacaggcagttcttaacttttcttaatgagttagaagacagccagagccaggcctcatcccatgagttaaccaggatttgcataattacaagaagcgagttgtaaatctatttctatcatttccttcaagaaagtatacgagaacgcaagtgcgtgagagggatgcaaatttaggattaatttggtatatgtgttaattcctattatataaaggagaatcctctgtacttaaccagcctcagagcacttaggaaacgctgcacaattgatcacaacacacatgagaatcatgatttggctggatgatgcaaaggactgagaaagagctgagtgaatggaaggagtgatgagtgtgggatgaggaaattaatcaaactcaagatcacaaactgcaacactggaggtgctggtaggagatgtctttaattcctgtctgtgtaaggagctagacagttagaagtcttggacctgaagagtgtagggaaggcagaggggccacttgactattctattctagcaggtagaggtgacaaaagaatggcagactatcattaaatttattgaagttgggttttaatgaagagtttttaaatcctctcccagcaattatatgattacaacattttgaacccaaacgtttttccatacaatatagatatttcaaatagagaagtagcttcgtggggaaattttctgtgagttggaaataacacacatagatcagcactatcagcttttataacagtaaaacaaaatagatgaacttggtcagtaaaatccaggaagtaatttaggatccattcagcttcagtggctgacaggcatgagagagtacaacagatggcagaaacaagtagctcaccacagtcccattcatctgaactgtctgagcagtcggcttcaccatcacaccacaggtcacgtgacacacacgcatggtttgcacattccagctcatcatcttggcaaaatgctggcatggggaacaaaaagtgagaaggaaaacattttagaaataaatgtgattatcactaacatgcatatcttcatgtgccagcaggagcatggaaagaagaaaatatgtgatcactgaggcttccaaacgggcataaaaacagaataacataatttgtaaaatatcatttaatagacatcaatacatacaaagagcatttaaacagaattactatgttcaagtgactcaatgttctggttctaacaatcagactgaataaacagtactcacagcygcagaaataccaaagatcagagaacggggttaaaatctgcatgagcagagcatgagggatgaacagactgaagccgccttagatagaaaacaatctctgtccacagagatgcataataagtttttttttccatctctattattaaatgactctctgagtcatacatagttctcttttgggttttaaaaattatagtaaatctccttgattgcctacttaacaaccatttcctttctccctcctttctttaagggagcccgattttgttcaggcccctacaccagccatccccacttccaaaggaagatcctgattagtttaagctgggcatggcatttttctgtctacagtttttttgtttgtttgtttctgaatacaattagtagtccaggagtaaacatgtgctccgatatcagggccttgacctacggttgtgtgattgtgcttcacaggacagctcctgcccaaactctgctgctgtgccatgtgccctagcctgggacaggaacaacctggagaaaacagcaccttttttttgattggttctccctgcgtggtgcttctttttgcagttcagctgtttgtaggaagtgtcttttctaactacacaaagactcctgacggctagctgtgactccgcccaaagttgacctgagcgaatcccttaatgatatcttggagatatgaacacagttcttcctccttccagctggacatgatcaaggaagcatggtgccccagatgcccttggtaatgtcatattttcaccattgtgggagccagcctgagttgaagctgaactgaaaaaatcacagacaaagtgctaaactgctgcatacagcctcaagagtccacctacttgactctatatgataatataaaacatgtgatatgtatatgataataaaagataaatgtcttcattatttgtcattttgatttgggcttttctgttatttgtaggtaaaacatcttaagagacataattattttctggctctaaaagcaatggccattcacttagaaaatgtagaaaagatagaaaagcacaaaaatttaataattataccacccaaagactataactgtaaacttttaaatatgactttctgatctttttctatgtgtagatatatgtactttcaaaactcaggacaatagtgcacataatactgaatattctgttttactcaactaatgacatataatgaatccaagagaaatttttcttctctaatttaattttaatatttgtatattattttcttttatgattgtagtttatgttccctattattggatatttggaggtattttgattttctcatattataaataatgccagaagaatattatagtgtatatattttacacatatttagttggcttcttagaatatgtctttacaagtggagtttgatcaaaagatgtgaaaatactaaaagatttgtatgcatatttacacacttttagcttgtattcaaaatgagacttaactggtgtttaaaataaaaatgctctgttgacaaattcgcataagcacttacagcagtttttctcgtccatgtaatcagggcagtctgggaacccatcgcagatcactgtgtgcttcaaacattgtttattggatggacattcccaaagatctctctctttacaacctagagacagaagaaaaggttatttgcaatagacgtggaattgaaaataatgataaattcaatcaatgtagaaaaattacgctataaaggcatgatgttggcagggcgcagtggctcatgcctgtaatcccagcactttgggaggctgaggtgggcggatcacaaggaatcacttgaacccgggaggcggaggttgcagtgagccaagatcacaccactgcactatagtctgggcaacagagcgagactttgtctcaaaaaaaaaaaaaaggcataatgtcttttttcttaaaaagttttgacctctgcataccatgaataatataattttgaaagtagaaataaccaataatattcatattgtgatataaattgtacagctctcctaacagaagatcaaaggtgacatatggggccaggcacagtgactcacgcctgtaatcccagcactttgggaggctgaggtgggcagatcacttgagctcaggagttggagaccagcctggccaagatggtgaaaccccatctctactaaaaaatacaaaaaacagcaaggtagtgcgtgcctgtaatcccagctacttgggaggctaaggcaggagaatcatttgaactcaggaggtggaggttgcagtaagccgagattgcacaactgcactccagcctgggtgacagaacaagactctgccttttaaaaccatataattaataactgaatcaggattagaaccctagtcacttttctcatgtattttctattcttttcttttttgagaccaagtctcactctgtcgcccaggctggaatgaagtggcacgtttttggctcaccgcaacctccacctgtctcaaaaaaaaaaaaaaaaaaaaaagtgacataggggacatggagaaaaaaatttaaaagcatacattaacattcatctttaactgttcccttttctttctgagtgaaattgctgtcaatgcataagacttatctataaaataatgttatgcttttaagcaaatatgccaaagtctagtgatctaaatgcatatcaccttaaaatgtaatttcattctacaaatcaggaggccatctgtttttttagcaaaagaggctccttctatgccaaacaaaactagtttaagagccaggtgcaaaagctattactttatggtagtcagagatctaaagttggaaacttcatcaattaataagagaaatgaatataatttgtacaacattaatgtaataacttgaactgtaatttgcctatgaaatagcaagcacttgtgatgtatttaataaatgccattgatgattcatgtgcagtgcatttcatatgcctgctaaagtttgacaagagtctaatatgtttatgtcattccggtcagatccctggccccggccaggccgtgaagtacatgaaggaagagactacatggcaaaaaaaatttgagtaccttccacccccttggctrgaacaatggctagcatrtagcaggccctcaacatgtgtgtgttttaagtagaacttcatttcatgtaaggaacaaaatgtctctggctctcaggaaaatataatttattttaaggtcagtgaaatgcaaagcagtgatcaaataagaagtttcttaaacaatgttattgttcatctaacctactacaaataagtcgaataaattatgtagatgattgactcaggtttcttggaatccattatgagaaaaaaaattggttttcaaacttttcattaaaaacaattataaaaataagtgacccaaaatgcttactataagctaaaattagatttagtgtgtttcatcatccaaagatataggaaataaatagtgagagtctttcactggctgataatccgggggggtcttaggcccagggacatccattccaagaactcacagggacattatttagagttttcagctagtagaggatccagacagcatctgaaaagttctgacaataagagtctcttgagatttgagaaagagcctgaagyctgtcctctgtgacccagctcccgccaaatggtacagtctgctcattctaccakagagcaaaagacawcaagaaagaggactcaacactccatgcatggtgctgacccttctccagggctgctcctctgctcacaaaacataccacttgctaatagagaatgaaataaaatagcatgagtttttcctgacgattcccaaggcccattcttcttaagactacaaggaagaacttcgacatttggaatgagatgatgaaataccacagaaatagatcatctgggacagaaggccgcctaaagtgcatcctcacaaataataataataataatgatgataatgagataacatgtattatccactatgtatccacattctagatattagctttaattcttaaaataacactataatgtcagtattatgctcaccattttataagtgaggaaactaacatttagagaaattgaatccctccacatcacagctctacggagaaagatctggatgggatccaggtacaagtcatcagttgcagtcctttgtaagatgcgaacatgaagtatgcgtaaggggtaggagcagtggaagcacagctttagagtcagacaactggatttgaatcctagttccaaatctcactagctgtgtgagcttgggtaagttacttaacttctccaaactttggtttccatacatcttaaatacaaataataatgcctgcttcatagggttgctataaacattaaaggaatactccataagcattcacttttcacctctccatgtcttctcttttctcataaaagtttgcatagcataatacctcctttgtggagttacagtgagcacaaaagaagtaggataaaaagagagagakattagttacatgggagatagtattattttragaagaaaccactttctttgtaaagtgacattttggtgcaattatgttttaaatgtatattctaaaaggaaaaggatatgattccatcaaaaattaaaaacaggcatggatgggatgggctgtttaatgcacctgtaggttatgaaaccaaataattgttgatgtcagaataataacctctccagcacagagacaatagcaacaaccaataattgaggatacagtgttccaaaaaagtsaccaactcaccccagtttgccagggatttaattgatttgagcacaaagtgtcccttgttccaaaagatccccatcagtcccaggcagatctggttgactggtcacactaagtgtgctaagcattcatctgggttttttgcttactctatctctcattttcacaaaaactctgtgaaacaggctgccctgacagaggcagtacccccccacccccaaatggaataccttgtttctctataaaaacagttgtcattacaaataaagtcagcaaatcacctcaaagcagatgctttttgttctgtaagaatctcttagctatgcagctatagagtaagtaggtccactcatcctcttgagttgagctgcatgaaatttttaaattctcaccctttggagtggagccgctcacaaggaggaaggagacaaggtaatactgcattattgagctgacaaaggctggaacagtctggatccagccatcctggaccagtgtctgccccaggaagtggctgtggatgtgacctataaggagctgtagcagccagagtacaggcctaacaggtgtgaagagccttctacagcatgcaggatcctggacaacaaagccccttccctcaaagcatggctgcaaagggctctgcctctgcacctgctatagcagctggaacagaggacctgcttcccactgtggtctaggcctgattatcagggcagccataccagcacaggccatccagccaccatccagctggaaagtcgcagcagcctacccaattcctgagtcacttcccactcttagcagtgccattgttatggcatgctcttcacatatgggtggcccagtctcccgtgaaagaggcaggatgaaggaatggatgggactttaaactgcatggctctaatcctaaaaagagagaacatccaacccaaaaccaacactatctccaggaaaagacaccatccatctacctgagtttactatgtgagccagagacctcccccagcccatgctttagcctgacagaccagcccactctcttttgccataaacagctgtcagaaacaagactatgctagacagractccttccctcaagggagatggctggggcagcctttgaaaggaatcgcctcctgattttccaccaccacagcaggtgagttcccagttattagcttctgaggatgaacagggcatgttataagcattccaagctgtgagagataatgtgggtgttctctgcatcttacccagagaagtaaactgactggccaaacgtcacacagcctctaaggctaagtaaggatgtaaattcaagtctaagtctacgcaggacactctgccattccagcctgccttcccaagacaccacagaagacgatgaaacagttaaccaagtatttaaagggaaggagaaaatttcccccttaacatggaaaattaaaccctactgagtgatgagaaatcaatcctgaaaattcctcctgaaagcacatttgtggatatgccaaagctatggacataatgactctcactcttctgctagctacagagcaaagagtggtctcctccccagacaaagagacacaaaagcatagagactggtagtatttggagtgttaagaaagccagttaagcccttctgtgagataactcatagaaatgctatccaagaatccaaaaagaaaacatgccttttggaaactctttgaaatcaagctgtaaaacccgtaaatatcagagtcagatcttctaatacaacctaaggggattctgacttgaagaaatggctcaggttatatttaaaggttttattttatttaagatcaagaggagaccaaagataggtgaagaactgatttttggtcatctgaagataaacagaaagtcacttaatgacactcagacatttgcattgctgtcaatcttttctccatatgatgtataccattttacttagaatagtgatcaattagtaattttgattctgtgttcatgtaataaaggattttattttgacagtcgatataaagcacctgttgtagctatattttcatgtgactgctccactgggagttgctgcttgcttgcatcacagcccaggtaccacctgctcttgtagctgacccaaatcgtggaggtaaagcctagcaagagataacctcagcctcacacactcaaatctatagagtgatagaacagctgaaacatacaatccctttgttgttttccttagctctcctttctttgatgtcattcttgatcatttattttcccatgtctttccctcatgctccactgcatggctatcaatgcttggaaaatgttacgttgaaaataaactcatttatcaagttgctagttttacaggcagctccatctatatcatgtatgctcaattacttaagcatacagtaattgacatcttaagcatcyttaagacaatgcagtacttctgtactgacacagtgcagattctgctcagcattcccctgtctcttagacttccttcccatatcggatttgcacaattcatcccaacacttgctgaaaacttttctagtactgacattttcaactcttgtttacattggcaattacacaatcaaagcagcctcaacagcaaaaatctaccacaagagctggagacatttaagaacagtattactgattgctaaattctaatgcatatattttaaaagtgtatttataagttaagtgctttggttatcatgtttctccattacaaaagtgccaaagaaacawgaagtaatttctcacacaatatttatttcataactgagttaaataagtattgttttgagtggaaactcaataaccttgttagaaattctgagggagctgcagattcatgacaatgaatagttaattgtccaattattcagtaaagctcaaacacttaataacacaayggacagaataagtcagaaaggcaagaagcttggggtgaaacccagctttgctggagctggtgcttgcattaccagatggtgtgcctatgcacatacgaaaacagaaagacaaacagcaaggaggcaaatggaaacagatgacttcctattagtcctctgttgagccttcatcaacctgacttccttatttgatttgaagtggtgtgtcctcccaaatcactgaacaagcccattcaaatgcatgcagaagtatcaaaggggaacgaagtatgtaaagttttctattgttagtcactttggaaaacttctcataaattagtactgctggagcaattaattgaactccaaatgtattatttcttacccacttttaactttccttaactagagctctcaatagtgctgtcaattatttttaatttttgatagagattagacaatatattctattattttgatgtgcctttaattgtgtgattaaaatactggtgaaaaccaattacttaactagaaacctgatattttagggtcgtttaaaccctataccaatatgatagtactttaagtttattttttgcagaatatgttctagaactcagaacttttagtcttggtaaagttgttttgttttgtttttaactaagcttttgtatttctcaaatatttagtcccctacaacaaatttaggtctagccaccccaacaaagtatcatgcaacctctttgaaccatctaagataatctattttaaattgcatctcaaataccatgacccatcaaagtcatagttcagtgaacaaatctaatacattctcaataaatcacttatataaggtatattcaatgaattttgatttatttctttacaaaacaaaaaaccacaaacaagcaaacaacagtagcttctaaaaacactgtacattcctccataacaaaattaccccagacattgtaccatcattctgacagctgaagttttccagaagatgcattagtccatatttataggagctgacaggatttcagttgattgcttgtgacatttttgtctagatcagaagggcaatgtttaccacctaaaattcacttaatggagcaacgcaatatttcatacttcaaaggccaaaagaatgaaattatttcaaaagatgtactgccttacgtgcttgtcatgaaagtgtcaattcttcttaaacaggaaaggctaaataaycataaccaaacaattctgtggatagatcttcaatcattttgctttcctcaaaaacactgtttattaaagaccattgtctgacttctattccctaayacattgtggttacaagtacaaagatttgcagggaaatataatgacaactaagtccactcaaattaccattggcatttatggcttttccactggcgattttggaactcaatggcagaaatgtcaagaagagttttatcctttgccgaaagagaaaaaatatgagaggacatgaaaatgaatcccaattagactgggaatgatggagtctgaactctgaatgttggagtatgaactctgccttcatgcatctagatgtctatttagcaacatgggaagcatacgcaaagacactattattctggctttaaaactgataacaatggctttataatttaataataaaaataattctttacatttgtgaggtgcttctccttttaataagtgtttgcaaatatagtagtgcccctccacccttatctgaagtttcagtttccacagtttcagttatccctggttaagcatggtccaaaaatgttggcacaatacaataagatattttgagacagagagagagaaaccgcattctcattacttttctttcagtacattgttataattgatccattttattattgttgttaatctctcattgtgcctaatttataaattaaactctatcataggtacatatgtgtaggaaaaagcatagtactgcatatatggggttccatacaatctatggtttcaggtatccactgggggtcctggaacatatccctacggataagggggaggggtactgtatgtatcagggttatatagaagtgcaatttagaggaaatcaagagtcaggaaaaacacttaaaatatatgccatactgttcaataatttaagaagtaaagacattagcattgaatcctagtcctactatcagtgaatagtttccatttttaacacagtttcttattttattctagttatcactgtacattcaagaaaagtaccattgcacatacataccacagttttcctcatcactgtcatcgtcacagtcggcctggccatcacatcttctggaagccagaacacactgtcctgagcggcacttgaaatgactaggtgagcattctattaaaaacaatattactgttaaagggctgaaaacccagaaacatcagctratttatgtatttacatgtaggatgttgtcaaggagcttttactgaagataagggtggtctcttgcaaaacgaaatagccattttgctttggcattcttctgcctgccaatcagcatctttctccttcattcttggcctcatccctctagatacgcggtttaacatctrtgtattccaatgattaattttctttccaaatgggacaacccaacaattgccagagcctgatatgccttgtgcagtcagtgctcctgactacctagcggctctcaatgtgtcaaaatcattttcacatccccatctttccacctagtccacaattccatttctgtacttaatgatcctatgttgccatggtccccaaatgttttttacttgaaggaaccaaggtttgatgttcacctttgccttcaggatcactagtataaaagcatccatacataatgggctctgtgagtaaagtacagtttaaaaaacacctggagtactaattaaactcatctctgagttcattatttttaattttaaaatgattttttggggggaagatggagcaagatggccaaatagaagcctccactaattgtcctttctgcaggaacaccaacctgaacagcatccacacaaaaaagcaccttcataagaactaaaaatcatataagcaatcatagtacctggttttaaattcagatcactgaaaaaggcactgacaagggtaggaaagacagtcttgaatcaccaacaccacccctcccccattccccagcaagagctgcatagcacagagaatctgtgcacttgtggagtgattgtgggactttgcattggaactcagtgctgtcctatcacagcagaaagcaacaccaggcagagctcagccagtgcccatgcatggagggagcatttagatgaaccccagccaaaggggaatcacccatcccagtggtcagaatttaagttctggcaagccttaccaccacaggctaaagtgttttggggtccttaatawacttgaaaggcagtctagctcacaaggactgcaattcttgggcaagtcctgatgctgtgctgggcttggagacagtggacttgggggcatgcaacctagtgcatgccgcagagtggccaagagagtgcttgtgccaccccttccccaaccccaggcaggcacagctcacagctcagaaagagactcctttcttctgcttgaggacaggagaggggagagtaaagaggattttgtcttgcaacttggatatcagcttagccacagtagaatagggcaccagacagagtcctgtcctaaggcccccattccaggccctagcttccagacatttctagacatatcttcaaccaaaagggaacccactgccttgaagaaaagggcccagccctggcagcattagttaccagctgactaaagagcccttgggccctgaataatcagtagcagtactcaggcagtacttctcatgagccttcggtgagactctgagatgggctggcttcaggtgtaactcagcacattcccagctgtgatggctacagggagaaactcctgcttgagaacaggagagggaagagtaaaagggattttgtcttgcagcttaggtaccaggcttggccacagcggggtagaacatcaagtgaattcttggggtctctaattctaagccctggctcttggatgacatttctggatgtgccctgagtcagaggggagccccctgtcctgaagtgagagtcccaggcctggcagcattcaccacagactgactgaagaacccttgggccttgagtgaacacttgtggtttggtagtacttgtcatagacctggggtggtagtgatcatgaggaaaaaccactagcactcttccattacctctctgtggaaagaggaagagtgagaagaactttgacttgtggcttgggcgccaatactgcagaaattcaaaggatcatcagagtctactatgagcaactatataccaataaattggaaagcctatgagagatgaatatattcttagaaatatacaacctactaagattgaaccataaagaaatccaaaatctgaacagaacaataacaagtaatgctatttaagtaatacttaaaagtctttcagcagaaaaaaaaaaaaaaaagcctggtgcccagtggtttcactgctgaactttgccaaatatttaaagaagaactagtaccaattctgctcaaactactccaaacaatagaggaggaaggaatacatccaaattcattctacaaagccagtattaccctgaaaccaaagctagacaaagacacatcaaaaaaaagaaaactacacaccaatttccttgatgaacattgacataaaagtcctcaagaaaataccagcaaactgaattcaacaacacattaaaaggtcattcatcatgaccatttaggattttttttttttttttttttgagatggagtttctcccttgtcgcccaggctggagtgcaatggcatgatcttggctcactgcagcctccacttcccaggttcgagtgattctcatgcctcagccttccaagtagctgggattacaggcgcctgccaccatgcccagctaatttttatatttttagtagagacaggttttcaccatgttggcaaggctggtcttgaactcccaacctcaggtgatccacccacctcagcctcccaaagtcctggcaagacaggcatgagccaccgctcccggtgaccatttaggatttacaggagtgatgtaacatatgcaaatcaatcaatgtgatacatcatawcaacagaatgaaggacaaaaatcatatgatcatttcagttgatgcatttgataaaattcaacatcccttcctgaaaaaaaatccctcaaaaaactgggtaagaaggaacatasctcagcaaaataaaagccatatttcacagacccacagttagtatcaaactaaatggggaaaaactgaaagccttatctccaagatctggaacatgacaaggatacccactctcaccactgttattcaacatagtgatagaagtcctagctgaagcagtcataaaagagaaagaaataaaggccatccaaattggaaatgaagaagtcaaattattcttgattgcaaatgatatgatcttatgtttggaaaaacttaaaaactccgccaaaaagctacagaactgataaacaaattcagtaaagttgcaagatacaaaatcaacatacaaaaattagtagcatttctatatgccaacaacaaaaaatgtgaaaragaaaccaagaaagtaacctcatttacaaaagccacaaataaaataaaatacctggaaattaacttaatcaaagaaatgaaaggtctctgtgatgaaaaccataaaayactgatgaaacaaattaaagaggatataaagaatggaaagataatccatgttcatggattggaagaatcaatattgttaaactttccatattatgtgtattaggccattcttgcactgctataaagaaatacctgataccagccaggcgtggtggctcatgcctgtaatcccagcactttgggaggccaaggtgggtggatcatgaggtcaggagatcaagaccatcctggctaacacagtaaaaccccatctctactaaaaatacaaaaaaaattagccaggcatgatggcgagcacctatagtcccagctactcgggaggctgaggcaggagaatggcgagaacccatgaggtggagcttgcagtgagcggagatcacgccactgcactccagcctgggcgacagagcgaaactccgtctccaaaaaaaaaaaaaaaaaagaaaaagaaatacctgatagtgcataatttataaagaggtttatttggctcatggttctgcaggctttaaaggaggcctagagtctgcttggtttctagggaggcctcacgaagcttacaatcatggcagaaggtgaagggggagcaggcacgtcacatggcaaaagcaggaacaagagagagagagagttggaaggaggcaccatgaccagatctcctgtgaactcagagtgagagatggttcaagccatttatgaaggatctgcccccataatccaaacacctcccaccagaccccacctccaacactaggattacatctcaacatgagatttgggtggggaaaaatatccaaactacctcattctgctctgccccttcccaaatctcatgtctttctcacatttcaaaatacaatatctcttctcagttgctcccccaaagtcttcactaattccagcattaactcaaaagtcccaagtcccaaattcaaagccttatcccaaatccaaataagttccttctacctatgagcctgtaaaatcaaaagaaggtatttacttccaagatacaatggctgtacaggcattgggtaaacattcttatttcaaaagggagaaattggctaaaagaaagaggctacaggccccatgcaagcccaaaacccagcagggcagtcattaaatcttaaagctccaaaataatctccttggactccatatcctgcatacagggcacactggtacaggggtgggctcctaaggccttgggcagctctgcccctgtggctttccagggttcagtccccatggctactttcacaggttgttgagtgccaacagcttttccaggcaaagggtgcaagctgccagtggatctaccattctggagtctggagggcagaagcctacttcccacagctccatgaaacagtgacccattggggactctgtgtgggggctccagccccacgtttcccctctgcactgctctgacagatgttctctgagccatggctaaaggtagagcagcctggatgcagggagcagtgtcctaaggctgcaaagggcagtggggacctgggcctggcccataaaaccattcagtcctcctaggccttagggtctgtgatgggaggggctgcctgggagatctctgaaatgccttcaaggcatttttcccattgtcttagctctttgctcccttttggttayacaaatttctccagcaattcagcctgcttgaattcctctactgaaaaagctttttgtttctttaccacataggtaggctgcaaattttccacacttttatgctctgcttcccttttaactataagttccaacttcaagttatttctttgctcctgtatctgagcacaggctgttagacgcagccaggctatctcttgaacactttgttgcttagaaatttctttcatcagataccctaaattttcactctgaagttccaacttcaacagatccttagggcataaacagaatgcagccaaactcttttctaacacaagatatgggtgaacctttcccccggttcccaattagttccacatttccatctgagatctcatcagcctggccttcactatccatatcactatcggaattttgggtcacaatcacttaaccaatttttaagaagttccaaactttccctcatcttcctgtcttcttctgagctctccaaactcttccaacccctgcctgttacccggttccaaagttgcttccacattttcaggtatctttatagcaatgctgaacatctagtaccaattttctgtgtcaggctgttcttgtgttgctataaagaaatatctgagactgggtaatttataaagaaaagaggtttaattgactcatggttctgcagcctttacaggaaccatggtgaagacatstgctcagcttctatgaaggccccaagaagcttacagtcacagtgaaaagcaaaagggaagtaggcacatcacatggtaaaggagcaagagagagagtaggggaagagatgctacagcacttttaaatgaccagatgtcatgtgaacgcagagcaagagctcacttgtcatcaaggagatgacccaaaccaatcacaagggatctgcccccatgatccaaacacctcccatcaggccccaactccaacactggggattacatctcaacatgagatctgagcagggacaaatatccaaactatatcacyatgtaaagcaatctatagattaaatataatcccaatgacattcttcacagaaatgggaaaaaagtcctaaaattcatatggaatcacaaaagactcagaacagccaaagctatcccgagcaaaaagaactagaggaatcacattacctgacttcaaattacactacagagctataatagcaaaaacagaatggtaccagcataaaaacagacacataggctaagggaacagaaaactgagaaaagaactcatacatctacagtgaactcattttcagcaaaggtttcaagaacacacactggggaaaggacagtctcttcagtgaatggtgctgagaaaactggatattcatatgcagaagaatgaaattagacccctatctctcaccacatacaaaaatcaaatcaaaatgaataaagacttaaacctatgacttcaaactatgaaactactagaagaaaacattggggaaactttccagtacactggactgcacaaagatttcttatgtaatatcacaggaacacagacaaccaaagcaaaaatggacaaatgcgattacataaagttaaaaagcttctgcaaagcaaaggaaagtgaagagacaactcacagaatgggagaaaatatttgcaaaatatccatatgataagggattaataaccagaatatataaaatgctcaaacaactctatacaaaaataactaataatctgatttaaaaatggacaaaagagctgaataaacatatctcaaaagaagacatacgaatgacaaacaggtatatgaaaaggtgctcaacatcactgactatcagataaatgcaaatcaaaactacaatgaggtatcatctcacccaaattaaaatgtcttatatccaaaagacagacaataacaaatgctagcaaggatgtggagaaaaggggatcctcacccactattggtgagaatgcaaattggtacaaccactagggagaacaatttagaggcttctcaaaaaactaaaagtagacctaatacatgacccagcaatcccactgctaggtatatacctaaaagaaaggaaaccagtatatagaagagatatctgcactcccatgcttgttgcagcactattcacaatagccaagatttggaagcaacctaagtgtccatcaaaagatgaatggttaaagaaaatgtggtacatatatgcaatggattattattcagccttaaaaaagaatgagatcctgtcgtttgcaacaacaaggataaaagaagacgtcattatgttacctgaaataagccaggcacagaaatacaaacttcttatgttctcacttatttgtgggagctgaaaattaacacaattgaagtcatggtgatagaaagtagaccaatggttgccagtgtctgcgaagggtagtggtgggrgaaagcagggttggttaattggtacagaaatatagttagatagaatgaataagatctagtatttgatagcacaacagagtgactacagtcaacaataatttattgtacatttaaagataactaaaggagtataactggattgtttgtaacataaagaaaggataaatgcttggggtgatggatatctcatctacttgatgtgattattatgcactgtatgcctgtatcaaaatattttaggtaccccatacatatatacacctatgtacccacaaaaataaaagaatagaaatagaaaatgacttctttatttttaaaatgaatgcaatatctaacagatgagtgccaaattcttcaatgcaatcaagttcacaaattcactcacctaagcagcctgattggaaactaaatagaaaacaaacaaacaagaagccataaatagaagaaattcaaaaggtagctaacatgttcatccatgttagataccctgctgtaattaattttaaaattaaccttccacatattcatcaggcatcaggcaggtttgattgtctgaattttcctctggaaattgactgcaatctgtgtcttcaggccactgtaggcccacaatcccaagaacagactcacagcgttctttagagtgttcacacaatgccctagatgaacaagaaagacaaaacattagaagcagaaatagctccatctgagacagatgtcataaatttatgtcaagttttaattctgtgtatgtggcatgtattgtgggtgtgtggatataaaagatgcacatatatatgataggtatttgggaaaccaaaatgagtaatatctcygcaaagagtatacattccagcaccacactttcaccaaaagaaactttattgcagaaataggtctaaagatgtttccaggacacagattcccttctctacactgcctttctcattctgtcttctgtctttgaaggagacatattctccaaccttttgttccaaacagggaagtctccaacatcactttggatagtttgccaccaaagtcattgaatctatacaacaccctcatcctcagagatctccccctctgcagaccagccttgtgagccatctcatgtgccaccttagcttgcctaaggcatgcctcccttacttcagcttccatcaatattggtgaaaagcttaggactccttccaaacccacttacgttgagctcgagttggttaaaatgtttggtttttgttttaaagaaatgatatattattgtatcaggtgctttcgtgcgtattatgtcttttgtctccagaatatttttaagttaaagtatcagcgtgcctcacagaagatttctttacttctttttttacttcttatggaaaaaaatatgatttttgtctcaatatattactaagaaattagttacacagttaaaaaaaaaactarccaaagtaagttcctaggccaatatactcttaatggactcaaataaactcttacttatcaaaagtttcaaattttatacactaattcaacyaagttctcatttttaagataaaatgggagacagatcttccagaaaggccagctccagtcttgcccaaaactggtagagaaagtgtaacaatcaaatgaggaaatttcggagaaagttctgtctaggtttaagtctggacaaagctcagcataactcaacactggcttagcccaggaatttgtggtaaagataaagccatggtatttctatattaggtcaggaaagatggaaagttcaatagttgataactgtctgttgaactaactagttttgttgcagatttataaaaaatgtatataactcaattgcaactgctattttaaattagtcatatgatacttatttgtacaaaagactatatagtgcctgactctaccacttccaatttttttctgtaaaatggaaattacaacaatatgcagcaccacaagtccagggggcgctgttcttatcatagtccttgtagtgttcagccataggtagcacctctgatgatacacacttcaaaaggttattttgagtacgctacagcataacaatcctcaagtatttagcccattgtaaggactcgatgttagatttttcagtctcatagctaaaaaattcaatgttaaaattaataaacacacctagcaaaagcaactatgtattgctttatgaacttattagcatattattcaaaaatttcttataaacaaatatcaaaatataaaattcgtagtgatagacactgaaaatgaaagatgtatgggtaaacctgaaaaaaagaaataaatttatctaaaagaaatttaccaaaattttgattgaacaacacttcaggatcatccttggtcttatgcattttaatatggaacttaagccctgaaattataaattacatctggatataaattcacatttatatttatagcagaaaatgctgcttcagggaaatttttatctacatatgaaaagaaagtcaaatgccagaaattgttaagtactattaaaagaaattattcactatcactgaccttgctttgcaaaagtgaagtaagatttaaaacagctttttaacataaaattggtagatgttttattagagatacttttaaaagtacttagcagaaattttcagatatttttctacacaagctaacatttagttttattctctctattggtataatttgttcagttccccaagtcattttgaaattttattatttcctgtcctgtctctatagatgcccttactttgttatccatttggtattcagcatataatttattgttttctcttctgtccactatagtaatagtactgctttttaaaaaaaactctgcgtgacttctgatcccaacatatggtttctgcagttgctactcgcatttaggccagcacatttgtatacctaccccttgagggaaaacagcactgaagagagtagcaactcacttctgagagtcatcctgtatatgcaaaccctctgactacaatgcctaacacatggcgcagcaaagggacagactgccaagaagctattgtgttcctgtgctatcatcatagctattgtccattcagggttcattacaatgaatcagaagcactttacattcatttgatctcaaaacaatacaacccaacaaccattactatccttattctacatgtaaaggaaccgaggctgagagagactcaggattttgtctaagggctacctagaaactagagaagggtcaagattttaacccaaacatggactctggaacaatactcttgacactagaatatcactcatattcaaagtccaagctacgctcttgaaatagcgcatcttatttcattcaaacaggcagagaaatgtcagcaatgtccatcgctgtccaatctgtgagtctggcactatgtattcttatgtcatatctctaacaagtgctgtcagagtgcagcattgtaaacacatcagtgttgccagaaaaagaggcagatatatcccttttatactatcatacttttttaaaaaaatggctttttaatacaacagaatgaaatacctgtgaatttatttgattaaaacacataaactatcatcaaaggacgttcacagctcccttgtttggtacttcgttaatgaattctgactcaaatattcattttacaacttctacttctttgtctcacttgttaaatataaagtatttgataaatgcagagctccttagggaaatttacgttgtccaaactcaactaagtcttcaccccttggttctctctgaggcaaaataagggactggggtagatcccatcatattacctgcaaggagggataygctcgcctgtattcacatcacattttggtaccaaaatggtgcaagaaaagaacatgaggtatttataacagttggtttgaacaagtgcagggaaaagagaagactcccagctgatggatgcttccttttgagtcctgtggccaaaataatttggataacttgtactgttgtagggcaaattcatgcagagttccaatgtaattggttcacattgacctaacaaagaaacatacacacaaatatttttaaatttcacatataaaaacaacttctttaagttttacaaacttgaagtctattttattctttctttagagtagctaagactagaatgccagtagtatataacattttttatggatattgaaaataagtaagttgattagtgaagtgccctggcaactaagattcatttctgtatatgtagttgctagcactgtgacaacatcttgctttagaaagtccttcctcattttttcccttggctcaacttatctaaagatgactctctttcatcattccttttattgactccaattcatcttcttcttctgatttacttattactactaaaataggatagccccatcatcttcactgtcactaaactaattaatgaatttgatcaaataggcaagtagataacttctgtctatatgttttattgttgattaatgtgtttaaatataaggctacaagatttcagggcaagaggaggctcagatctgttgaatacttctcactaataagacaaaatccaaaccccttagcttgaagtctgaggctattttatacttcaaccctaggctaacttttcagcttcattgcctgtgattatccaatcaacagtatctctgctgtaataaattctattcccttatgacaccagatattttaagaattgtatgactttatgcaccctgtttgctcctctcttacctcctcttttataacatgctcataattatctccccaaaggtggtcatggttctagctgccagggccatacggcacctgctgcctggattaaccctttcccatcttccccaacaagctaactcctctgtggtctggaagactcagcacaaatacctcttccaggaaaccttcctggccaaccactcttcccattactacttccagaatgagtcttttgtgagtgcaatagcgtcttaggcacatacccaccatatgttcattgcattctgccatattctttatttacttacttgcctcccctacacaatcctgagatttttgtgaaatgagactttatctcttgatcttgaagtctacacctagcacagtgccagaatgaagggaggaaaatgtatcagggactatcctaggcaatgtaaatgtaagagtaatgagaaatattgtctctgccactgaggaactccacaatctcgataggaaaaaggatgcacgcgctggtagctgtagtagaatgtgaacagggtaggatagagtttgcatgaactgaacatttgtgtatctccattcatacgctgaaactctaacctgcaatgtgatagtatttggaggtggggcctttgggaggtgatgaggtttcaatgaggtctagatgagggtggcatttatatgggattaaagtccttataagaaggagaagagactaaagctctcgctctctcagccatgtgaggaaacgcaagagggcaactgtctgcaaaccaggaagcagcctgttaccagagaccaagtctgccagcatcctgatcctgcacttccagccttcagaactgtgagaaataaatgtttgtcatttaagccacccaatccatggcattttattgtagcagcttgaacatactaagacagacatattgaacaaaatgctagagtccaaagggaaaaggtagtgcaagagtgaactgggaagccctctgatatggtctggctgtgtcccacccaaatctcatcttgaattgtagctcccataatccccacttgttgtgggagggagccagtgggagatcactgataatggggcagttttccccatactgttctcatggtagtgaataagtctcacaaaatctgatgattttataaggggtttcacctttcacttggctctcattcttctcttgtctgccaccatgtgagacgtgccttttaccttccaccatgattgtgaggcctccccagtcatgtggaactgtaagtccattaaacctctttcttttgtaaattgcccagtctcaggtatgtctttatcagcagygtgaaaacagactaacactccttccaatgataaatgtggtttgggcagctttgggggaatacagcagagaggctcccagctccctctctctgtttgcagtagatatgccacattccctgygtggagaggcaggcaagcaagtgtcctggtaaaattcgcccaggcagaccaaagactccatgccttattgagagtgattattcaaattaaatttaattatttgactaagaagtggtatccatgcaaatagatttgcaataaggactgggctgaaatattaaaacatctccaggactacttcttaattgaaagaatccgaggatatcacagatattatatttataaggaggctgatgttggcctgattaaaaaaaaatgatgcatgaagtgcaatatgactctcagtttgctgaagaagacacaacactgaaaggcyggcataatcttgaggatgagtcagagtggagagaagactagacggaagaggtttggggttggtcggttcagtttatcctttcctgtgatttgtgaaggaggggttggacattatggactaaatgtttgtgttcccccaaaattcatatgttgaaatcctaacctccaatgtggtggtattaggaggtggaggctttgggaggtgattgagttataagggtacagcccccaagaatgggattagtgcccttataaaagggaccacacagatctctctcgctctcttttcacagtgtgagaatacagtgaaaagtcagccatctgcagcccagagagggtcctcaccagaacctgaccatgatggcaacctcatctcagatttccagcttccagaactgtgagaaataaatgtatgttgyttataagcaataatgatttgttatagcagtctgaactaagacaagaagtaacatttaaatattttgttacaagatttaaaaatgcatgtttttcataacaataaaaacactacaaagatgcagaaagaaaaagttcaacatctctccactcccctttctgttaccttccctgcaagccaacasaaggctttgaatgcttccatgcctttccccgctcacatttatccatacatgcctttgcacacttagacagggatttctgtttgcttttgccaaagcagaagcataccattcctatcacccttcaatttgcttttgttgcttatttgtcatgaccatcttacaagtcagcacatgcagctctaactctatgcttttttcctgatatctttaatatacttaaaattttacacaattggttcacttacagatatttctgatgcagtcctttctttccttgtgcataccctccgtttctttctttctaccaccccatcaaggttcaactttttattgatgtatttcactgaagatgattaacagaacatatcgcatgaataatttttctcttttttacatgtggagaatgtatcacttttgatttgggttaagacataacttttaagtgtttaggagccaaggaaaaggaaaggattaagtaatgatcatatattattctgtagatctttattgaattcggtaaggtttattggatcttgagttttattccttyaaaggcattcttcacagaatgctaagcaagataaactctcaaaatacctgtcaaccccaaattctatgatttatgatatcaataagcttttttatcttaagcattaggctcatgtgtgatcctgatttaaaaatcgccactagagggagatcgcatcacaaacgtgaggatattttagggctgcagaactgtgcttccgatataagtttgatgtagtacccagtacagtgtcccgaacacagatgaggtttaataaagatctgtcaaaaaaaaaaatcctgatggaatctcaatggtattccacctttcaaagtctgtaacaagattcgttcaattcaacctaaagatgggatcgttaactcaatggtgttatatcgttatgatgtgatactctgaagttactagaaatcatgtattaagcgatggtcatttacatgaaaaatgtgacttttctacatctagctgcgtatataataatattcaaaaattcatctttgcctcaaactctaaatccctctttaacattattatttttaatagtttgatattattttaaggtgaacatccttataactacctcccaggtcaagaaactgaactcaggcagacaccgcagaaaccttccatatatcttgtcttatctcaactgtctcacttccttgctcttctatatatatatatatatgcttttttttttttttgtgacagagtctcgctctgtcacccaggctggagtgcagtggcacgatctgggctcactgcaagctctgcctcctgggttcgcaccattctcctgcctcagcttcccgagtagctgggactacaggtgcccaccaccaygtccagctaatttttttgtatttttagtagagatggggtttcaccatgttagccaggatggtctcaatttcctgaccttgtgatctgcccgcctcggcctcccaaagtgctgggattacaggcgtgagccaccgcacccggcttctttataattttattacctaagtgtgtaccacccctggatattgtaatttaggcttgcccattttttgaaacttgtcctgtcttttaagtctctcgtagtcttygggttcctcctccattcttttgtttttctttataatttaactatagaagaacccagacatttgacttgtagggtataccagcttttgaatcttgcttatcgcacactcctggtgaagttaaacacgttccccattctttctatttctgaacctcggcagctgaatcaacaagagtgggctgggcttcattccattcacaagactagaagtggctaagctgttctttcaccagaagccacatcattctgatttccctctttttgtgatgttagcagctgtagatgctccatgtcttcattcattaattcaaygtgttaccaaatggtaatattgtattcaatctttttttcacttattagaaaatgcacatggaaatgcttttgtaaatacatcattcctctcttctactatttgctcctaaggacagaagtctgtaaccattatagtgattggcttctctaccacatgactacaccgtttactcctaccaactgaagcttgcaaagagagagtaggaaattgctagacccttagggaattattcaaaaagcaaacctgttcatttcttccttggtgttgaataagaggggaaaatgcacgagtaagcgtaaaactaaaggttgacgaacactgtgggaggcttgagagagggcctgggacatgacagccatgcctggatttcacagccatggtcagcatgggcacagggaggcaggagagacatgcccaggagtcgcttttgcaggttctccccattgtctggattgcataccacaagggagaagtgatggattagtccctccacaccggaatgaggagaatagcattcctgctcctaccctcaaaggcaaggacacatctgtattttgcctcccaacatggcacagaaatgttaaagatgctgggttgtgactggacatggcaacacaggctgctaaaagctatttcttgaaaaaactatgtatcataagaaatgtggtttttaggctttttaaaaaagctgtaggcacttctgtgaatttaaaataagcttctccactgaaaaatgcacatgggaatacacaaaccttttcatattctatttcaaagttctcacatacccctgcagcccagtcataaataggcactagagcaatacattctcaaccttggctatacattgaagtcatctgtagaattaaaaaatactgatgactgggtcccacccaatatatctttagcgaccattagaaaatcacataatattttatgggatggcaagaatcagagtcttcaaggacaagaatcccggcaactccagtgagaggctgtctccaccagacagaatatctactacattctccaaactcaaattttcctttggcatcaagcagactaagaaattactgttcatttgtgcctcagaagctaagtaatactagtctcttgatagtggtaaacatcttcaagtaatgaaccatattttcaaatgtatgaaggattttctgagatgccacttgtttgtccttacagagacctaagtatgcatatatcatcttgaagttctttgaaagatcaggaataacatcttgactttcaactgcaagttaggcacatacgccttattttttatttatttatttttttattgagacggaatctcgatctctcacccaggctggagtgcagtggcacggtctcagctcactgcaacctccacctcctggattcatgccattctcctgcctcagcctcttgagtagctgggactacaggcgcccgccaccatgcccggctaatttttttttttgtatttttagtacagactgggtatcaccatgttagccaggatggtctcaatctcctgacctcatgatccacccgcctcggcctcccaaagtgctgggattacaggcgtgagccaccgcgcccggcctatgtgccatttttaataacacaggagtaatgagggcaagtggctagcctagtggcttttactcagaagagagcaggtgcaaacgtttgctgaatatatgtggagagaagttggcaagaatatacatgatgaatgaggaagctggtgacacagtgagacactaggtaaactgagtgtatttaaagagcttaaagagaacaacagtgtagaatatatcagtgggaagatgacaatatgttctcccacactgaaaagtgacttctaagaagctagaagcctgtctcctttctccaccactagaaagcccagcgcccatcccgatgcttggaacatcatgtacacactacaaatattggtcagctctatgagccaagagttatccagttgcctttcctacaatttattcttttgacaggagacaacatattttaaatatttaaaattcgaaatatttcaaatatagagaaaataggataacatacacccagtcacttcctacccaaatttgacacaggctaacattgccttttctacatttttgagtctaatagtaagtgtcattccatgtcaaacaacccccaaaactttaatagtaaacacatgtctttgagatgacactgtcactatttaagttgaaggtgaagtaaggaaatcgctctgaaaaatttccacggcagattgagagacgagtaaaatgaaacaatggaaacagtggcccaaatatgttatacgtgtgtgtgtgtgtgtatatatatacacacatatatacacatatatatgcatatctatagatatgttctatttaaatcagtttctatttaaatcagtttagaggaagtaaaatggcagtttgagtgtgttgactttgtggcttgactaatatctactgttctctcatatgggaaatggaggaggggtgggcatgtgcttccaggcaaagagttattaaatgccacagtcaatcctgtcagtctgggttaattagctgcctgcctacacccccttcccagcytccttttttcacccccttgagactctgtaacagttatagaggtactcactataagctctacagtgacccagaaaaattaggaccgcgaaactgcagcaaatgcaaggccgaagactttcagcatcccagcttccaagggccttagactgagaggacatgtgttaagaagtaataccctggctgggtgcagtggctcgcgcctgtaaggccagtggattacttgaggtcaggagtttgagacctgcctgaccaacatggtgaaacgccatctttaccaaaaaataaataaataaataaataaataaataaataaataaataaattagctgggtgtggtggtgtgtgcctataatcccagctacttgggaggctgaggcaggagaatcgcttgaacctgggaggcggaggttgcagtgagccgatatcgtgccactgcactccagcctgggtgacagagccagactctgtctcagaaaaaaaaaaaaaaggaatatcctcttgccaactgaaaactgactgacctgcttttaaatttctaatcccaacctgaaaatgcagcaaaaagttcattagaaaaagtgaaagaagcgagtataacatgaaaacagagcccaggagtcagaaatcattactagaaatcagtcgctggggattttctgattccattttccatgagagtccatagggtgctctttcacttccgcccattctgtcttccccaaataactcctcctcctgaaagtcattttagagccacctgcttacaccgtttggagctgttacactgtcaccgaaacaaattagcctaatggttccgaaaccattacaggtcatcagagttcctggaaaggcgagaataaatttcattaaaagaaccgactgcctataatcccagcactttgggaggcccaggcagatggatcactgagggtgtttagcgcctgtaatcctagctactgtggaggctgaggcagaagaatcacttgaatttggaaggcagaggttgcagtgagccaagatggggccactgcactccagcctcggtgacagagtgagagtgtgtctcaaaaaaaacagaacagattgccaaagttgtatgtggctatttctatgaacttcatatttgcttcttggttaaagtttccatttttgaagctatgctttaaaaaggaagaaagatagcatctgcctacagatggagccaagaaaataatacagagaactaatgctgagttgaaagtaatggtaatgatattaagcaatgtggacttataggcgttcgcaatgacacatttgtttctgattgaagttaattaagaccatttggtttctttactgctaccacatgcgaccttttaaaaagaaaaagaaaataggtaggcttttttggagggattccagacttcagtatttgaatgtcaatgcagaagaaaaatgctgaatgcatgccctgacatggctattgcatttgtcagctgttgtacttactacagttattcagactgttgttcgggycacagagagagctaccaccacatgaatcaaggcagggattgtagaggcatctttggtctccttcttgacatgaagtctgaactacagagggaggaaaaggcacattggctttcatcatctacaaattccttacctaaggatctaaaagatcaggaatgtctgatggagctgaggaataacacaactttaatttccttccaatttctccaaaagtattgaacgtacgttgaataggtgctttctggattcattttcctggtaattaaatacaatccaggtattccaaaataggaatgaagaaataagagacaaactacactaaaaacaggtggttgttgcatttaatgggaaaaaaatagtgttttctttttacatgggtgccaacacttgattacaaaataaaattcaagagatttgagggacagagaacgttataaaaatcttgaaattctgaatattaagtgacacttttttaagactcatttgctcccaattctagtctccctctaaggaaaatgctttctctagtaataaatagggcatcaacaccaatacaataaggatactttaccataatacaagtgttatgcagctgttatccatattttcaatatgtccttggaaagtgtcatcagcctagctgtgatgacttgagaactgggtttcttgtttctaagtgaatgacagcagtagtatcagtgtttgccctaatgatttttccttaaggtaggtagagaggaaactgcttttccttgattccctggtcatttgtagattaaatggagaaggtaataaattactgcccattcactctctcccccattacgatcaattaccttcaggcatgtcatctggaatctagtcaaccttgcaaggcacttttaagtataaataatagtatgtgtgtatgtataatcattcttacctataattctaagatgatgtttattatactgaaatatttatcctttccagtaccactaatgtgcaaattaatacacaaagccttgcagaaaagagatgtcactctttttttaatgtcagcagggtcaaaattttttctcaaagcaaacctaaacaatttctgtgagtttaggctcttgaggaggttttattgacatcatgcattcattattttggcaaatattaagtgcatgccatgtgacaatctatgtgacaagctaggcactgagcattaaaacataaaagggcataataccccctgggaagtggcttgtgctctgatagaggtatcatcctgaacaaaaccttctgatgctgtgtgatcactgctttatggaagacatatttatttttacttatttattgtttcatagagatgggggtcttgctatattgcccaggctagtctcaaactcctggtctcaagtaattctcctgcctcggccacccaaagtgctgggattacaggcatgtgctaccacgcccagctaaaatacatttaaagagcagtagaagccaatgagaccagtatggggaagtttctcaaaggacttttccaagtcatggtaagaggaaaggatgggtttcccaagccaagaaacagcacatgcaaaggcctagaatagggaagtgcacaggtcaaagtaactggagcttcaaccactgagaaaggggctgagagaggctagacagataggcagggacagagcctgaagagtttcaaaggcctgactcttcagcaagacccaaagtctccagagaagtggcccctgcttccctttccagctctgtctagcagaacaaacctgcaacccatgctgacaattatgtagtatttagtaccaggccccctttcgttctcagctctctaatcacaatggtctgccttctctcatggtcctcctacacatgccttgcaccttcccaccacaggaattttggtcaagcggtgccttgtgtctcaattgctttttcaagccccgttctttttggttaaccccactcatccttcaggtctgagctccagtatctcttcctcagggaagctttgtctgaggcgctttaccagggcatgcaccctattaagggcatccaagcaccctgaatttcccttcttagcctctgttgctgcatggttaagcattgacttgcctaataattcgtagcatgcctatgtcccccaggagtctgcaagctccatcagcggttttgcttaccactgaattcccaggggatggccacatataaacaccacaatatacattttttgagttgaatccattaaagtgaacaatataaaaatactaaaattttacttttaaatctgttttatcatatgactttcttacatctcacacatgtaaggaaataatctacaaagcctgccatttcatcatgaaaaatccaaaattatttcagagttgaattatacagaaagaaagaatagtttgatgcaaacggaagtgctcggttgatatgcacacaataaattacgtttaataaaggatttcattctgaatttaaaaactggtaaaacaaagcactctttatatattatttttatgtaataagtctgtgactgaaaagctctccctttaggtcttgggcatttttccattaaagttattctaatgatcaatatgcattacgacaaacctaatttatctataggtgaccagtctcattggctgattatgaatatacacagcccaagatatgctttaatgtagtagccatgtaataaaagctcacatatattgagtttttgccatatgccaacactatgaagtagttatcactattctgagtgtacagacacgcaaactgagacctaaaagggatgtaagtatcttgccaaaagtcaccatatagtaagtagcagaccgaggcttgatcctgggtatcagggctgcaacaatcatgttattaacaactaggctgtgcccgtgtagtataaacaaatgtgatgtttgagtctaggcatattcttccctggaccctactgagaggcttccacacacactggagctgcatagaactttcttttctgacagaaatagttacatttaaaaaacaatttattggatctagtttttctttttgagattcacacgcagatatcaaatccttttaaagtgtattgctcggtaataagaggcattaaacygcttctctgaacatgattattttaggaagacattacatttcctttcagaagccaatttcttctcactggaatctaatctgatttaattggatgctatacactaaacttctctctttatcacggctttccccatcgaacagttaagtgaatctgaccatgctgttcaggtgtctcacctgaggaatgattttcagtgtaagttgcttgagaattatgtttagcacaagaaagtgtttcctggctgactagggctgtgaggaccactatgttaggcaatctgggattatttacatgggaatcctacttaagcaacttcaaatgtgttcctttgttcccaaggagaggaccaccagtaaaggaaygttctggggtggtgggacacacttactgacgctgcagttctcctcatcactcccatccttgcagtcctcgtcaccatcacattgaaacgtgctggggatacattgtccatttctgcattccaccagaccctggctgtgacaggctaggaaggaccakaacaatattcactttatttattaattcttctctctcaatctgcacatcaaataagcaacagccatttatcaagcatcgctaagaaacaaggtgttctgcacacacaaatgaacatatcattgattttatttctagaatttttcctgccttattgaacagcacttaccaagattaactttttcttgagaactgtgtgattgtttttagtgatggaagtatcatgatcctacttactaataaaaatgacaatttgtaaagggttcattatatggcaagagctgtgctaactgcattgtatatataatctcaaattctcatataaatcttgtaaagtagatactatcatctttgttttacagatgagaaactaaagtttacagagcatagtacttgctcaaagtcccatggctaagagctacagccagaatgtgaaggcaagctttttggactctcagccccaatatttcattatttatctacttgacctcataagccaacaaaatagtatatgggaaagaacttgcatagtaactaacacataataaacactttatttcaacacttgtttatgacaactgatatttgaaagggatggcctaatatccattaaccttctaattcctatcggttctctaaattctatacctattgtcttttagagtatcggaaacccatggatcatgtgacctcagccttcactgaattactaatattatgacctctctgttcttgagtcaagactccacaccagaagtgttctacctgagcaccatgtccttgcttctccaagatctagtgagatacagtccactctgttccactgtgtccactaggcaaggactcggaggacatcccacttcaaatccatttcagggaagaggagagctacgcattgtgactttttatatgacttttcttatgtcaaaataaaaactatgtaatccacatttctatttttgcctcaaattataagccaattaaatattcaatctcatgtatataatcaactttcttacttttactagacacaaaaagatgaaatgaaaagtataattaattcaaacatgcaaaagaacatatcacattaactctttcaggtcaactgcactctctcttaagacctgacagcttctattcaatcatgtatattattctctaatgggtatagtatattttccagggggaaaaagtgttaatagccatacttgttattagtttgaagtataacaactgtctgaagattttcattcacacagaaacacaacagtttataaatttatattattactacgttctctcttttttttttttaaagatggagtttcaccctgtcacccaggctggagggcaatggcttgatcttgactcagtgtaatctccacctccctggttcatgccagtctcctgcctcagcctcctgagtagctgggactacaggcacctgccaccacacccagctaatttttgtatttttactagagactgttggccaggctggtctcaaactcctgacctcaggtcatctacccatctctgcctcccaaagtgctgggactacaggcgtgagccaccatgcccggcctattatgctctctttgtatcatcatatgaacattaaaggctctcttctctctgacgattctttccatgttcttccacaaatggcccctgaaaacatgttagggcactcctgcagggaagcttaactactcatgtattgtttgcagaagaaaggttccccattctgtgggcagagcatcacctttgacaaagtcacagaagcataaaagagacatatggagcaacgagagagaaaacagacacccacttggctagatcagccaaatgaagcttggagttttgcagggagaggtgtggaagtcagatacactccattgctattgtcatcccatgactcagtgatctttacaggctagaaccaaagcataagaatctttcccttggaatgctgtgtatatagtgagtcttaagtacagtcctcaaccttgagtacagcctaaagaaccagaaatggaaaaataagcaaaacaaacgtcctcagagcactcacagcagttgacctcgtcrgacttatccacacagtcgtggtcaccatcacacacccactccatggcgatgcagcgcccgtccccgcagcgatgctctgttgtgggattgcaatctggagaaatgaaaactcacgaggatgcagagaaccagcatgactaacaggcaggattctatggctcccagttcccatcgaagagagtctgttccaatggctccaataccttcaataacatttctacaataggtctggcccaattaaaatgccacgccctccccactcatgtgmcccactgaccaccatcactgtggrgtaagatgggtctgtttttcagataagtaactactctagctgccccaggacccgtagtttgttcttattgttgttggcttttgttttctttagttgtcattttctttccttatgaaaaatttatgatttctaccctggttcaaaaaacagaactgtgatttgtgtttcacaatgcggctagcggatttgatgtatctgtaacagctctctcacgtttctaggaattataacttacctgtctggcaaaytgggaaggcacgtatctccttgtcatctctcctgatgctaagcttaagtttttaattgattatcttttttttgagacaaggtctytctctttctcccaggctggagtgcagtggtgtgatcatagctcactgcagcctcaacctcctaggatcaggtgatcctcccaccccagcctccaagtagttgggactacaaggaatatgccagcatgcctggccttatatccaaaagaactgctaggtaagccatgcaaaatatttatgttatattcatgattctttktagcctgracttcaactttgtcccaatttatatattagtgaaaaagaactaagtgataagttcgctctcacaaagggcagaatccataggatgctttgccatgagaggtggtataccctgaatataagcagtgttttagaagatgtatgtggattcatgaataatagattccatgagaaagtatgatgagtctagtaacagtgccatggtcatagacagacttccggagtgaccatggatcttaaagcatattttggatcaacagaggaaagtatagggaggacataggtttgagaaaagaagaaaagcataagaagtgcttgggcaggaaccagaagagcacagagagccagggcagaggctggtctgaaggaaagtgataattattgctattagatggagacaactggcatccagacacacaaacttcacgatagcctgctatcttcagaggaattatgttgcctgttaagaccattttttctcacatgctacctgcatgctggccctctccactaacctatccaactaccaaacgacactcactcattttcaatcccctgcatttcctaattatctcactggtaaagggaagggttgaatctgatgatctccaaggcctcctgcaactataatttctgtgatctatataattacaatttcctctcatcctttttctcaagactagtcagtcccaggatataacccacatctaaatgtaaattagtatagtcattatggaaaacaatatggaggttcttgagaaaactacaaatagaacttccatataacccagcaatcccactactgggcatatacccaaaggaaaggaaatcagtatatcaaacagacatctgcacccccacattcactgcagcactactcacaataaccatgatatggaatcaatttatgccatcaaaaaatgagtggagaagaaaatatggtacatctacacaatggaatactattcagccacgccaaaagaataaaatcctgttatttgtagcaacatggatgagcctggaggacattctgtttagtgaaataagccaggcatagaaacagaaataccacatgccctcactcatatgcagagttgatctcatggaaatagagagtagaacagtggttactagaggccagaagggtatggaggaggagggacaaagagagattgctgccaggtgcggtggctcatgcctgtaatcccagcactttgggaggccgaggcaggcaaakcatgagctcaggagttagagaccagcctgaccaacatgaagaaaccccatctctactaaaaatacaaaaattagctgagcgtggtggcacacacctgtagtcccaagtactcaggaggctgaggcaggagaatcacttgagcccgggaggcggagattgcagtgagccgggatagcgccactgcactccagcctgggtgatggagcaagactccatctcaaaaaaaaaaaaaaaaaaaaaagagagagagagacagagattgtttaactgatacaaaattacagctagataggaggaacaagttgtaggtttttatagcactggatggtgactatagttaatgataatttattgcatattttcaaataactaaatgagaagattctgaatgttcctaatacaaagaaatgataaatgtttgaggtgatggatacactaattaccctgatttgatcattacatattgtatacatgtattaaaatatcatgctgtattcaataaatatgtacaactattattagtcaaaataaaataaaaataaactattatcagaaaaaagcaataacccacctctatctagtcacacaggaatggtttgtacacatacattttaaaatatttttacagatacagcaagtggcagctagacagcgctcctagaaaccaccaggtttcccagcatggggttattcctaacattcatgattccaatgccttcctctgaccataccgctgatccttcccaaacattcattttgatgttatctaatgcrggacattgtctgatatcatttgtccagggtgtatcctcatcccagtttgcccttttgttcatgttgcaaagttcctacgtcactcaataatatgctacctaaaaattctgaagctagtcacaaagccaaaaaagtaaatgagcaagaggaattttgctgattttaattcatgagatggcattcagaattggacatgactctttaaaaagtggggttattctttaaaagataagatcaccatgtgtacacaaaacaaatgcatcatcctaaccctgggtgtagctgctgaacaggtggtccctgtactatttgaggattaaataaaggaggggacttcagtcacatgtaccaagggaatcaggcacagacaatatatctgccctcaaagtttgctcaaaagcccaaatctaacgtaagccactggctctaaccagaggagaaacagaacacatttgaggagaggaaaaaaaactattaatgcattaacaacctttaccagtcttcccatcccacttcttaaacattttcttaatatgwttttttaggtattacatttacacataagacattactgaggacagtgactgaacaaacttcctccttctaaaaaacaagaaaccaatcattttgtaatttaaactgctaatcatattaacacataatgaactgtaagtttttggttataaatttctatgattttaaattaaaacctttggggaaacaatgctacttaccacagttttgctcatcactcaaatccccacagtcatcatatccatcacacacaaggctgtaattaaggcacttgcctgtgtgacagtgaaacagattctcgctgcagtctgcaaataaaagaagccaccagtgtgtcatcagagccatacagaatgctattgtagtacgatatttaacaaaagccaatcatggaagggacaccctaatggtaacctggtccacacctattgttttataggtgagaaggtggcacacagagatacaacgacctgttcaaggccacttgaacagtggctcccaagccaagtgattttatcactttctgatgtgtttctctgacttctattttatgtcacctgaacgatccttgattgttaaagatgagaaaagacattctcagttcaccatcattcctaatgaagttcttgttcatgcagaatagactttagtaactcttatgttttctttagagttgaagtctaggtttgtcagtagaaagcataaacataacaaataaaataagtcatttagattatggagttattatttcctytcacataaacattactgcttaagtcaattgagtgtttcataatgcaatcctcaaataagcaagtactgtccaaagactatggtggcaagatgagaagtgctatgtaatctcaggatgcttatagtttaatgttgaaataaacaacatccagggcaaatggtttcctgattttaataggaaaataaagtcttgtccttgggtaaaccagaactcctatcctggttctgccatctactagctgtgggacttttagtgtgttattgttagttcaagtctaggagtctgtgaactgatgtatgaaattgggacaaaatcagccacttaatagggtttgaaagaagagtttaatgaaatagtgtgtgtaaggcaattcaatggaaagagaatgttcttttcaacaaacggtattgggacaatactagaataatatttgcaaattatatgtatgataaagaaatttggatatccagagtctctatagaactcttacattcaataatcagacgaaaaagaattcaattataaatggtcaaaagacttgaatagaaagtcttcatgaaagacataaaaacacatgaaaaggtgctcaacgttattagtcattaagcaaaggcagcgggrggtgagagggcaggacaaaacaaaagaaaaaaaaataagctaaggcaaattaaaaccacaagaagatataactacacatcccttaaaatggctacaatggaaaagatggataatagcaagtattggcaaggattttgagaaaatgaatctcatggatctctggtgagactaaaataataatgccaccttggaaaactggcagtttcttatgaaggtaactgcaaccttaccatacaattaatttgtgaattccactcttaggaatctacycaagataaattaaacatatatccacatgaagatttatatatagatgttcacagcagcattattcataagccaaacactggaaaaaaatccaactactcactaactggaatggacaaacaaaacgtaatactcatgcagtgaaatactactcggtgattaaaaggatgaaactaccaatatatgtgacagtatggatgaaccccaaaaagttacgctgtgtgaaagaaatcagatacaaaaattacatattatatgactcgtttatggaattcccagaaaaaacaaatttatagaaacagaaatctgagaagtagttacagtagctgagggattagaattggtgactgactacaaatgtgtgggagataaattttgggggagatgcaaacattctagaactgtattgtgcggttagtcgcataactctataagtttactaaaaatcaatagatgaaatttataggatgtaaattatacctcaataaagctgtaaaaatgtttaaaatcaatatatgtaaagaaatctgcattttacagaaactagatttcttaagtatatttttatttcccttatttaaagtaaattaagtgcaaaacagtttgcttaaggctggagaaggaatacagaaaataggcggaatttcaatagggtggatgtaatgaaaagtttagcatatttcaagcagatgaaatagcaagaacaaaggaaagaggcaaaaaaatagggcacgtttgaagatcagtctacttggctgatgaaggccagaaatcaagcagtcagtggttcaatctcctgaattccagctgattgtttctcctcaagcagaagcctgtatctcatacaagtagcagccaccactttactgtaaacatcccatactagatgacgattcgttatccaaagcctttggcattgatcagttaaaacattaggcttgccaaaatatgacacttacatatacatgaatcataaattwctgtttcaaaaaagcactcttctaaaaaaaaaacaacttaaagtttttagaatcacatcattttaggaatggaaygggccttagaaatcacctgttcagtgtcttcattaggaaggtgtgtatgtgcacagacacacacacgcatatatacacgtaagtccatacttataagcatacagaactttgtaagtactttttatttttcacttcccccagcctgaataattttcaaataaggacagccaccataagggaaaatataagaactaagaagtcctagcgatcaccttgacaacggtattttatcccactcagcagagggcgctatttccccaccctgcacccccactgctgaatgaggctacaacacatgtgacagctgagtggaaaggttatgacactggttcttctgcccacagggtagatctggggaattcgtgcatcaagatatatacactaccttgtgaaattctaaaagatctttttgatgtttttttgtcttaatctaaattactcttgtgggaagttttgagtcaacatgctagaatcagcaatagcccgggaaataaggcttctcaacttgacgatcagtgcaaagtatacgcatgcattcgcccagaggatgggggacagtgtttcagcayaatttaaaccctaggagttaatttctttgtaagcactacactcactttttttgacrgtaggactactagggaatcaaatacccctttcagaatctgattaacctaagaacacaccaaaaatttccaaaagtttatttgtcttctatgaggcccattctaggacccctggtaattcatactaaaacactgcattggagatattttaaaaattgatgtcctcatttattaaattactttataaatggagaggattcaggcattttttaaaaatcctcattgttctcccaggtgtggattcaactttctactattataacttgcttggttagaagccatttttagaagtgagatacaaaatgagctgcatttggaaaacaatctgttacttccctaaggtctgtgtgattagtaaacacgcaaaaccttaaccagaggcactgcaaagccagaaatacaaatggcaaatgcaaatacagtagcaaatggcaaagatcacagtgtctccttttactgaaataaatgtttatttgacctggaaagagatgttgtcagtgcaatttggggccagcaaatcaaaatttgaaaaagctgcttgctgtgattttcttgctcaataacaagcataattttgcatggcctaaggtagatgtttttctagacacacctttttttttcttaaggagagcttgatacaaaatgtttcttctgaaattcttgcatgttaatattgatttcagtttggcatctcatacgcacactattaattcttgtctctcaaaattatygttaaattagagcagaaaactaacacacagaaaggctttttctcaaaggcttctttcaactgtacagtctctatgactataaacatgaatgtgttgcctcaactcaagatgcaagtacggatgctcagtttccacccacagaagattaaatatggaaaggaccagaggttatttcatccaatcctctgattctgaaatgaccagaggagttagacggtctgtccactgttgctcagctcatttacagcagaaccatgagaagaaccaggcttcttgackctctgagttctttctactattggcttccagctctagaaaagggtttctcaacggcagtatcatttgacattttggactgggtaattctttgttgttgggggctgccctgtgcagggtagtttgtttagcagcatctctggcctctacccactagatgccagtagcacctccctccactctcacagttgtgacaataaaaaaaagtctccatgcattgcaaaatgtcacctagagaattgaaaatcatgttgcacagtatacaaacatcacctgagtgcaaggcctagctttaatcccatcttttccatcagctgtctacgcaatccagcttctagtaatcttactctttttactagaaggactccctgctgctgcctttttttgtttgcttgtttacctcaatttttttgactttgtgatattgcttgtgttatactgttttaaaataccatatttaggctgggcacagtggttcacgccggtaatcctagcactttgggaagctgtggcaggctgatcactttgagctcaggagtttgagaccagcctgggcaacatggcaaaaccttgtttctacaaaaaatacaaaaatcaggcctggcgtggtggctcacgcctgtagttccagttactcaggaggctgagcctggagaattgcttgagctcgggtagtggaggctgcaatgagctgagatcacacctctgcactccagcctgggtgacagagtgagactccatctcaaaaaaaaattttaaaaaacatatttaatagtttctatgtgtatacgttagttccctgatttgattaaaagactcataaagaaagaaaccatggcttaacagtatctttctatttactaggtagctaaaacatgattcatacatagtaggaattaaagaatattcaatactttgattgattcagtataatcagattgccactatacaaaaaagtaaaatttgcaaacatttagtacttcttccataagcatagagtttttttatttttataattttgatgaaactatttctagcatttacttgcagctacatcttagtagaaagattattatagatacagtcatttttgatgattcaaacatcatttggaatatcaatttttattttgtgctgtttaggctgcctccattctaaaayagcttcacgtggtgctgcttttaaaattgttgtgcatattttgtgtttctctcttccttacatgtatcagctgacattatcagctgtccccacgacttccagtggtcattctctgcacctagtaacaagaggtgctgggtgggagtggaggaacaataagataacaacagtgacaacaacagtcacgaccgcaaatcctagtgctttttgagacttactgcatgcaagacattggtctatatgctttatattcagtgaatcattattctgaacaatttgagagatattcactatttattgtttccattgtactactgaagaaactgaggcacagagaggttgagtaacttgcctaagttatcagaggcaggaaatggtaagatcgaaacctaagcagcctgactcaagaatttatagtagtcattactacaccgtattacactcggtgtaattagatagccaccatcctcaaaaataagtcaaccaattttacccaaaattcacagaaaatgattttcaaaaatatttgatagtggtttttatgtgtcataaaatgtgtgaactttgtggcagctatttcactgtgaaaacgttttccttgagtttctaatttaaaattaagaagtattcatctactaagcacttgctatgtcctaggcactattctaggagccggttatagactcaaaagattatagaatcttaacaacaaaagagacaccaagcaccttctagcccggtgcttccaagtctggccgtccattagaattacctggagagcgttacaaaagtactgctgcctggtccccactgcagacaaactgaatcaaaatctctgcagatggggcttcctgaggaggccagcatgcagccatccatgatgatactgaaagccagggttacagaagtggcctgcctaaagccacagaggtagacatttctaaaattttcctggtttttgaaaatttttctactgcaccactaaaattgtttcaggtgtttggaaatcttttcatccaacaaatacttaagaagagattgacaagacaaaaccagttaggggagaaagtcagaaagtcacagatacctggagtgctctttaataaacaattacctctgaaagccgtaatacatcaaaatcagttaaaacattttcctgcaatatgaatgatcagagtataatctcactaaatctgaacttttttatggacaaggacaagtcaaaggcagacgagctgaaagaaaaagcattagattttgaaccatttaagactgggttcaaatttagcgaatcatgggcaaatttattcattgccctaagctctgtctctgcacctgtacaaaaggtggtagataacacttcctatgctgataattaaatcaaagcatgtaggtaaatgcttctagcatagtttatgaggtaactcacaaataataagtcccttttctcccttcctttgaacctgactaaaaaggaaattaataactcaatgaactacacaggccacctaatatgacccatgttttataaaagcaggcaagtgcttagctagagatcatttttgcatctaatccatagaagcataatctcctctgacagtcctccttcttgcctacttgcgagaaccttaggaactaggcattttcttctgttcctcactgagaacgcacagcaaaacttccttctcctctcatgagtatctgtgggttgcattcactctgattcacatccaaggcctaattcagacttacactattccttcaccacagggtggtgacaaaaggagtatggcaccctccataaacactcatgctgaaacaccacaagcattcaaccttaaagctcaaaagcagatgtccttgtaaggtcaaaaacaattgcataagaagccttcaatgtctgtgttttcatacagaagttttctgaagggatgtatttccccaacggaccaaaagatcatttttgtgatatgttcatgggaaagggccatatctattttccttaataaatgcttcagctcctcagacattggcaaatgccttgcaaaacagtaacacgttgttgacaaggaaaattagccccttcaaatttaatgttaacaaatgcagcagaaagcacttacagggtttggagtgcaatgctcagtactattgaggaacatatgataaaaaccatagttggcccaccacaggagatacaggcatatgcagaatttgaacaataccataacttgggccacaatgggagaatagctagagattctaccaaattcccataaattggatatcgttacattgaattatttaaagttccctattttggctgctttgcacagcatcttctgctaagcccacagcaacacttcccagtgtaaatacacagcctacaaaaatgtttttatgtaaaattgtgtgccatgcgttgttttgaaaagaaaattccaagtcgtaaaacacaaatttcttactgaaaagaacgtttcctgaaatatgcgtggcataattgaagttccacgggatgctagatagtaggcagaataaaaaatgcatgaataaatgaataaataaaggtgaagattcacatgagaaataattctgatgaaataaaaagttaggcaaatgtctttttttaaaactacagaatttctcagaacctctaatatacaaatgtgtattctaaccctctaagaagtagacctgatagtatttcccaaagtttttttttttcaagcattattccagactcagatactacatgaaacaccagtttgggaaacactgacctgaaatgttaccatgataaactgccattcagtagttctgccattcagcaggacaaaggagcgtcctagcccatcagatgaaagatgagttggtccatttggcaaacagaccagaagaattttttgattaagatcagtattctcaagcacttattacatcttggcaattcccatgaggagtgaaacacagctcttgccatactaactgtggctgtttatataacccttaaagaacaattagaactcagatgaaagatgagttggtccatttggcaaacagaccagaagaattttttgattaagatcagtattctcaagcacttattacatcttggcaattcccataaggagtgaaacacagctcttgccatactaactgtggctgtttatataacccttaaagaacaattagaactcttgcatgtagtgttctaattggagatacttctgttttgaatacagattactcagtgtaattgttttctttttttaacctactaggggtgaacaaataggacactagctttgtttattacaatgtacttcttcaggatggttttccccttctttccagtttgtaagtgcaaaacaacttgaaatctgaatctatattggacaaaccactggccaattcagtcaaaatgactaatcaatcaatggggaataaattgaggacacataaggctgaatctactgattagtggattttaaacagttagtgccattgactatctccaggtttggaagaagcataaaaaaaaaaacaagaggctttgtatttactgtgtcatgaaagttaagaatcattagggtgaaaatgttgctataaaaatgtccttttttaaaaaaaattgacctttatactcataaacaaaaatgaaaattctcacccaatcaaaataaaccaaagccttctcccaatttaaaccactttgtgcaaaaacgctgcaatccctcatctgttccaatgcagcctctacctgttgagctcctaataaaccatgcctttgaaaggtgtgcaaacatgctgctgtcattctgggggaagataaacacgtttgctcgctttagaaaggcaaacaaaaagcagtctacacaaatgctgatgattgtcaggatttgagaatccctgtccactcagacaaaccctaaacagcttgtcacatactgcaatgagcctcgtcactccagtcgtcacagtcgttgtagccattacattgcagtttcccggggatgcagattccactggcacacagaaagttctcaccccttccacagagcactaaaaaaaaagggcaggaaataatgtcagaataagatgggttttttttcttttaagattacaaaaaataaatacatagaaaatcttcttttgctattcaacagatttgtttccaaattccctcagttttattgtcatcaatttttctttggcatcctagcacattaattgaaaaattacctggaaataatacaaagagtgattgcttgtctgaggaaagcaggagatagttcaccagtgggcttgcagagtgaggcatccatgttcagagagcaagagggtagcttcatcatttgcacaatttatgtggggagaatacccaatgggtgtatctttctaaataattgaaaattatgtccaagtaaagtgctactaattgaaccaacatttaaaaagtctacctttctaaaaagctactctatgtaccacagagaaagttccagtaaaaacagagtcagtaaataaccatttactgtgtgtttgaacatagcatagagacccagtgccctgtatttgaaatgtatttacttgccttaatgaaaatgccagttaaaatgtcagcgtctattttggcataaggaacgggaaatggcattcactaataaaattttcatttatttttccttaacacagtgacatttttatatttttgcttttaatattttggtgttctttttctcttcaaaatgcaataagtattccactgcttcaaaattacagtagacaataaatttaagacaaaaagatacaaaatttttcaggaagaccattaataaaaggataaatcagctcaacaaagtggatgttaagataaaaaatatttggtaatgtgcatcaaatgccttttaagtgtgcataatctttgactcaggaatcatcttatttcttagacttcacaaaaaggaaatcattatgaatttatgttttatgtttaatgatattcataccatcattgtttaaaatgaggaaactatgaaataaccactatgcaatattcaggggctagttaaataaattttgataccaccataatgaggaatactgttacagccattgaaaactacattgtagaaaatacttaatgtcctaggacaaagttcaagctactttagatgagaaaacaccaactggtcctagaaaacaaaatacagtttggcatcgggagaggtatattatctttggtattaggattaaagtaagtttactttttactgtattgtattctgcattttacaaattttcttacaatgatgatgttttatctttttagctgggaaaaaaataacttttttatgagctctagtttcagataaaaaaaagttaagtagaaccttcaaaaatctccttctgtctctctctcaccttccaccaaagcttgtgtgtgtgtgtgtttgtgtatgtgtgtgtgtgtgttgactgtgtggtcagttgcctggtcactgccaccattccctgcagtatgtattccttgataagatgaaccttgttgactagttacagggaatccaggaatatggaacattttaactcagcaatagaaatagagaaaagtacaggctgaaagctccagtcaatgaagcccatgtctgttatagttcccatcatgttcctaggacccagcggagtgcctggcactcaggaggttctcgattaatatatttcccacccatgttcctgggacccagccagtggctggcactcaggaggttctcgattcaatggaaaaagttacctaaatccctaatagaacaatatattgccataaagcagaaaaaaaacaaaattaatgaattatttcccaatgctatcaaggaaatcagcatttcaactcattgaacattaagcattagttgatctggtaagtttcttatgatactacttcatgtaacatcttcacaatatcaacaacaaaagcccagttttccattatagtccataatttcagtatcaatacaaattacatctatggatttcaactgccaaaatatccaacatgtttagtatggtgtcagaagattccgcacaggagtgcactcctatacctacaaatacagactcctaaacgattcatagaaaaccagatctaaaaatgaaaaaccaaaatactaagattttacctatccagtctgtacaatatcctctctctgggtttaagagaaagttttaaaggagggtttatcttattgtgagattgtttctgtattatactagagagtgcaaaaattccatatgtctgcatttcagcagctgcaatgcctcacaagaattattgcattccccacctatggctccgatgattcctcaggaaatggaactgaaagctcaagattcaatagctcctaacctccagattttatctttaagaccctacatatttgactccagtaaagccatttcttgcatatggtcatctcaaatctggatcaaatttaaaacccagcacagcttgcattgttttgattattgatatcccctgtcttggctgattcagcagaaactgacttcttttgtgtggttcctcatctggaagtgtggctgtccttggttttagggtatcataaattgttactgtattcttgttcttttttgaaagttcacagttttggtagttaatattacttttataaaactagaataacttttgtaaaatctttctgtttgatttcttcttaacctgtattcagaatttccactttacttgtataaaactgttcaattattaaagtactacaaacatattttatttggtagtttacaaatgaaggaaatgaagtatcatgaggtcaacattgaaatgggccaaagccacataattaaggaaagatgaaaaacaccccaaatcccaaggtctatgatctaggcccaatcctccatgccacacccactcccctgttcctggtacttgtgcaatagtgtagtcggctgatactcggccagtttaagggcactaggtttgagtaaaacttcaacattgtctttttctctctaaacaaaagacaaatgtctgtcttgcagtgaattggatccagatgagatgacattccatgtcagttctactttttttgaacaccctgagagrgctcttatcaggtttctgtagagatttttctaccataaatatcactgtcttataacaatcattttccaacaggcttttgagtggccccttaggatgacaaagggagattccatgagaagtcatgctatacaatcttgaaactatttccactaactataattctaagaggtatatgttggaatttaaatcaatggcagattgataactggaacattcgttcattcattgaatatatatttactgagtgtctactatgtgcaaagtactattctagcctctggtaatatagcagagaagaaaacaaaaaaaaatccccaaatagagcatatattctattgatcatcatctgatgaagataattttaccaagtaaagatacttcactgccaaagctgacttccattacacatgggacagttaattaatactactgcaaaaatagcagtatatgaagttatactgcctaaaaagctagtttacatgtccagatgatggggacaattatggatcccctggacttcagaatgacatggatcttgaagagtacatacccaaaggatgatcagctcttttcagcattcttgtctctgacaacagactgctaaaataataatccctagcctgaaatcaccttgagattttctgcaattgcttccagcttcctaggctctctctgtctgtgtatcaatattattggcaaatgctcttattattctggttgttaacttttagagtccttttcaaaaattatccaccagcctgccacggactgtatggtgcccttacttgccctgtctttgagtccttgctgaaagtcaaaagctcagtttcaactccacctcggaagagaaagctgacacagctctgcacatcacatgggcccgtgctgagagcctgtcagcgctccattctccatgctgctcgaaatcaagtactataaaccactattgcccttaccttttacaaggttatgtcattagatgaaaaagactgagtgtaatctttcagcggctgatacaagaatacttcttggggagagcactgtatctgtaggcacaatagattggtaaaaggattggggtaaaagacaagaggtgagaaaggggagagaaaatctaagggtgtgctcaaccaacccaacatggactttaccctgccttctgaggaggtgagtcatattagatggaaggcccttcattctgctgaaattaagatattttcagtaggtatggatgagggtctggaagctctgagtacaaaaggagtgaggggccaggtgcagtgccgcatgcctgtaatcccagcactttggaaggccgaggcgggcagatcgcctgaggtcaggggttcaagaccagcctggccaacatggtgaaaccccatctctactaaaaatacaaaaattagctgggcatagagacatgtacctgtaatctcagctacccaggaggcgaggcaagagaatcaatcgcttgaacctgggaggcggaggttgcagtgagccaagatcatgccactgtgctccagcctaggcaacagagggagactctgtctcaaaaaataaaataaaataaaaatgaaaataaaaaataagaggagtgagaattcccatgaggagaaaggggagctggtgctgctgggcactgtgctgggggagagagaaatttgaaaaggtggctgagtctccattagaagtacagtatttccattttttggaaaatagaaatatctaatgacgtattttaagttatttcatgaggaactggagatataacacacgccttcctccatctgcaaggcttgtgttgccctctgatttatgcactcatttctttaacattctgtattattacagaataactattattctgtatattctataataattaattattatagaataattaatactattctgtattatgtatttttgaatacagaatagctcccttgccttgggaagcttatactctagaatgacaaactatatcaataagcataattttaaaattcttatataacacacaagatgttaataaatgctatgaagaagagagtactgcagggtaagggaggtatagggtataggagtggggtaataacattaatattattaatattggcacccaatattaattagggtgccagggcaggcctcactcaaacctgacatttgagcaacaacttgaaagaggtgagggagtctcaggaagattcaaggaagagctagtgcaaagttcctccggcaagagtctgcccggcaggtgtcaggatcagcaaaaagacctgtgtggctagagtagcatgagcagggaccaagcacaagaatgaggccaagcagaagggagggtccaaacacacaaggctctgcaggcctttgtaaggactttgtaactttaacacaagagtcattacatggttttcggtaaagagtggcatgatctgactgaaattcttaaaggattgctctgcctattgtgttggaaatagactctagggggacaagggaagaagtagggatagcagctgggagtctatttattgagtagctgtggaggtactgagacatgagtggatgctggatgtacaagccatgtaccacgtaacaacatttttcttaacaatggactacatatacaacagtggccccataggattacaataccaaatttttactgtaccttttctatgtgcagatatgtttacatacacaaatgcttattgtattacaactgcctagagtattcagtacagtaacatactgtataggtttgtagcctaaaagccataggctggactgcatagcctggacgtgtagtaggctctacatctaggttcgtgtaagtacactctgatgtttgcacatgatgaaatcacctaccaacacacttcttagaatgtatacccatcgttaggcaatatatgactgacagtactaacttctgactataggttggctcaggtcaaataaacaatgaccatccttgaatatctaggagcttgggaaatttcaaactttcttttgaaaacagagtatcatccacatcaagaatatacttacaatctaaaaatgaattcaatctatgtctttctgtccctctaatcccatcattaaatgtggcttcctcagaagtatctgtgttccaagctaagcaatccttctcactctcttcttagacatctattaaatgcagggcaggcactacactaaccactcctaatagtgccagtgcccaagaccatcaaaattgcagtcttctttaaaaaaactgttttattatagctcacataatttatattcacagaagatttccgtttgctgattgtctctctctcccttctagaatgcaatttccttgaagaaaggcattttatcagtttttcttactgctataccctgagtctagaatagaactgacacattatacgtgcaagttagatatctgttggataaataaatgaagactgagaatatgaggtgtctatggagcatgaataaatgatcgttcctatttattggctctcaatggcaatgaatatcttacaacttattatttacattgctaggagaataaactactgatgcaggaataaaaatccctttgtgttacagtgtgatgctcactcaagcctgcagacacatctggtttatgagtggcatttgctcttagtaggacaacagatggcccttctgcggaaaataatcttccccactggcctgtgatgatgtgtctaacattccacccctgacacccacattacccacactttgggttaaaatggtaggttttagaagaactctaggttagcaaggaaaggggctttggggccacatcatggattaaaggggtgtattcagtttcctactccatttcaaccaaagagctctactgttggctgctttatacacatgagtccatggaaaattttctttgaaaatgggcttttgttgtcaaaaacaagtttgaaaactccttcacccttaagattttctgttcagttgaacacttagttctgaatgtaattatagactgtttagctttatgttatcattagcttttcattgtacttagacttgagaaatgaaacatagaatgagtgacttttaggggtagagggggactcaggaaaggtatagaacatgaagactcagagtaagaagtgacacctggacccacaaatgagctcagaatagccctgcttgaaggtgtacagtgtgtggattcaacgctgttacatcagggtacaagaaaagccacaatattttcttaaagtaaattcatacttccccactcaaaaagctgatgagaaagatctttcaggcatattttgcagggatctctccctccttaggatggtacaaggatgcaaggggcttacatggaacctggaagaacgaaggaaggacttctagctttcattcctcagagaactgccagaggctcatggcctctaagtcctcaagtgagtgctagacagaacgcgccattgtgtctgtgccaagccagggtacagggccatggtccccagggtccagctttcctggctgccccacacagccattccttttggaggtccagcctcttctacaagcacgtgagcactggtctctgctatataatgggaaggccatcctacatccccctgcttcctcctccaccctccagacatttctctccatgccactcaacctgggtgacccaacacaatctctgctcagtccttccctcctcaatgctgctttccctttccggaggctgcagagatgaaaacacacttttttttgttttgtcttcttagtagatggtgctattatactgatgtttccttcactactgagaatgcaaaggtctccattagtaccttttaacttacacatttttggtgaaaagtagcatatgataggtggttggtaaatgcctgctgaataaatgcacttaaggagctcttaacatcaatattctaaaaaaggcaatgtcatggtgacatcttcttttatgggctgtaggcttcaccttgctgcaaagacaaggtaaaatcagccccttgacaacaatacaactctttcattcaacgtcccttggtgtcatttatatatcttttaattagtgagaaactgtctctgtcaaacaaatgttcagagaaaatcccaaacaactcctgaaattaagtcaactcattggttcatttttttcctttgaaataaagctatgctttgattcaatgaaaactttgccatctggccttcagcttaaattcctaaaaataagagctaagtatacttattgcctgcctgatagcatgatggaagagctattactctataaaaaaaaattagtcatcataacattttctaaaacattgtcaagaaacaacagaatagatctgtaactggtggcactttgataggagagagaatgtaaatagaatttagaaagcatttccatgtcatcattcaacatttcaagtacagtcacagtaaaaaatcctacccagtagattttaaatctaatttaaaaagtagaaagttttttttaaaaggcagagtaaaaagcaggaagctaagctttatgatcagagactgccagaaactgaaggccaagcagaaatctaaagaatcttaattacatttcaattttggaaggaaggaaggaagggcgggagggaggggtgagggagaagtcctaaatatgacctggaagcattttttttaaatcgttggaaaacaagatgtacatcatgattctgttatttatcatttcctgaacagaagtgcagtaacataatttcaaatttctaaaaaacatgggcaatttttaaacttttttgcttattatctatctgcctctcaatgagacagacagatgtttctaaattcaaagataatttctcatttaggtttcttgggaggtgctaccttccgaatttgttttaggaaataaacacttagtttctttaaaaaaattgtgtttaataatactttaatatatttttgagactttcctccaattataaggctgtttcaagtgacattttgcatttattcactatgaatcataaaatgatagcaatggaacaacatataaactacttctgacaaattttaaacaaatacaggatggtttctataaaagagttaaatgattgcatataaatctaagaaaaataaaggagataaattttatttggaaagaaaatagtctcttgcatacatatggtagtatctgaaaagctatatatatattagtattttttctagaccttttttaaatgtgtaactcagtcacaacgtttatggaaagacttaggacaaacataaacaaagaaaaatcatcagtttgaagagccatcccatggtatttttcttattcgttgggctatactgtacaaattgaacaaatttcattttacaagttaacaatttgtggacttcattccaactctaaccaaacttatttttaatcacagtttcttttagtccattttatgtattggctatttaaaagctaaaataaattgcctatgactttacaatattatgtatcctgagaaccagaaatagaaaaaaaacatacttctttcaaatttacagtgaaaagaactttgaaaaatatctttcaaaaacagattacggttctaccctaatgtctaaaaattcacttccaatcccatgaagaatgtattgcatcactttcctacctactctctattgttgattaccataacttgactatttcaaagcattagcattctttttttttcttttttttattatactttaagttctgggatacatgtgcagaacgtgcaggtttgttacataggtatacacatgccatggtggtgtgctgcacccatcaacccgtcatctacattaggtatttctcagcattagcatttttaaaaatccactgatcttcaggatattggtactgtaggacctcaactatcttccggattggataaccagcggttggatgccaagattctgaagccctaggtcagcactccgctggagcccctcctatactctccattcccttcactcaccacataaaccccacccaccagctcccatgcagcagccggtagtgacagcacatrttcactgggtcaaggtagaattgggaaaacctagctacttctgaacatctgacccttcatgcttaaactaccccagaataatcagataacttccattctgaacactaccataattaagagaaaaaagttartggtgaggaaatgagttcataaacaccctgatatccacactaatactgaatctacagaccagaaaagaaactattcacaatcatgacctgagataggaaaataaaggtaatcttgtagaaaagcagagattggtatttaaacttacactatctgcgctgctttggcgaattacttaacttttctgagcttcagtttccttacctgaatcccacctactttgggatcgtctctgagtatattaatcagtaatggacataaagtgccgagcaccaaatcaggtaaggcccagtatgttctgtttactaaggctgggaagtgtacaactcacctctgaaagatcgccatctcaaactattgaaaaacgccttttgcttaaagggttaacctgcagttaagctgaggtcctaacccccaaacttatggatatagcatatctacttagacttggaaggtaggggcacctgggttctttgaaacaacccagataactggaggagaaagtggtctcaagtgatcaacacacacaggcattaatacaacaacatctaggaacagaattatttaatacgaacttctctttggctcataaacagaaaaggaagtcaattgcttcaggaaagttgattttcactgtttaatcgtttgtgtcctgttaaatgatttacacgctggtggaacacagaggtctctggattctttctcccaggctcctccgcttttctactaccgcatgcctttcacagcacactacataaaatctctctcagtatccctagttaccaggattgcatataacaaagccacacagactaaacctaacaggggaaaaaaaaattaaccttgcgtaaaactaaatacaagcacaatttaattaactcgcattccagagtcatagctcccaatttgctaagtctagaggattggttacacaacatccaagcactcagcagggaggggagaaaaactgctaaaatgtttccagaatcttcacaggactcacatgttcttttatactggtaaacaggaatgatggcccctgtgaacaatctatagccatccaatcaaggagacagaacgagccagggcaataaggggtaagaggttcaaagaggttgaagtttcaggagagactacaggggaagaaatgtacagaaaatatctggccttaagattagccctgagtcaagcagagwatggtctactttatccataaagagggaacgcattgagcagataacgggaagtcaaaaactgtgctcctattcctatgaactctcattgctgcaatttgagcagatacagagtctcctctaaaaacacgctatcgatcaactgaatatgcttaaccccgagaggtttcataacatgaagatatgtcagtggtggagggtgtgggaggaggggctgaactcagaatacaggtgatacttctgagagaaggttcatttttttccacttgacaaaagggtaggacacgtgcagttcccaagccatatcacacgatggcagccatactcagcacgtagtcgctgtgaggcacacacagggaagaattcagcctgatcccctcaactggtgagaggcatggcgacccagtggatttcagctaagagatatcttttctgaagggcatacttggcttgtgattgcgactgagtaaatctgaaataatgaaatcccacttctaccaatgattacttaaggtaagtgaaagcccttcacagtttatgcctactcctactgtttgcacacatttctactgctttttttccccctgactggtttatcagagctccttgtgttgcaattattttctcccagtgtttcctgtatttgtcttttaaatctatagcttcttcagctacatgaaagttttgcaaacgtgaagtctaacatgtcagtctttatggtttacgtcttcataaaccatgcttatatttgtgatagaacaaaaactctgtgagggcagtgaattttacctgtttggtttcttgctgtggctgaaggacccagaagagtgacaagtgtagagcatgaactaaataaactttgcattcacctagagcctttctaaagcagatggaaaatactactgccaaaattaagagatacattctggccacaatacaccaaaaacaggccacaagatagagaaactaggtcagatttcctaatagtcaaaactgatttcgacgtggccatagggggaggagacagattgatcaatcggttgatttttgttaaaataatcaagcttcccaaaagccatagtcaaaatgaaaaatacgtagcctgacctctcaaaatgctttccagattcaaatttcagcaaaagggaaagaaatttattaactgctttgaagccagtacctttcttaacacctaccacaagagggagaccacatcataaattcaagcacacggcccgtaaaatatttgtgaagtgccccccgtgtgtaacagtatttgaaaaccatcctatttcatgtgttttcagtatttattttaaaacaaaatcatagctcttttaaaaatcattttgcattttacatgccaacacaaaaatatgaatcctcataaaccaataactatgttatttgtgcatttattttagaatttgctttttacattcttataataaacaataacttcagaaattcagtttttactcagccagttttgtttcaaatggctttttatacatttttactactaatttgtacataatgtgatttctgtggatgctgaatggatttttcagcaggtgatctcattacaagataatctcattacaaatccctgttagaatttctcaccgtggtatccagattgaaatgaaattcttcacagctgtagaaaagttcttccgaaatttgttggtatcataagctctaaactgctctactctatggacyttcaagaaaactaccaacttttgcctttccgtctggcggcagccatcaggtaagccaagatgggtgcatacaagtatatccaggagctatggagaaagaagcagtctgatgtcacgcgctttcttctgagggtccgctgctggcagtaccgccagctctctgctcttcacagggctccccgccccacccggcctgataaagcgcgccaactgggctacaaggccaagcaaggttacgttatacataggatttgtgttagccgtggtggccgaaaacgcccagttcctaagggtgcaacttacggcaagcctgtccatcatggtgttaaccagctaaaattttgctcgaagccttcagtccgttgcggaggagcgagctggacgccactgtggggctctgggagtcctgaattcttactgggttggtgaagattccacatacaaattttttgaggttatcctcattgatccattccataaagctatcagaagaaatcctgacaccccatggatcaccaaaccagtccacaagcacagggagatgcgtgggctgacatctgcaggccgaaagagccgtggccttggaaagggccataagttccaccacactatttgtggttctcgccgggcagcttggagaaggcgcaatactctccagctccaccgttaccgctaatacaagtaaagtttgtaaaattcatacctaataaacaatttaggacagtcatgtctgcttacaggtgttatttgtctgttaaaactagtctgcagatgtttcttgaatgctttgtcaaattaagaaagttaaagtgcaataatgtttgaagacaataagtggtggtgtatcttgtttctaataagataaacttttttatctttgctttatcttattagggagttgtatgttagtgtataaaacatactgcgtggtataataggcttaataaattcttaaaagaagagaaaaaaaagaaaactaccaacttttctcagcaactatcctatgaaaattttgtgacagtcatttcaagactgcttaaaagtagacagaacaggaggccaaaaacttcataaaatgtggtataattcgaaggaatcctgggaggtctctctgcttaaaatatttcccagctgaaattcctcactgtgaatcccactcgtttaacttaagccaaaagtcctcaattaaaagccaattcctaaggactcctctatcttgcaactaaccaagatttccagaggctctccacaaaaggcacagtcctggacatggcaaaactacagraccttaagagatgaagccattatcagtgattaatacctcagcagatagcacttaatatattcatcttctttatttctactttttaaaagacattagagaatttagatgagaaaataggaaagggtggcatctaaagaatggggccctggtgagaatatacctgggtatgtactgaccctacaggaccaggggtcagtgtggggttagcaggggctaaagaagaggggagtagtaaattacaagggagtaagagtggagggaagtcctttgccatgctaagagccaggcatccatgatccttttaaagctaatacttatctggtgctttctcttcacagtatatgtcttaaagactttaccttcatttttccatagaacacattcaagaggtgataacctcgttgactagaggatgaaactaaagctccagttactttccccataaaatagctaataggtggtggagctacatatcagaatctaagcagtttgactccagagttcatgctgttaatatcaatgctcaagagggccgtattagtttcctattgctgccataaaaatttgccacaaattgggtggctgaaaacgacagaaatttattctcccacaatgctggaagtcaaaagtccaacaggggtctcactgggataaaatcaaggtgttggcaaagctgtcttctagaggcatccctcatttcttggcacatggatcccctttgtcttcaaagccagtaacatggcagttgtttgatcttagggctgtcatcacatctccttctctgactctcctcttctgcctacctttttaaagatgcttgtgactgcattgagcctaatgagataattcagaattcccctatttgaaggtcagatgaggagcacccttatttccatcttcaacttcaatttccattgccacataacctaattacaggtcccaggatttaggacatggacatctttgggggggtcattattctccctaccacaggtgccttaatatcttattcattttttatgtgcctctgggttccataccaacaaccacctgcaaatggctgactcaagcaagtgtgccttctctcccacctgctgactgccctcttcttccctcctattgcctttgtcagaaatgctgcagcctggaatctttctctagtcgaaatctttggctctggtcttatttcgctcatttctcctacagcgaggagccaaggtggcagccatcttggccatgcaagatcagtgggaggagaactgctgttagatcctactcctgtaatgagaatgttcaaaagactggggaataatactctaaaatgtaaataaatctgacatcaggccttggttcaaccaagtgttccctrtgcttttgtagctatcagctacaagtgcttgtgactttcccaggaagcaaaagctgagcaagaaacagaagagggcaatggcctgacgaggagcttagccttgacttccctccctttccatttgtcgttaacaacccaaatctctttgaaacctcaaaagagcaatatatttcaggacaaaaaataaggtaggagatgtcatattgttctgcagcagacatagaaaagacagcaaagaggcagttgcagaaagctgaacagatagataaatccttcagccagggctggctacataatttgcagtactttatttatttatttatttatttatttatttatttatttagacacaaggtctccctctgtcgcccatgcttgagtgcagtggcacaatcttggctcactgcagcctcgatctcccaggctcaagcaatcttcctacctcagtccccaagtagctgggacgacaggcacccaccaccacacctggctaatttttgtattttttgtaaaaacgggttttgccatgttgcccaggctagtctcaaactcctgagctcaagcgactcacccatctcggcctctcaaagtactagaattacaggcatgaaccactgcacctggccagaagtgctttaaagatactaaaatataaatatgtttttcctttaaaaataataaataaaataaataccaatacattattaatgtgacatcacaattgattataaggtttttttcttactcaatgttttgaaaatttattttttaggccatcaaaattgtactgtagcaaaattattttcattctgaatagctgtaaatggcattagtagctctacacacagacaaggttgcaagcaatttttgttaacttttaagtttgacaaggatttttcttcttatgcaactgttactggagctgttaagaatattttagaagctatgacaacatttgggataaatttcaataaattatttcaaaatacaaattttagtatgtctagagttgatgagtctcatggaacaattttaatacaaagacttaactcttcatatgagtcagttttgtgtaagtctgaattttaagtgtaaatttattcaatgacattttgatgtttcttctgacatttgctgaaaattgtggagatcgtacaagaaattgaaagtagcctcatgatttgtatataattttaagtgcctgtttatacattctataactctattttcaacttcaagggaaattttcattttattttatcttcctcattaataattggtccatctgaagttcacgtgaaaataacgttcttttccactgagaatgtgaaatgtaacttgtttctaagcttgtggatattcattttgcaatgtttcagcatttaaatccaaagattctaaaatctttaaagagctctaataattccttgataaatgctttattgcaatgttcatgtgtatgactttattttgtaataatctactaataacgtctamttcctgatgttgccaagcagtttctgtcccaaggttcaggctaaagcgttaatatttgtgtagatgccacagagacggactttggggacaaacagccaggctggcctcacaggggtaccagtgctgcccccctatagagytcctccttccccgcttgtccttggccgctgctaccatacctgctgcttctgctgttgccaatctgtgcccaggcactggcccggccaccttgttgccctgtaattaccagctgaagactccatttcccagtcctgtttgtaactaggtgtggcacaagcatgggctttgggtagccaggctaattatcccacatgcatgctgcctatgtgcccctgatgcacacgctataccatctagtctatccccactgctcacacgcatgatctattacccatcaaacttacctgcaaaatgcaagtttaaggataaagttattaagaattttaaggcagtgacaacagagcattaaaccaaatgctgatcccttctgagagtagggtcctgtgcccctgcagaagtcacccacccatgaaggcagccctgccctcagactttgaagaacaaagaatgtcaaggagggtagtgggatgaaagcttgagagaagtcccctaagaagtcccactggcaggggtctcagcatcccagtacccctcaaacctgaccccttgatcactgtacccatcttccacccacatctctcctgccacacccaccaaagtccatcctgcaggagccactctatagacaagggarccatgactataatgtggcagggactgccggttgtcatcagaatgcactccccrcgtttttcacagtaatggagtttaagatgcctccatgtacccagccaaagactacatttcccagttccctttgtgataggtgcagccatgttactaaggtctctccaacagaatgggagcaagtcattcttctacttcacctccttcaaagagacgtgctgccatgtacttcctctctgtaccattccacaagctggaacacagatacagggctcagccagctgcaaccacacaggtgaagaccatagtctagggattggtgaagcaagaaatagatggagcccaagtctttggataatttcatggggtaagcctgacttggcaaactgaaaagctcacyttggatctcttgcttaacagagaaaaaaaagttttatttaagccactctattttgggatctctattgttatggcagcttagtatttgcataatttgaatctggagagggttcattcccattgttgatctattcattgagcaggtctgaaaataaggtcaagcccctggtatgagagtaaggtccctgggaagaaggtgggtgggttcttcacatcacaatgagaactctgaaagcactttcccacaaaggcattcatttactcacgttagctataaacgtgacagacttcagcaatccagtccagcctagggctgtacctacaacattgctwctacgagaaagcagctttcatatctgaaataaccaatttgtaaatataactttgaaatgcagccaatttattagctgaaatcttcctggaattctgtacctacatcatagaactgtagtgaagattaattgagataatatatgttaacaattaagcatagcatctgataccaaatgagctttcaatcaatttgatctttttattattactgacattattaaaccggcatcataatatagtcataattaacataatatagtcataatatgacacattatcatgatatatatgataatataatgtcatatatattgacatcatttaattatttttattttgagacaggatcatgctctgtagcccagcctggagttaagtgggacactctccactcactgcaaactctgcctcccaggctcaagtgatcctcctgcctcagtttcccaagtagttaggactacaggtgtgcatcaccatgcctggttaatttttgtattttttgtagagacagggtttccccatgttgcccaggctggtcttgaactcctgggctcaaacagtccactctccttggcctcccaaagtgctatgatttcaggagtgagccactgcacccggctgacatcatttattttaaggaagtatatggcaacaggcttggggaaacaatccttcctcccctggctgccacacagagagggataagagataaattacttaaatgtttacaaatctcttagtttccacaagaagttttagcaagtcttttcaaaacaaactgcataaaatattacctcaaaaatacatgaggtgttaaaatattactcaaactagtcaattagaagtaatgggttaagaaatcaccaaggaaagaaatgtgcatcagaaagaagaaaccaagaattcagtacatgagagaaacataaaaggaagagctgccaaaagtggagagtgggcatgattcattctggagatcactgtaaggtttccccgaaagacaatagaagaaataagttttgcttttacaggattaactttatagtagataatacgcatagawcagggtaaggcagtttttaaaaactgagaggaaaaatgggcttctactctgaaaaaaattagaagaatagaaagaaaacaataaaactttcttcaaagctatagggaataaaaagagataatggaaaaatcttaagacttaattaggtgtggagaaaaatctgccaagagatgaagccaagaagtcagaytgttaattgcttatttatttctagagcaytgtcatcagaacgtgaataatgaataagacagtaacaaacaacagaaaagtaagaagtagttgaacatctggggaaagatttcttaaataacctagacttggcagtatttcatccactcagcatttttaaggaagaaaatatcccatgcagggaaacattcaaacaactgaagcttatctacttaagagttgtaaattctttcatgattttattaaaattctgttaaagggaaacctgttctctactttctgaaatgtagtgtgttaattttaaccactttcttaatgctccagggtacttttggtgaacagcaaaaacttctcagccctgcgtggaggctcctggggtgaatttgtccccgtgctaacctgcctaagactttcttgctatttagagtgtgtcgctcttctccacgatgtaatcacagcagtcccgatctctaccagtgcccatatccctgcaccagtaactgtacccctccacatttccaatctatttcccagtaattacagagatctaggaaacccaaaaaagcaaatttttaatgtttttttttaaataaaagtgaacaagctccaaaagagggcctcagggaatctttttttttaatggcataaatgaacatctatttagatcataaccacttttgtttttttgctttttaataattacttatattctgagtaatttgggtagcaatctctggagaagtgaggtgtggccatatattcaaatgactgaattaaaatagaggtacctcatgaaaggagacagttgctatagtggaaagggcacggggttttaccaatggaactgggttcaagccccagctctgcctcttaccagctgtctctgagtctcaacaccttactctttaaaaagtgaacatacacacccacaatgcagagttattttaaagattaaaagaaatacagtattgtgcctgcctttatacttggcacatatagagcttacgtagacaaactttagtattatttttatatctttgaatatgtatggacatttctatgtatgtctaatatactcacaagtgattaacacaaaccsaaaatttaatctgtaagaaaaaaaatctacttyagattattttaggtaaaataagattcattagatttctggaattttacagctagaagagactggcaatcaatcacacagtcctgcttccaatcccagaaatgaggaaaccaatgctggagagtaaacatgacttggccaatgtcataaagctaattagaaactagaggtagaactggaactacgattttctaatgtccaattcagagttaacctagaacagagactgacaaacattttctgtaaagggccagatagtaaattgttagactttgtgatgcatacagtttctgttacaactgttcaactacaccaatgtggagcaaaagcagccataggcaatatgtaagagaatgagtgtggttgtgtttcaatattttattcagaaaaacaggctgcaggctgtctttggctcacaggctatagtttgctgacccctgatccagaagaagttaacagattttttagctagaggaaacatgatggacataattccaaatcaacacatctttctgctttctatygccagtgcactagaaaarctgtgtgacartgaaagaactcagaagaatgagacttaaatgttgctattatgactaacatcttaaaatagtgtttaataaacacaaatcttgacctcaagattattttattacttagtagcaattaggataatctaaaaaagaagctctaagaaagcaggwggagactcaaagaattggaattcaaaattatcttggctaaataataacagtgaagagaactaaaatagtagtacacatacaatgaagcaaaaactaaaacagaaaatactatggaaaagataaaagtgttctaacctaaagaaataagtaaatactgccatcaaaatttactgattacaactgaaaacatgtcttatctatccaagtagtacttttacattagaacctatctctccaagagatcatccttaaagtcagaatcaaagagcatgatgttggggccaggcccagtggctcacatctgtaatcctagcattttgggaggcagaggcaggcggattgcctaagctcaggagtttaagacccaccctgggcaacatggcgaaacctcgtctctactaaaatacaaaaaattagccgtgtggtggcagatgcctgtagtcccagctactcgggaggctgaggcctgagaattgcttgaatccaggagacggaggtgagctgagatcgtgccacagcactccatcctgggtgaaagagcaagactctgtctccaaaaaaaaagggggggagcatgatattggaaccaggaataatctaccagaaataagaacacctccaaaaatgtgtctttctggtttgtgtcaggacctcctgataacattggtcccatgatcataatcgtcataatattcttcagacacataaagaaagatctcatggaggaaggtgaccaaatgctttttcctttccactgaggatgaatgtgaagaaatacctatgctgcaatatgaggcagagataaatttcttgttcctaagaagtatgacatattggaacgggttggcaaaggaatagtgttcaagcttcctctagagaggctttgagagagtctaaactttgcatctgtttggcgtgaggtttcctccctaagagaaagggaagtagaagaattttcaacctctgaattttaagggagctgttcaaattgtaatttgacatactcaattgaactaaatgtagtactctattttccctaacacttgtgttgctccctagtagtaaattggttgtttacttttgaacatctaccttggaggcactaaagagtaacaggatgatctatgattggaattgggttcattacattgtaccaacttgctcccaacatctgttctgtttacacaatgacacattcagagtattcagtgcttagtgcaaacaactatgatcttccaatatttgatttctccttgggctttcacacacctcagctttggtttcactgaatgatttttggaagaaaaaagggcataaaataaagctataccaatgaatgagagattgagtgataactatgaaagttttgtgtatacaacttctgcaactcaaagggctctctgatggtgttagcaaaaaaccgtgtaaacacccttgccctctgtcaggacacaataaaagctgtttctttaatatcacagtatcattgtctgtttttaacttttctatttacatagtaaaggaaatttttcacttaatatttaaaggattatataacgatccaatacaatattaaagcacacagaataatgttgttcaaatatataatatatayagatgactttttctacttgtatatgttcacttagaatgcttttaaaatttatagctaaatccagctacaagaaaattttcatttcttcaatatagatcataggcattttatttctgtgcatcaacttttaaaaagacagcttcaactatcacataataatgttgacactttataaatattagtaaaaagtcaataaaaatgaagccactttcataytgttaaaaataacatgttaactaaaaaaaatactgttggaagacatgtatataccacattcattacaatggaaagtagagaaatacctgttagttgtaactaatgttacaaacaaaatttctatagaaagaatactatgaaaattagaactaaagcatatttttaaaagttcaattggcaggatccaaaaaaatacctacccttgaacaagagaaattatatttaatttctttaaaggaaaagtcactttttatgttaaaactcaaaaatctcagaaccayagttttttctcttttattttccaatgtaacatcctccaggctttttcaagcaaccacatggatctaayagacaactcacgtatacgaaccagtacacactcaattttaccaattggtaaaaattgttttctctcacccacagctttgaccaggtcacccctgcccccactgtggcttctctattgttcttatcaaatgcagactcccgggatctcagcttcaaagrcctcctctagttttctcagctttcatttcctctgtaaccagtctgtattcttccagccaagaaatccttcattcagccctttgattcaccgtccccaatccttcatccatcctttttcttacacttccaacactggctcagaccacattcaacagtgacttcgcccctgaaatgggattcaacctcaacttattaggttaaatatccaactgcttttgtttgcttctttatatttttaaatctaatgctatttgctctgtacaaaagagattattagataggaccaggccccctgcatcaaatttctcaagtattttagtctttcatgttcaatctgttagacctctaaagggcatagcacagaatgaaagaaaagtatctgtattacatttaaagaccgaaaaaaagagaggcactgtagtatattttatgattgcaggttgtaggaatgtccattgatattgctttagggaccatgacagaagcagaagatagtgggaatgttaagcactagatacaagatgaacaaagacacacacaaccccatatcacaccaccgaagtgataaactggcaacgagaggtgagaaggaggaacagagatggatacaggagggaggggaaactgggaagcaaatgggcacagtattcccagtaggaatacaagtcaccagagttcttcctgccaggcagaacacaagccatctgactatgtgccaagtgctgaaatggacacacaacattagcaacacaaagcactatctcattagacttcgtttccaaaagtctattttctttcctccaataaacattaggattagcctacttattctgttgctcccaacactaattccaatgaaactcccagttaccatgtgaaaggttggattaattcaatgaccctattttcttcattgctaagagcacctttatacattctctcattcaaaaatacattgagtatcaaggttatcttgtcagagaatatcctgaaatgatgagccctagtttcttcatctgtaaaataaggataataattatgtaactattaggtagtaaggaaaattaaatgagacagggtatgtaaaccacttagcagtcattggcatccagcatgcgtgcaataaaagttagctatgattattgtcattgttattactataagaaccttgattttagcagatgacagttgtcattgtaacctaacgtgagctttaaactagaaaatttaatttttagactaaacaatatttatatgccttttctatcttcctatcaaatacartgaatcccactgtttttcagttttcctgaattcatgcaactcccttccaattctgaattcaacaggttgctggcctgtttcctagtcaacactacagaggaaaaacatgagcgaggaaggaaaagtactaaagcagaaratgtctaytccttagtccgtgttgtagttaaaagatgagtctgttgagtcattacccacaactcctatgggtcccaagggaggacagttgtcatcagaactgcttttgcaacctgcccttttaaatgctctgagatatttgtcctctttcttcttgactttttgctttgcacttcacatgccccctccatgagctcattcactcctttgattttagcccaacacatacatgaataactcccaagctcttgtctctgcagctcaagcctctctcctgaatttcagggacctgcaaccaactgatatgccaggaaatttacatctccaaattattctttatcataaactkttctattccttgtggtctctactttggcaagtagtatgacaaacatgtttcaccttttcccaaccaaccacctggtggtcatccttccttctaccttttgctcytcccagtgaaccaccaaattctccatatgtgagtccttgagaacagggattttgccttatttgttcctcaaccccagtgactaaaacaatccccagcacatagcaggctctccgtacatatttgttatataaatgaatagtgcatagttaccgctccataaccatctgctatatgaaggactggatgctttaagctgcattctcacaaaacaggaacaacatacaaattattctcctttacttaaatgtttctaataatttcttcttataaataagaatattaaaccatataatgcagttttgttttctatcagaacaacaagacatcatgtgttttgttacaatgttcaaatgttagtcctctggctgttgagtttcatagctaaacaagaagtttttcagtcttcagactttgtaaaaatctgtaaaaaccctctattcaagttatactcagcaaggggtcttctgaaatgtgcgtggagaaaattggaaacagcttagcaactgaaaagaataatatttcataatatcctatggagtaaaaagtcagatcccgtggggccactcactgggcatgttaggcaatttcagaaaacattttcagaaaattttttcaaatattctatatgctatttggtggacagaagtaacctgtcatatgttgcccacgacttttgagtggttagcctcacttttcatttaaaacgtttttatttgaatcggttgtagtagtataggggtctaaaggacayatgtgcattcttgctagaaagtatgtggcctgccttttactttgtgtctatagtcaaatcaacttgcattgctttgcttcataaaaatagcataaaatgtgctacaaataaataaaagraaagtacattcatgcctgcatctgtgtttgacttgcaaaacaaaagacttcatgaaataaaaatattttgaggctcttttatttttatcactacttattctgtactgggcagatctgaacactacatgttttcttcaattagaagtcatccaacaggtggacttattttcagtgcaaagtcttagccaagattaagccatatatttcatacatcttgttcaagatgactgagaccaaacctctaaatttctttttctccaggtcaatattcgcagttctaaactaaataaccacttttttttggtactgtgttgagatttattcaaactgccaaccatgaaaagaaaaataggaacattcccaggaaaaagagtggggtacatgcagataactattggttatccatcacaaattataaggttagtgaatagtatttgcttttatatgcaatcatgtgctatttttatatacatctacatagagctatccctacacatctacttcttgtatgagatgaactcatcccttctttcgtgggctgaatgctataggtctacctttaatttatgctattaagtgcctgcaagagatgatttttaaataagtagttttgcatacagaaccaccatttgattccaactttgaatgctattaagctaaatgtacacagaaatcctttttactccttttaagatgtgtacactatgtttatgacagtgaagtmctaggtctttgaaacactaacaggcccagattcaaaggggttcagatcacagctcagtcaagttccacctctatgatcttgagcaaatcacttaatctccctatcagttctgtcatctataaaatgggaagtgcctcagtccattcaggctgctaaaacagactaccacagacggggtggcttaaacaagaaacatttatttttcatagttctggaaggtggaagtccaggatcagggtgcacagtggcattcttagtgagggccctcttcccggtttagtcctcacgtggcctctcttgatgcatgtacagacagagagagagagagagagagcacacaagagcgctctatctcttactcttcttctaggagcacttctaatcccatcatgggggctccacccccataacctcattttttctttttttttttttgagacggagtcttgctctgtcacccaggctagagtgcaatggtgcgatctcagctcactgcaacctccacctcctgggttcaagtgattctcctgcctcagacacccaagtagctgtgattacaggtgtgtgtcaccacaccagttaatttttgtatttttagaagagatggggttttgccatgttggccaggctggtctcgaactcctgacctcaggtgatctgcccgccttggcctcccaaaatgctgggattacaggcgtgagccactgcacccagcccataacctcatctaaacctaattatctcccaaagtctccaccttctaataccatcctcttggggttacggtttcagcatgtaaatttgtgggtgggggatgcaaacacgcagttcatcacaggaagaataaccataatcctcacagtgctgctgggaggagtaaataagaacatgtatctaaagggcttagcacagcacttagtacataataaatgctcagcaagatacatactattatgataacactgttattattaaacactattaggaaaacaccattatttgaattgcaaagtctggccatcgtttcttcattttgtttgttttattctgttactaccttaaccatattcaccagagtgcagcatggcttaaaattaattgattttttattctacaaatctttaatccaaacactatttccacagaccccaccagcttctaacatttagctattccgtcttcacaatttcagcatttttctgagcttagtattcatcacacatactgatgcaatcacttgcatatgagtacatgtattcccatcactcacgttccattttcatccaatgtttgcctgttttcacacataagttatcactggagaagtggaaccaggataatagccaggtctgcttaatcctacaacagccatcttctaactgtggaaggtgtttccttagagatatacaagggctttccaagggtatattacaggcagagatagttttaaaggaatcaatttccacacccttaaatttcctcttttctatcattgcctatctgagggcacatgcaggataacgtcctttcttaccgcccttttcgcaatgttcctttttttcatctgacaaaagaaaggcactttttaaacatttcaaacctgctatggcacatgctcctgggtataaaacatctggagttccaaacacatagacaatttaaaatatcttccatcttgctatcctgcctcctcattctccaaatgttgtcagagaagatattgttcctgaaggaaaatatttgaaggacaaagttaaaagagcacaaataaaccccgaaagcagaggaccagaggctcatttcaggcaacaaacttattttattttgtctgtccatctgtctaccgaaatacgtatcttaaaatttgaagtgaaacgtgggattctaagattctaggtccagttaaaatggagtaaaaatgtcccaccttacctccccctgtgattgtaactaaawgttgtggacagaatacacaaagcaattgtctgtggtatccaaacagtaaagaccagtaagcggactaggaagggaaataaaaacttaaagaaagagtaataaggaggtgagctttctggtgtttttctttttctactcatatttcccarcatagaatgaatgcaacaaaatcatggaactgtgcagcagtcttgaccaagagaaactctctccttggtcagacgaataagcaggaggggccctgcaaaaccaaaggacggggagtcccctgagacatctcttctcctgaccgtcccttggagggggccctagaagctgtgctcatggaagctgtactcatgcaacagtggcagcagcagccaaggttgcctatttgccccagagttggctgcaacagtgcaaaaggctaaaactagagcttttttgacagaggaccagggcaaatggtccctggaagtcagagagtttcagggagatcacagagaagagggagcttgagatgaaagatcccacagagctatgtataaagtcctgcctgggtttatccctcaggtctccatgcatgaaaatgatttgaaatagaataccaaaagctttgagaagtaagcaacaatgtaatccatggcccagatatcagactgatccctgggaaatacactcatggggaggatccagagagcactacaaaggctttgaaaactgaactgacattggaaacaaagcccttagaaggcataatgtgacttgtgaccggaacttaactgggtcaactgactatgaaaagaaacaaacacacaaacaaaattagcattttccagagaattctaacaggacccagaatatcataatattttcaaaatgcccaggatataagttaaaattaattaacatacaaagaagcagggcaaggccaggcacggtggctcatgcctgtaatcccagcactttgggaggccgaggtcaggatcacaaggtcaggaaatcgagaccatcctggctaacacggtgaaaccctgtctctactaaaaatacaaaaaattagccaggcatggtggtgggcgcctgtagtcccacctactagggaggctgaggcaggagaacggcgtgaacctggaagagggagcttgcaatgagctgagatcgcgccacagcactccagcctggacgacagagtgagactccatctcaaaaaaaaaaaaaaaaaaaagaagcagggcattctcagcaacccctaagtgaaaagataattaataggcaccacccctgaagtgacctagatgttgaaattattgaacaaagacttactttaaagcagctgtaataaccatactccatgaagtaagggtcaacaaatttgaagtgaatgaaggatagaagttatcagtaaagaaatagcagctatggaagctcagaactgaaaaataaaataactaaaatatttttaaaagacactgaaattgcagagtgaagatgacaagacagagtaagtgaacttatagctaaattaatagatattatctaatatgaacaaaagagaaaagttttcaaaaaaygaacataacttcaggtacctgctgtatattatcaaaaggtccaatattgatgtcattaaaaatataggaaggaaaggaaggagaatgagatttgtacagaagaaaagtttgaaaatttaatggctgaagttttctaaatcaaaagaaagatataaatttagactcaagaacctaaatctttggaatttttttggaactcaagaatctcaacagaacccagataagataaactaagaaaataaaatcaaaataatcaaatgactggaatttattcaggaatgcaaggctaatgtaacagtcaaaaagtaataaatgtaatctctacattaataagctaaagaaaaactacgtgatcatgccaactcatacagaaaaagcatttgataaaattcaacakctttcataataaaaactcctagaaaatgagatttagtttatgggattacctgattaggtctactgaggatattctacctttcttaaagtcagctgtgccaaataacataatctaattataggagtgactgcaacatcatattcagttcatccccacattcagaggtgaggggattatacagggtgagtgaaccacagaactggaaccctaggaaccatcttagaacaatgtttaccataactagcaatgaacaatgggaactcaatgttttaaaattagtaccttttacaatagctctcaaagtatctaacaaaatacgtgcaagacctatatgagcaaattataaatgccaatagaagaatcaagaaagacctaaataaatgataaaccaagttcatggtttgaaagacttaatatgtttaagatgccaagtctccccaaattgatccacagctttaatacaaatccaatcaagatttttggaacacttttttttttgtagacatagacaagctaattctaacacttacatagaaaggcaaagaactacaactgaaaaataaatgttgagacataacacagtggaaaaactcatactattctttgttaagtcttaatatcaagccatactaatcaaaacaatgtggtttggttaaggaatgagcacataaattaatgaaacagaatgaacagtccagaaatagacccacgagaataaggtcaattaatttttgatggaggtgcaaaagcaatttaataggagaaatataggccttttaacaaatgtgtctggaacaaatggacatccatttggaaaaggaaaaaaataccacttgacctataccttataccttaggcaaaaagtaactcaatgcaggtcatataaaatgaaaactgaaaaagtcttgggagaaattatgaaggaaaatctttatgcagttgagataagtaaatagttcttatatgatacaaaagtatgttgcattaaaaaattggtaaataaaatcatttgttctgtgaaagacactgtgaagagaatgaaaagacaaggtacagagagtgggaaaatatycccaaatcatatattgaacaaaagacttgtacccagaatatataaagaactctcaaaacccaacagtaagaaatcaaacaacatcaaacaaccccccactcctgccataaaatgagcaaaagatacgaacagacacttcataaaggtgatattccgatggcaagtaagcatattaaaagatattcatcattaggcaaatttaaccacagtgagatgcttctacacacctattagagtggtcaaaacagaaacaacaaaagtcaatctgacaataccaagtactggtgaagatgtgaagcaactggaagttgcatacattgttattgatgggtatgcaaaatgatacagccactctggaaaaactgttgacagataccaatctaggtattcatcttagagaaatttgcctataaaaactgtaagtgaatgtttatagcagtaattttcacaattaccaaaaaactggaaacaatcaaattcctttcaatgagcaaataaacaaattgaggtacagccatacaatggaatactagtaagcattaaaaataaccactgatacatgtaacaacatggatgaatattaaaggcattatcgtaagtgaaagaaacaggtttcaaaagggaatatactrtatgattccatgtgtgacattctagaaaagccaaaccagagatgtggagaacagatcagcagtttccagaggtttggagtgtggttttggccataaaggacaagacgaagatgatatatgtaggatgatagaactgttcagtaatctaattttgtggtggttacaaatatctatgcatgtgttaaaactcagaactatatatacacacacatacagtgaatttcattgtatggaaatttaaacataaaaactaaagtcagcctatttctttcagaaagtaactctgatttgatgaataagttttgacattgaagactggcattactagttagataaattttacataaactggatgaacaaaactgacagctccaagttttgataaatatatatttaaagcatgtaataatataaaaagcattttattaaaatattgtattagaaaaaattaattgaaattaaccaatatttccattttttataaatttttctgaatatatagagctaaacaaagtgcctcaaagtgaaagagtaataaacagatatttgataaatcctggcaatattctcagaagtagagaccatgmatggctttactgactgggtaacaaattcatttgcaagtaaggtgctttccaagtctgtgctttcaaaaatggaaggagaatctaatcaagttgtcatctaatcattaaaaataattttaatgataaatcattactatttgctttttgacagtacagtgggaagcttctcaaataattgaatgccattattcaataaaactctttctatgcccatgtgtttaatcatatgagtaagttttcaaagcactaccatctagaagaaaaaagtaggaacacaattgatgccaaactctgatatagtctacacaaaccagtgttcaaagaaaataaactgcatctaatacatcaagatatggaattctaatatgtgtcacatttaaggttagtaattatttataaacatttataatagattgaaagtacaactttttgataaattaatcagaaaataaactgttgacagagtcttatgactgaaggaaagttttttaaagtaataatttccattttatgcacagttttgttctagagatgcatggtagggggataaaaataatctaagcattaaaaagatattacactgtaatgaaattctgtaggtgaaaggaaatagaaatgacttcagagagaaaaaggagcaaagtaaaatttgctgaatgttacaagaggagcttataattttttaatgtttggtgaatgtcaaggcactatgggatttaggtttcactagacacatttaaaatagttatatgtcaattattataatagtctttaaattctattatctgacactatttacattcacagttaaaattttgtagatattaatttaaaattgtacaagggctgtgtactttgtcaaaatcctttgagggtacacagcaaaaatatttggaagaccacatatctaaaacactatgttgcactgcctcctcgataagagcttaactttttgtttaaatgtgtgcagggtttcagacacaaaataaacatatggatagagcaggtgagaatggagacttcaaattgcttcccaattgctgagctcaatggaattgcagttatgaagctcacaatgctatttagcagaatgaagtcacaatttcaaaagagattcatagattttcatgtgatgattctgaatcatgcattattttcagtgggtggcccagagtttagagttcaaactctaggatgtctgaattactagataactgccacattactgttgagaatatcaaaaagaactgattaagcttaaagaataatgttcacctaaaagacatagatagtatcctttcccaggaattttgggaaacaaatacgaaacttagaactaagctaatatttctgctatgtgaaagaaaaaaaaccagcattttgtttttcatttacctggttctgtaaagatctatcagctatgattaaattgaccatgatggggcgtacaaagctgaatacagaactaaaatagatgatgttttgaatagcaaatgagcagcattcttgttagagtaatcagaactgattattgaccaaaatagactcagggatgtgcacttatgatcatacatattaaataatatcagacttttgacttgttgctaaaaatttccatattctactgtaatctgtaagaccacaaatgtggatttctgattgtgattctgaaatgtgattctgatttctgattcagaggcataatattgacaaaatgaagatggtcttggtctccagccactgaacaaaataatattctgtaagaagcccaaggatcaacctatgatcttgagcttctgagctatcaacctgtaagccaagcagctagcttggcaagagagtgagaagaatgaatgcagatgaggaaagaaaacctctatatttctgttttaggaaccactgtgccacttcaagcaaagcaatatttggcagagaatagaaacttaatctcaaatgatctataaacaagaattacggagcccgcagagaacaggtagtatttaggctcaacaagaaaacgattttatctggcactgcttctttatcctgggtatgtggcatagcaaagtcaaaacaagcctgtaattctcccagaaaaacagtggaaactcacaggatgagcatttctcgtggtcacagatcaaaagaagttgttagggacttaaaagtatttttaaagcttcaagttacagcaaaatgaaatgttaaataccagaaaagttgatcatgaagtttcttcataagaattctggcatatccttagctctatcactacccaataatgacagctgtttcttacatagcttctcttcttcatctcattyttgaccactctccctagcatgttctatgtaacagccctacagacagtttctgacagctgattaaaagaactgaggggagatatctggggcaagaacgtcgcagcagatggaacagagtagctacagcctagagagcaaaaacaaaaacattaggagaaaagtcagagacgcaatcagggccagataatgtagagtgggatgtctatgttgcacaactctaggaggcacaaatgatacagacgggaggtggaaatgctgggtagaagagggcggttccccaacaaaggccccacccttaagctggaagacccacagctctaagtgaggacaggcatttctgttttcacacccaaaaagttgccttttggcccaccacacccctcatcctgccctcatataaacccaagaccttagcgcgcacacacacggagcggctgaatatcggaaccagcagatcagtgaaaacggaataacttggcagagaaagagagaagagagaggttcggccacagaggggagttcagcggagaagtctggccgctgggtgctccggctccagggaaagaccaccttcccactccattcccctgcttccggctccccatccacctcgctgagagccacctccaccactcaataaaaccttgcactcatccttggagctcacgtgtgatctaattcttccagtacacactgggcaagaacttggggtacagaaggctgtcacactggctccctgcccttgcgatagggcagagggtccattgagttgattaacacacaagctgtctgcagaaggcaaatttaaaagagcttgcaggccgggcgcggtggctcacgcctgtaatcccagcactttgggaggctgaggcaggcggatcacgaggtcaggagttcgagaccagcctggccaatatggtgaaaccccatctctactaaaaatacaaaaattagccaggcgtggtggcggctgcctgtagtcctagctactcgggaggctgaggcaggagaatcgcatgaacccggaaggcagaggttgcagtgaactgagattgtgccactgcactccagcctgggcgacagagcgagactccatctcaaaaaaaaaaaaaaaaaaaaaaaagagcttgcccacttgggcttcaggagccacagacacccacccccagaccctgcggtggggctggagcccaaaagcactcttgcaggcctctgcacctgcccatctgcatgctccccctaggggtttgagctgcagggtgaccacacaggagacacccctgttgcatgtgctgagaggggaatcagggaactctcccgttttactattcacattgctttctatatgactggtattctcccgcagttgtgcaatgcagcaatactgatgaagtcctgacagttgtaaagaccaagggcttttatactgagtgagagggaaagccttaggaaacttagagagaatagatgtgaaagtttaaaagatccctttctctgctgtgtgcatagggaggtatcaaggaagaggcagtaatagcccaaaggggcagagggaggcagcaaggaagccaataatgaggctggaaggataatccaggcacaaatccaagtgagctgggcccggtggttgtggagatagtgagcactggttggatcacgcatacattttgacagttgaaccactaaaatttacagacaaatcaggtatggagtgaaagagaaaaagaagagtcaaggatgaccccaagtttttaactagaacaactgaaagaactacattgttattgactaaggagggaaaagctgggagaagagaaagtgcatgggcaatatcagattggttttgtatctgtttcgtttgacatgccttttagaaactcaaatagaaacaaatagaaggcaaatttgtgtgtgtgtgtgtctgcatgctgcaagcatacatatgcatgcaggtccagaggtcagaggagggatgtgggctagagatccgcatttgtagttgtcagtgtaccagtggtatttaaagccatgagcctgaattagatcaccaaaaggagagagatccaaggcctgaggcactccagtgtctacaggtgaaatgaggmgaaaacacaaaggagactagactaagtggccaaagaaagaggaaaacccaattggaagtcagstgaagagtttatcaggtaggagggagtgattaaatgtagcaaatgctggccgggcacggtggctcacgcctgtaaacccagtactttgggaggctgagacaggtggatcacaaggtcaggagttcgagactagcctggccaacatggtgaaaccccatctctaccaataatacaaaaattagctgggtgtggtggcgcacacctgtagtctcagctacttgggaggctgaggcagaagaattgcttgaacccaggaggcggaggttgcagtgagccaagattgcaccactgcactccagcctgggtgacagagcaagactccatctcaaaaaaaaaaaagaaaaaaaattagcaaatgttgttggaggtcaaaaactactgagaactactatgggatatagccacacaggtagagacccttggagatgtggggacaaaggagtttttcttgagaggtgtaagcaaggacagtggaatggaggtttgaagcttagggaagtggaataaaattggggatgatagatagatttaagaatcatcagtgcatatgtggctataagcaaatatgagatttcccagagaaaatatataagatgttgagaaaagaaggttgaaaatagtatcctgtggaatatcaacatttaaggggccagtagacaaaggaaggagactagagggtggccagggcagtgacaggcagatcagaatagaaatgtgctagaaaccaaaggcaaagagtgctacgaatgaagaagaaaccaacagagacaaaagtcttccattgcagggggcagccaagtttatactccctccttcacaaccccacatctcttctcctataggacattgtccttatgggctgtaacagatactgtcagtttcaaagactaaaggaagtgcataccccagctccctcacccctctagtagactaattctaaaccatatgttgtacactagttcccagattttcccatgggattgctccagttgcccactatggtagctggtttagtaatctactcttttttttttttttttgagatggagttttgctccatctcccaggctggagtgcagtggcacgacctcagctcactgcaacctccgcctcccaggctcaagcaattctcctgcctcagcctcttgagggcctgggattacaggcacacgccaccacgcccggcttttttatatttttagtagagacgcggtttcactatgttggccaggctggtctctgaactcttaacctcaagtgatccaccatccttggcctcccaaagtgctgggattacaggtgtgagccaccgcgcctggccagtaatctactctttattggcctgtttcccttcccactcccgtgacccccaccccaccactgtctcgcgtctctcccaaatgtaccatggctcaactccttgtctcaggtctgtgtctgtgcgtcccatgtccatctctccactggcctatgaactctttaaaaatatgcctgtcttcatgccttctccagttcctggtaaactgcctggtacatagaatatacttactacatgtctgttgaattgaaggatttacatttgcacagggcatgtggcttctctcaaataaagaagttatctgaaatacattatcccatttagcccataacacaattctaccacttaggtattattatttctattgtaaagttggagcaatagaggtttaaagggcttgagagacatgctcagcgccttcacgatgctatttgcaaaatatccatataagtacctcatctatctctagcaaaatattgatgtaagtacctcaaagaaatagtattaaattatttcttccaaataaacccacaattcaataggagaaattcggactatrtgttttaccaggatcctgaaactatcattttgctgcttgtgcactgaaatggttgctagcagcaaccggagctaggcagagcaaataaggtgctatgaaaaggaagaggaaaatgaatgaataaataactgaagttctttcatggcagagagatctcttcaggcccacagaaatacgatttaaaatcaactttccatatatgattacagactaggtaaaggattagtcagaaagctcagcatgattgataggtcctgaactttagccccctgagttctcacatctcaactatggaaacacacaaatgtttattttaaaacctctgacgaacagttcccacagcattatcactttagcacattatttactttacaagacctagcatcaacataagatagaaaggataagacaactgtgtgtccttctatatgggaacaaaataccttaggagttatgactgacttaaaggatattaagagaagatgaatcgaatttacagagctaagcattgggaaaagcagctgttacaagttgtgggttttggctcgattcactctggaaagacacgtgagagctcttgtgagaagggggctgtagcggcgggtattaataaggattaataatcaaatctcaagatggtcccaggatggtggactatttgggggaggatggagcctgggggactggatttaaaataagctgggaatgacctcctgaacctcagtttcttaatttataaaataaagatgataataccttggagatttactctgaaagcaaattgaactaacagctgtgaaagcacttcagaaaggagaatggggtacataatgtaaagggagggaattactatttccttgggcaaatgatttcacaagttggaagaagacgattgagacaagagtcaacttttagtcaccattcatttcatcggctaattaggaacctgacacccaacgcaagtccacagtgccgaatatcttcaccagaacaccttcttccgtcccctttgctaagtaggagcctttctcttttaaaatattcaggattcatttatgtaattgacttcactctattccattgacatttaacctgtgtccttttatactttctgtatcacagcatatttacatgtagttattaatgctcttttaacattctgtttcttacacgtgggtatcacagattaggtttaacactccttaaaggtaggaagtatgttaaactattattataattattactgttagaaagtactttgcaaaacatatagccctggaccacggtttctcaaaagcmgcactcctaacattttaggccatgtaattttttgttgtgggaggctgtcctgcatgtacattgtaggatgtttggcagcatatcttgcctctacctactaggtgttagtagcaactccccctgttctcacagttgtgacaaccaaaaatgtctacagacattgccaaatgttcccaaatgggggctgcaaaatcacccctagtgaagaaccaatgcrttaaacagatacagattaaaattatggtcatcataattacttttactttttcagagtacctggaatgatacgcagaaaagaaaaagtgctcaatcaatattgaatgaaaaaatgaaagaaaaactacattagttgtatttataaagtggctytatagcataatcccttatatgattaagactgtattatataataaacactttgctggttggcatacaatatattcttacactttttagtaactatgtctgtgtatacaagaaattacattcttatgcatatacaaagattgtagctggcagtgactttctctatagcacacaaactatgaatagtgtctagcatcctgtttacccataaagcaagagacagaatacttattttaaattctaggtaaatattacatcaaacaccaattgtcagatgcatttttggagaattatctctacatgaaaaaaatattacaaccaagaattctaaaaaagattatctgacaagtagaggatctcagatgagtgtacttcrgaaatttctgttctatttaaacatacatttttaaatataaatgtttcatcartctttctaagattttttccaagatcatcaatctcttccaagattagaatatttgcaatatcctctgatattagagagccaatgttttaagtggcattttagtttgttattaaaaaatactaataatgggctgggcatggtggctcatgcctgtaatcccagcactttggaaggccgaggcgggcggatcacgaggtcaggagatcaagaccaccctggctaacacggtgaaaccacgtctctactaaaaatacaaaaaattagccggaagtggtggtgggcacctgtagtcccagctactccggaggctgagacattctcctgagaatgacgtgaacccgggaggcgaagcttgcagtgagcagagatcgcgtcactgcactccagcctgggcgacagagactycagcctgggcgacagagactccatcttaaaaaaaaaaaaaaaaaaaaaaaaagaggatactaataatgttattttgattttcaagaactgatatgttttgagcaacagtgttacataacactgatgatttttttattttcaagttttctctatgaattcttaaatcccgtatcaatgggttacattttccaaattaccactaatgaagactgtaagcattcttataaaacaggagaaaatgtagttaaaacagaaaagacttaaaggacttctctttcagttttactcactcagccttctagtggcttttagctatatactatcttttggagggaatcctaatttagcagcagacctctactaaacaacgtgtgaaaaagaaaacaaacttccatttctggccatgaggtagtaacttgcagcagatcaatgcccctgtcaagtacaactagaaaagccagataaaacacaagaaacatctgttggaaggcatctgagagctgatgagataattaagatgtgagtggccaaggtcccagagagaagataactatagaacaaagagtctacattcttttttaaagttttattttaagttcaaaagtacatatgcaagtttgttatataggtaaacttgtgtcatgggggtttgttgtacagatcactcacttattaagcctagtacccattaattatttttcctgatcctttttctcctcctaccctccaccttctggtagaccccagtatcagtcgttcccctctatgtgtctatgtattctyatcatttagctaagtgagaacatgccctaagagtctacaatctgtgtatgccttgtccttcatggaacttgccagttcttggcatggtgctacacatgtgaccactgcaaagacaagataagccagcagaacttttggcaattccacaaaggcgaagagacaaaaattagagtttggtgttgctgaagcagccagatactaaggggccaggtgagcagtgaaaggggagacatagagaagcagatctatcacttgggagggttgccttgcaaggcatttgccacagagggcaggagcctaaagaactaagcagaaaacttcagaaaagtagaatggaaattacagaaattatactgctctgagcagaaaataaaataaaatttggaactacycaaggaggaagggaatatagtaagcctaccagtttctcagttgagactactggagaaccacactctcagaatggagaaaaaccagagrtagacggagccttataacaatgaggcaaaatcagcttagtctctgattaaattaaggctatctggccccatatgtgcctagtgatcatatatgtggcacrtacgtgtgatcatatatgtgtctggcccatatcacatatacgatctggccatatatgtctacccttcaagaatctattgctacatttgctggcccactgcctttagctgtcagatccttygggttttgcctcagctgtggaacactgaagagatctgcctcactcagtggcacactcttcccaggaaggaccacatccaatgactgattgaggtggagacacatagactcractattttggatcaacatgagataactcttgtaggcttaatacattccagaactccccaaggatttagctgaggctttggtgggcctggatcatatttcaactccttctgcccaattctgctttctctccctcccttaacacaaaggctgaagcttaataaatactctgtacaccaaactccatctcagttactatttgcagaaaactcmacttttagcacctagtgtcagacatggtctaagaaagcaggtgataagatatggttattgatctagataacctcacaactacatcagctgtgaaaactagcagccaagcagccactagaaggggcaaaacatgcttggagctctccacaatgccccattaccaaagaattgtcattatttttcttgtctgttagctccctggaaactcagagcaaatgtgattatttgacctgaataagagcttactcagtgcaaaagccttttccccggggtgtttctaaaaaaaaaaattaataatcgattaacactgtaactgtctgaggtggggatatcacttggggcaaacaagaagctaaccagaaaaattaaaagaaaaatgtggggaattcctgtaggaaaatttgaaaagctctaatacattgctgagaatctagaagatcccatgaatgtgcaggactatgcatatacctaagaaggacccagaaaggcccaaatatctcayctgtggcagacattgagaccctgtacaagcagaaatttaaggataaggcagagctgtaaactctgctatagtattgactgctatagcattgactctgctatagtgtcgactctgctacagtactgactatgcaccctaacatgcacagaatcccttggcaaagactaggatatatacctgttaaaggcatttaaggaaattctgtccaaccattagttgaccactaggctgctatctgggcaaaaacttcagtggccagacatgacaaagaacaaacttaacataatttgtttcagggaactcactgaacaaataaataacaataattaaagcaacaagaaacagaaacagcaactaatgttggggggaagaattcaacttgcagagttgaacattatattattttaaatgtccaactttcaacaaaaaattacaagatgtccaaagagactggaacatatgcccatatagagggggaaaaaacagtcaacaaaaactgttcctgaggaagctcagacattgaatttactggacagacttttaaatcagttattttaactcattcaaagaactaaggaacacatttctagagaactaaagggaagtataagagcaatggctcaaaaaatacaaaatattaataaagatatatagattattttaaaatattagaaattatgcagtaaaatatataataactgaaattaaaaatttactagaaagacttaacagcagacttgatcaggcagaagagaaaatccgcaaactttaagataagtaagctgagattatctagtctaaggaacagaaagaaaaaaaagaagaaaaattaaaaggtccttaatgacttggaggatgtaccaacatactcataatgggagtcccagaaagagataaaagaatgagtcagaaagaatgtttgaagatataatagctgaaaacttctcaaatttggagaaaaacatacatctgcataacaaagaagtacaaaaattcaaataaactctaaaggatctacacttagacacattgtaattaatctatcaaaaatcagacacagaaaattttgaaaacactgggagataagcaactcatcagataaaatggagcttcagaaaggttaacatctgacttctcatccaaactgaggagtccaaaaggaagtgggataacatattcaaagtgctgaaaataaaagactgtcaaacagaaattctatgtacagcaaaatatcctttcaaaatgaaagacaaattatgatattcccagataaacaaaagtggagagaatttgctattaacagaaccaccctgtaagaagtactaaaggaagtcctttgggataaaataaaaggacagtatacagcaacttgaatccatatgaagaaataaaagrtattggtagaggtaattaaataggtaaaagtaagataaaagaaatgtattttttctataaatcttttatthtatctgattcttaaaaacaactgcataaataatttataatcataatcaataaacctatgttgagattatattatataaagatgtaatttgtatacataatggtacaaagaaggaaaaagaaacaaagctatacagaagcraagtgtagatattgttgaaattcggttaggattcatctgaactagactgttataacttaagacgttaattttaagttccagcacaaccaataagaataactaaaaaaaatagccaagcaacaagaaatttaaaatggcacaccccaatatatctaacacaaaaaaagtcagtaatgaaggatcaagaaatacaaaagtcatagagaaaacaaatttcaaaacagcatatgcaaatacttataattacattaagtgtaaatgaattaaacactacaatcaaaaggcagagatttgtctcatagataaaaatatgagattcaattatatactgtgtgtaaaaggcatactttatattcagaaacacaaataggttgtaagctcaaaaatggaaatttttaggtgcctatgtgtttacacatattttctatttctgggtggagtgtactacagatgtctattagatctcattggtttatcgtgctttgtaagtcttgtatttcccttttaatcttctacctagttctactcattattgacagtggaatattatggttgaattgtctatttttccttcagttctgtcagatttaagtatttctggctctgtgttatgttttcctgacgaattgaccctttatcattaaaaaatccctcctcttttctgataacaattttgttttaaaatctatttgatcaaatattagtatagccattccagctcttttagcaaagattgaatggtatatttacatatgtaatctttatcaaaattatagctgaatttttttcagaaattgacaagttaatcctaaaatttatacagaaaggcaagggacccaggatagctaaagtaatccttaaaaagttaaagtatgcacacttcataatttcaaaatgtattgcaaactgtggtaatcaagaargatagatagatcaataaaaaataattgaaagtccagaaataaacccatacatctatggccaattgttttttaacaaggggctccaagtccattcagtgggaaagaatagctcttcaacaatacatactaggacaactgaatttccatacgcaaatgaaagaagttggactcctacttcacaacatacagaaaagttaatttaaaatggatcaatgacttaaayataagagctaaatctattaaaatcttaaaagaaaacaaaggaataaataattagtcaccttgtattagccaatttttaaaatacatacactagaagcatacacaacaaaagaaaagacagataaactggacttcctcaaagttaaaaactgttgttaaaatgaaaacagcccccgaagaatgtaggaagatatttgaagattatatagcttaaaaggcacacttgcatccagaatatataaagaacctgacaattcaacaatttaaagaggcaacctaattttaaaatgggcaaagtatttgaatagatatttctcaatataaggcatacaaatggctaacactaacaagcacatgacatgttgctcaacataattagtcattagcaaactgcaaatcaaaaccacaatgggataccacttcacatcaactaggacagctataaacaaaagagacaagtgtggtgaaaatgtggaaacactggagccctcatacattgtttgtaggaatggcatttcctcaaaatgttaaacatagagttaatactagtcacagcaattctactcctaggtatatagctgagagaattaaaacagtatgtccacacaaaaacacaaaatcttatacgcaaatattatacagacagcattattcataacagtccaaaagtgaaaacagtccaaatattcctcaattaatgtatggatttttaatgtggtatattcctacaatggagtatcaattgacaataaaaatgaatgaagtactaataatacatgctacagcatatatgaaccctgaaaatattttgctatgtgaaagaagtcagtcacaagagtcccatactgtatgatttaattcatattaaatgtccaaaatagtcaygtttatagaaacagaaagttaattagtgtttaccaggggctgaggagagggatagcaatttactgctaatgcgtgtaggtttctttctagggtgataaaaacattctgaaattattatagatgattatgatggttgtacaattctgtgtgtatactaaaccacttaataatatactttaaagagatgaattttatagtatgtgaatgatctcagtaaagctggcatttctaaaaggtaactagcataatatgaaaaaataatacatcatcttaatagatatagaaaaaaataataaaattcaaaacccattcaggattttttaaaaagtcttagcaaactacaaatagaaagagcttccttaatctgaccaagagtatcctaaaaacccttcaccaaacatcagaattaaaggtgaaatattgaaaaccttcttcctgacatagaagaaacagaaagcagaatgactgaaaaggaggaaataaattgtcattattttagatgacatgattgtgtacttagaaaattcaaatgaatttacagacaaattataaaaattgttgagtgatttatcaaatttcttggatacataaaaacagaaaataaaggaaatgttttaaaaatatataatttacaataacatcaaaaataccagataccacaaataaatctaaagatgtgcaagatctctatggttaaacctataacacataattgagagaaattttaaaatgcctcattgaaaatacctacttaaatattaccatagtatataattgttatggttggaagactgactgttgtaaagaaattttcctgaatttgatctatatatttaatgcagtcccaatttaaaaacaaaacaaaaacaaaaacagcatttgtggaaattacatagtgattttaaaatttacattaaacgcaaagggccaaaaatagtcaatctttaagaagaacaaagatagaggacatataatattcaatataaagatgctataaaactatagtaatccagatagtgtggtattgtcttaattctattctgtcaattagagggttcaaaaatagatatacatgtaatcattcacttgattgatagcagcagtgatattacagtgcagagggaaaaattgtcttctaaataattaaatggtggtgggtcaattgaatatacacatagaaaaaaattaattcctatcttttacctttcaccatgcacaaaaaataattccagaattatagtagatgtaaaactgaatgtcaaaacaataaagattctagaagaaacataggagaaaaacttctatgtttgggggtgagcaaagatttcttaagacacagaaaaaaaaaacacaaaagaaaagattgatattatggacccattaaaattaagaccttctattccatcatagatgctaataagagtagaaaggcaagccatagggcatgagatctttgcaatacatatatccaacagatgacttgtatccagaattcatacaaaactataaactgaagacaaaaagacagaccatcaaaaaataggcaaaatatttggacagacatttcacaatactcccatcaaaattgttaaaatgaaaaagactgacaatgctaaagattgggaaggatttggagcaactacaacttttataaggagctggtaagagcataaattggtacaaccactttagaaaacttttttgttgaataaatataaccatattcaattaaagacaggcacaagaggctgggaacggtgactcatgtctgtaatccaaacactttgggaggccaaggtgggtggatcacgacataaggagttcaagaccagcctggccaacatggcgaaaccatgtctctactaaaaatacaaaagttagccaggcatgatggcgtgcacctataatcccagctactcgggaggctgaggcaggagaattgctcgaacccgaaaggcagnnnnnnnnnnnnnnnnnnnnnnnnnnnnnnnnnnnnnnnnnnnnnnnnnnnnnnnnnnnnnnnnnnnnnnnnnnnnnnnnnnnnnnnnnnnnnnnnnnnnnnnnnnnnnnnnnnnnnnnnnnnnnnnnnnnnnnnnnnnnnnnnnnnnnnnnnnnnnnnnnnnnnnnnnnnnnnnnnnnnnnnnnnnnnnnnnnnnnnnnnnnnnnnnnnnnnnnnnnnnnnnnnnnnnnnnnnnnnnnnnnnnnnnnnnnnnnnnnnnnnnnnnnnnnnnnnnnnnnnnnnnnnnnnnnnnnnnnnnnnnnnnnnnnnnnnnnnnnnnnnnnnnnnnnnnnnnnnnnnnnnnnnnnnnnnnnnnnnnnnnnnnnnnnnnnnnnnnnnnnnnnnnnnnnnnnnnnnnnnnnnnnnnnnnnnnnnnnnnnnnnnnnnnnnnnnnnnnnnnnnnnnnnnnnnnnnnnnnnnnnnnnnnnnnnnnnnnnnnnnnnnnnnnnnnnnnnnnnnnnnnnnnnnnnnnnnnnnnnnnnnnnnnnnnnnnnnnnnnnnnnnnnnnnnnnnnnnnnnnnnnnnnnnnnnnnnnnnnnnnnnnnnnnnnnnnnnnnnnnnacatttatcaataatttgtttaatatttactgggctaaaatatatagttgtcagcctaaaagagctctatttaatatcaaaaggggaaaattaacatggaaacgaaggccctcagcattgcaaaggaagaagtaggtcaaaaatatgttattcttgtatttttatcttccctttgagaaattcaagtatctctgagtggcagcagagagtaagctgttccattattaacttccccagcctccctggaaaatgaacattatacagatgagtggcaacttggaagaccttgtacagttatttatcttttcagatttctagtctgtcatctgcaaaataaaaaaaaatgcacacaattgtctgttaatagtatgagtaatgatgcccccagagcttatctttattcacttaacatgccatgaaacagtcctagatccatagctctgtggatggagatgggatactaacaaagtcaaggccacggacttgcttccttgcagacccaggtaattgtttctactttacagctgaaggctgcatctctcaccctggctggtcaattgctaaaagcatttcaaatagttttaaggaaactgggaaagaaaatagacatgtcagttaaatcaaagcatacacttcacaaatgtggagccaataagatatcacagaatcgtacaatattagatatgtaacaaaccttaaacaataccttattcaaatccttcaaatgagatagttccagggagattctaggacagacttgaggtcaaatagctcctaatggcagaagcaggaatagaatcctggtgtttcaagtttcaggacacattctacctactctccctgtctcttctcttctaaggacctaatagttgggcttttaaaactccttgatccaacaagcacatttacaataccccattcatacttctacagattacaaaaacataaggggataggccagccgttgagatcaaatgaaactaatagggtctgtaaaataatcttagggcagagatctttgtacataaaaatggaaaaagggaattcaacaattacattcagataaaaatatcttaccttcctctcagaaagtcaccttaaaactgagtatcttttggaatactgatcttcatataattgtctacatacattaatatgtaaccaaattcaacagtgaggatgttgaagaagaggttttgtatttgaaagaattagcttcagcatataaaatatgaattggttcaggcaagtttcttggtataaagaagacacccgaaatatattagatatttctgggactaagaaaggatcacttaaataacactgtttttcattatttcctgcctgtcctgactcttatcccagagaagttagcgaatatactttctcaaataaaactaggatacacagtaaaggaaggtggagaacataaaattactatatgcagttacttatgtttgccaggcactgttcttagtaccacacatgcatcacctcactgatttctcagaacaggatgagtaataggtgttattactaatccccaatatacaaataaggaaagaagcacagacaaataagacatttgtccaagttcactgaggcaatgagagtcagagccgggattagaactcgggcagattgacccaggacctattctatttactactgtactacgagtaagtcctaatttcatgaatgcatgtcttgaaagcacaacgcaaatctttttttttttttcaaatggagtctggctttgttgccctggctagactgcagtggcgccataggctcactgcaggctctgcctcctggtttcaagcgattctcctgccacagcttcccgagtagctgggattacaggcatgcgccacctcgcccggctaattttgtatttttagtagagacagggtttcaacatgttggccaggctggtctcaaactcctgacctcaggtgatctgcccaccttagcctcccaaagtgcagggattacaggcctgagccaccgcacccagccaagagtgcaaatcttgatatgcactttgtgagtggcaccatcatatacgtgatgggtgagatctccattctacaaaagcctacaaatgtgcattgaatcagtatttgtcaaaggggctaagaaacacaaggaaagggtaaatacatttgtgctttcttctctaggtgtgagccagcccacagtaaagctataaaacaagctaggcttgtcgttggtgttcctcctttgccttctagttcttgaccaaggtcccagggtcccaatgcccttgtgatcaccccgatgccagcaccccacctagatggccacctctaccagagtgcttgaaacatattattcccttcctacaatcaaaacagtactcccaattgcagctgatctcaattaagcttttaaataagaaaatagatgaaaaaaacacagaataatgcataataatagatgaacacttaaccctcccagagatttttgcatctttaaaagaagactgctcactggggcaatggaatctctaactgatgaaattccagataccatttaaagggaaaaaaaaacattcaacattttttgaagatgagaaagatgtctgcaaactgaacaacactctggagcccaactctcccaagcagttcctggacctttcctcatttctgaactgagttattttattttattttatttcatttcatttcatttcattttatttatcattctacatcttttcttagaaccttctagggtaacaaaaatgaagtttcatacaggaggccagcagactgttttcaagttctaaagttaagtctttaattcagaaatggaatcattgtcattgactcttacggtggtcatttttctacaggaaagcctcagtctatcaccctgcaactttcacatggccactcctccactgttgaatcttgggcaatagctcactcatgtcaaaactcagtttcctcatttgaaaagtgaaggttttggaagagctggagtttggaccatttttcatagtccttttactactaacattctgtaagtcaaaattcattctttaaggcaatgtttctcagaggagcactgataatcccaccagatttgctaaatttcaaaaggtaacaggcattttcctcaagatttgttctgggaatatatagagacattaaaataccattaggccctccattctaaaaatagggcctaagaaaaatgtctactgtgtttccaaatagttctcttaagaggtgtaaccaactgagacccataagctttaaactgctggaccaggatatgtgaaatagtgatggggtattaataactagcaacactttccaacagtgagcaaaatgtgtagtcattttttcttactttgcataaaattcaactgcctagggaaggttgaagcattttgcttttcatcacatggaacagcgtggtgagataggccacactattttggaatatgtgtctatatccaagcaacaaacagattgatgactttaaaacagctctgcacagggaaggagaccactttagctatctaaaaactattttagaaagggtgattattttaaattgatgtctgaagtgcatttggtgttgtgcaaaagtacctagtacatttcaactaaagttaaagcagaaagcttttatacctcctctataattatttgttcaaacatttgatagctatataaataatactacaatatagtgatagtgaagtttttatggtgttctcactaggaaggctgttataaaattatttatctaccaaaacttgtacagtttatctataaaaatgttagagaatttatcttcaaataattttgttatagtatatatacaaattaatatatagattttatctgcaaaaaacaagttctgataaggacataaagtttaaattatgaaataagtcatagccacaaagcaggcttatatggttaatggatttttaagttttataaatcatttttctcttaacttttgattttgaactactgttaaacttacagaaaagttataaaaatagtacagaaaatttccatatatccttcatccagactccactaaggtaaacatcttacataactgtagcataattattagaaccaggacattagcattgatacaatatctttaacaaaactaaggaccctatttgaattttgccaggatctccatttaggatcccacattgcattcaattgtcactttttacttttggcaaataaactaatctttaaatattattaggagaactcagaatttaaaactcttttttcatgagaaaaaaaaaaacagaatctttgtgacaggtggactttaagatggcccgcaatgatctctgcttcctggtattcatgccctgtttaatcccctcctctggagtgtaggttgcctgagtgatttgctcccaaccaacagaaggtaatggaatgtcaacttcatcattagtctacataagattgtgacttctgcattgctaacagactctctcccttactggctttgatgaagcaacttgtcatattgaggagacccacatggcaaggatctgaaggttgccactggctaatagacagctaggaactaagaccctccaaccaaagcctttaaggaactgaagtttttccaagaatcacatgagcttggaagttgatccttcccaggtcaagccttcagataagaccccaaccctgccaacatctttaattcacctatgtgacagaccctaaagcagaggacctggctgggccactcccagatatccggcccatagcaactgtataataatatatgtgtgttgctttaagctgataggtttatggtagtttgcaatatataactaatacacttttcttgacacatcacattgtcagaggcatgctactgagtttgatgttctattcattgacaagactcacacaatcatctttttaaaaatacattcctaagtttgtctttgttaggctgagctgttcagtgaaaaatgctcacaaaatcatagtcacaggcacctcccagagctgcagaacttacttagtcgtgaagagaatgttaatgctggaaggatcttccaagataatctactcccattttctccttttgcattatgaggaaattgaagcctaaacagattttcatagccaaatactgtgactccagtccagtgctcccaaatatcttgcctatctgacctccttgcacaatctatgagcaacagataacacaggaacataaatcaacagatgacaacactactggaaaacccaaataacaatagatggcttgttctccctatgataagcgaacagcattggtttcctatgtcagcatcttctgcgacctcaagagaccatataagaggttaggcttagcggggtatgagaagcagaaaagaggcttctttggtttctactccactaaacgtggggatggacagcggtgcaagggaatttttacatgtgtcattgtctcccatcagaagataaataatggaagcatttgtggtattttttggtcacattggtctgactctaaaatccaggactgtgtctttctttttcttcatttgtaatagtcatgatcctaccaggaaagaggtgagccactaaagcaggttcactgcagaatgtttaatgaagggctctgatcrcctacagaaggaaaaggtacaggcagggtttagataaaccaacaaggcrtagtacagtaggctgctgcagggagctgttagcaccctaggtttaagagacaaggggaaaaagaattttctggaacttggagagagttgtatggggaaggctgcttgataggggtcgtggcctcttacagtgagtgggttgcagtcaacccatgtaacctggcagaaaggaaaccaggggatcactacccaaactgtctattctcccacactatgatctcatgctggtggcttccattggctgaacccaacaggaagctagaaagtagccactgttgaagcggcctcccctgggaagagttaggatggaggagagtggaaagtagatatggagaagtaaatgagaaacagccagcacaaagctgcatgccttgcacctagtgaaagttcagcaaatacttgtcaagggatgaaacacagtgatgtgtgagcagacggttaaactatgattagcttgacatctggtgggactgtttacaccacaagaatcagcaaattatgcaaataatggttttgttgttggtttgttttttcttcctcagggatccaatttaccagcacaccactgaataaaagtctaaatcatgtcatctactacagaaggaaagctgttttcatttccactcaaaagaaaattacagccatgaacttcttgaatccacataagaaatgatctcaatattaactccttctccaccacttctaccactcctccttcacatacattattttttcggggagtatagctcaggggtagagcatttgactgcatatacattatgtttttggtggtaataccatctacctaagtctccaagtccaaaagcctttgccttccagtcaacttagacattcatatgcaaataatcactaaatactgccaatattacttcctaaaaatccgtcaaatccattttcccttctctcccattttattttctagaaaaattaagccagctgtactctctctaatatatggtagatctggctgttacttcatctgaattgcctttttaccccaccttgtttacatggcaaatttttcttcttcctccaaaattaatttcagcagttacctcctccctgctagtagccttccctaataatgccagataaaatgaattcctcccctttctctgtgttacctccatgccttgtaaactgatcacattttacagcaatttaattgtgtttatgtctggtcctctattacgctaagtcccttgaagacagtagtatgttttattcatttgcgtaacccagcatctagcagtgtgcctggcacattataggcaccaataagtgtttgctaaaggaataaattgataattttccaggtatctttgttgaataaactgatgccaggagctgagatagagctagttcctagtaagaccctctattcctcccttacgtcaggcccccccacccacactcccaaccttggcaacagtaactgcttgcaggactgatcccatcatgacctcttttcccacttcaatcaattatgacaggatgctcagtatatccggctctccctcacctcccggacttccagatcctcatggatcaaatgtaagcttcgcagtgagttttcctgaacaacactgcctaaaattgcacctcttttcaccatactcccaccctcccaaagctctccattcccctgctttgctattttcattgcacttatcactatccgctaaacgagtatttattatctgtctatttatttgcttactgcctatctctcaccggcataacataagctctgtgaagccagggatatttgtttatttcatctgcagctctatccctcctgtgcacagtcagcactccataattatctgttgaataagtaaatgaatcacacgcagaggtgactcctgcctgagataaagctgtcagtagcaaagttgggaggagaacctaactcccaacttaattgggaatacaaaagctcacactaccctgcccaagaggtgccctccacttcaggtcagcaggttctacatgcactattcaacatttaagtaatgcccacgtaagagttaaatgtcagtaaaactgtcataaatgaaaagcctacagactgagggtcttgtttgctatgccaatagcagtgtgtccctcttaaaatacagaaacttagaaaatactaacagataaacacagtttgaattaagatgggcataaataatgtaaaaatgacacagccactctgaaagagaatataaaagtccatactcttttaaccaacacattcctgattctcattaatatttggcatacttaccagggcccaggggatgagagattaacagatcacaaaagaaatgtgcaattgttgaattattttgcagttgttttgatttttacacattataaaaggatgccatgaatacggatattcaaatgaattgaatcacaagtattatttatacattctagtcagagccacataattatcgggggaaccagcccccaatatttcaatgtaggttctttctattttccctaagagttggccagtctaagaaataaagagagtacaaagagaggaattttactgttgggcctccaggggtgacatcacatattggtagatccgtgatgtccccttgagccgcaaaaccagcaggtttttattaaggactttaaaaggggtgggggtgtacgaacaaggaataggtcacaaagatcacatgctttaaagggcaataaagatcacaaggcaaagggcaaagcaaagatcacaaggtaaagggcaaaattagaattactgatgagggtctgttttcagctgtgcacatattgtcttgttaaacatcttaagcaacagaaaacagggttcgagagcagagaactagtctgacctcaactttaccaggacgcgatcttttccagaccttaataagcctgagggtactgcaggagaccagggcgtatttcagtccttatctcaaccgcatcagacagacaaccccagagtggccgtttatagacctccccccaggaatgcactccttccccagagtattaattattaatattccttgctgggaaaagaattcagtgatatctttcctacttgcacatccgtttataggctctctgcaagaagaaaaatatggctgtattctgcccgaccccgcaggcagtcagaccttatggttatcttcccttgttccctgaaaatcgctgttactctgttttttttcaaggtgcactgatttcatattgttcaaacacacgttttacaatcaatttgtacaatagtggtcctgaggtgatgtacattctcagtttaagaagataacaggattaagagattaaagtaaaaacaggcataagaaattataagagtattatttgggaactgataaatgtccatgaaatcttcacaatttatgtttctctgccacggctccagctggtccctccattcagggtccctcactttcctcaacacataataccgatgaattattgaggagaaaagtactgcacagagcttgatgaaatgtgtgtgcttgtgacactgtcagtaacatgacaaggcatttttagaaatatttgatctgtcatggcctgattctctagctttacatctttgtaaaatgaaagtaattggaattatatgacagtatcttacctatgctttgagctattttggctcataaaatgaaacctcatctatcacttcatattttatgcataatgccaaaaaagcaactaagtcaccagtgttgcctgatgttgaaaagggaactttgctacaaccagctgcctaaacagccaggttgccagaactcatgtggctgactgctgtttccaggttagcagataaattcaggaaagtaagcagcaaatgacttcagaatatttctttggtaacagcaacagtgctcatcttttttgtttgactactgatctatatatattttaaaaaattataaatatgaaagtatttaattccttaatgtttccatttattcccaaatgagatacaatttgggacatatgtaacttaacacctagagcctgaaattctattttctaccatgaactgtttaagcaaagaccaatccatccaatacacagaggggtccaagcagatgacctggctcctccccagggtgatactctttaaatatttgtttaatatttatttagctgagaaactgagatttgcactgaagagaaacaggacttcaggtagcagggacccaatttgcaaactcaacttagtaaaccagaagtcctgcagttaactcagcccattctttctgaaggcagttaggtggccagttgttgctactggatatgatccatcatatgtcaacacaatgccccccaaaaccttcaagtagattctctgattagtattccaaagcaaacataaaagagtttttgagaaaacctatgctaaatttaattttcttcatcttgtttcatgagtttttggagctccttattcatcagtgccatgggccactgtaaacggacctgcctctcaacccagtgaaaaaccaagtaaccttaggatgctggattccttaccctagtgtctccagtaagttctcatcagtcagtttaaatacctccagtaatagcaaactcaccatttcctgagacaacaattctatatttacacaagtttattatccataaaattcttcctttagctaagtaggaatttacttctcaatgactttcaattactagttctattaatatgtttgccctgtggaagaacacagaaaaagtatgctcccccttccatctcatggcccagaaacatctaagaacggccatggtatgccctcaaagtttcacacccccagttccctcaagtattcttcacatgaacagattctcaatcgctattctcatcagtatcctctacatattttattgttgttttctttctgttctttatataaactttaatgctaaaattttcaattagaaagtctttttaactgagtgcatatgagttaatattaagaagaagcacagagctgctaagccagtcttcaggcacaatctagtaattcctcatccattaggtccaggattttaacagtgatggagaagtgagagttaatttagtatctgttagctggttattctgccaaccagatcatcagtgttgcctgattttaaaaagggaagctcaggagcttcagaaggaagctaaattatctctggaaatattatccaagtcgccttaaagtttcaattcccttaatatacacacaaaatttgatttatgcaaaaattttaggaacatataaattatacaaaaagtgtagtacaactatagtcaacatattttgaactctcattaacctagacatttaggagggttccctgattgaagagttcatttattcctttactcagctatttaatgagcacctgctatgtgttgggcagtgttctgaacaatgggtatacaatgatgtacaaagtcaacaagttctctgccactgtggagcttgtaaagtaagagaggcaataaacagacaggcaaaaggggttataactgtgccatggtgaaagataacaggccctattgagggtgatcagagatttgtctgcagagatgtcttctgagaagagggcttagtgtgaggagaaagatactaccaggtaaaaggaacattatacacaaaggaagctagaaagagattggcatttttgagaggtagaaaggaaggtcagtgcaactggagccaggtcaacaacactagagaagcaaaaagggcttcagaaactatggtagggacttacaactggctatgggcagagctatgctttgaatcaaatgtaatctgcccccaaactttcaagcgcattctctgcagttgccagatgaaattctttaatcttcagtgaacacacataatataaaatttgggtaacagtatggtgtttttcaagaagctcatttgaggaaactcatttggttctcactgcaaacctacaaggattaagtacactaaagaaaactgtagtatactatggaaaattgagtacatgacagaaaacatgtagtttccatgcttcaggtgtaatttttaatcttagtcatgtggctaagtaattttttttataaaattgctctagatattaagaatagttgtttaggacctaatggcaaatcaatatgtcagagggaaaaacaaataaccaacacatcaaattcttaaagttaaaatctcacttcaggagcatggaatatctctgcaatgtactggaacatataagcaagctggagataatctgctgggtctcctccatttcaattagcctgttttgcagtacatgatgtgtacatttattaaaagcagacacagtctaaaagagaaactgtgaaagctcattgttataacatatgatatagttgatcaggatctgaggtctcaaaggaatcaagttaaaaactataacatttacacataccattataatatttttaaattaagttttaaatagtattatgtaggtattgtctctaggatgaaatacaagcaaatcttcattatttggttagcaggggaaattagtatgatgaatgatccaaaataatgaaatataaaagaaaaatatatttgactttagaatttttttttataatacattttacttctctgaactcactttgcttattaaatttagcttgcagatcccacacatacactaagtgacagcaagaagcattggtctgaaagtgcaattataaaattaaatataataataaatgcagggccaggagtggtggctcacacctgtaatcccagtactttgggaggctgaggtgggtggatcacttgaggtcagaagttcgagaccagcctggccaatatggtgaaaccccatctccactaaaaatacaaaaattagccaggcgcggtggtgggcgcctgtaatcccagctactcaggaggctgaagcagggagaattgcttgaacctaagaggcagaggttgcagtgagccgagatcacactactacactccagccttagcagcagagcgagaccctgcctcaaaaaataataataataaatgccacaataaaaaataaaataaggccccaaaggatacttgaaaactaatataataatggatatcattatccatgaaaatagaagtaaaaaattaccatattagcacacttatcaggtcaggggaaaaggaaattgtacctaaaagtgccctgaaaactgtaagcagcttaactaaaaatttacagctaacattcaagtagagattgaattataatcaggagaatgattgaaatgagtttacacatatatatacatatattatgtatatatatatatatatatatatatatatatatatatacacaaatatacacatatatatatttgagacagagtctcactccatcgtccaggctgaagtgcagtggcacgatctcagctcactgcaagctccacctcccggattcatgccatcctcctgcctcagcctcccgagtagctgggactacaggcgcctgccactatgcctggctaatttttttgtatttttagtagagacggggtttcaccatgttagccagaatggtctcaatctcctgacctcgtgatctgctcgcctggcctcccaaagtgctgggattacaggtgtgagccaccacgcccagcctgaaaaatatattttaaaaacccaatcctgcttacaatagctacaaaaaacactttggaataaacaaggaagtgaaagatctctacacaaataactataaacattgaaaaaaattgaagaaggcacaaataagtggaaagaaatggatgttcatggttggaagaattcatattttcaatgtgtccgtactacccaaagtgatctagagtcaatgcaattcctatcaaaataccaatgacatttttcacagaaacagaaaaaataatccccaagtttgcatggaaacacaaaagacaaaacagccaaaccaagcctattaaaaaaacaaagctggaggcatcacactacctaacttcaaaatatactacaaagcataatgatatggtttagctgtgtccccacccaaatctcatcttaaattgtagtttccataatcctcatttgtcataggaagtactcagtggaaggtaattgaatcataggggcagttacccccatgttgctgttcttgtgatagtgagtgagttctcatgagatctgatggttttataaggggctttccccattttgctccgcacttctccttcctgccatcatgtgaagaaggatgtgtttgcttccctttccaccattataagtttcctgaggtcttcccagccatgcagaactgtgagtcaattaaatctccttcgtttgtaaattacccagtctcatgcagtcctttatagcagtgtgagactggaataataacacatagtaactgaaacagtatggtattggtataaaaacagtcacatagaccaatggaatggaaccaagatccaataaataaatccatgcctttacagtaaactggtttttgacaaggtgccaagaacacacaatggagaaaagacagtcatttcatgcaatggagaaaagacactcaataaatggcattagggaaactgcctatcaacatgcagaagaatgaaattagactcttatcgcataggatatgcaaaaatgaactcaaaatgggttaaagacttaaatgtaagggcccaaactatgaaactactaaaagaaaacatagggggaacctatagcctggttaatgatttttgggaaatgatcccaaaagctcaaacatcaaaagcaaaagtagacaaatgagatttcatcaaactaaaagcttctgcacagcaaaggaaataacagagtgaagagacaacctatggaatgggagaaaatatttgcaagctatacatctaataaagggttaatatccaaaatacataaggaactcaaacacctcagtagcaagaaaacaaatcacctgatgacaaaatgatcaaaaaaacctgaatagacatttctcaaaagaagacatataaatggccaacaggtatatgaaaaaatgttaaacatcactaattatcagggcaatgcaaatcaaaacctcaaatcccaccactgctttatcaaataagttaaggtaatattcaaaatcttttgttgtcatttcagcaatgttcacagcagcttcaccaggaatagacttcatctcaagaaaccactttctttgttcatccataaaaaagctactcctcatccattcaagtttgatcatgagattgtagcaattcagtcacatctttaggctccacttttaattatagttctcttgctattttcacaacctctgcaattactttctccactaaagtcttgaacttctcaaagtcatccacgagtgttggaatcaagttcttccaaattcctgttaatgttaatgttttcacctcctgtcatgaatcacaagcattcttaatggaatctagaatggtaaatcatttcctaaaggttttcaattttctttgcccagatccattagagaaatcacaatctatctatagcagctacagccttatgaaatgtatttctgaaataataagacttgaaagtcaaaattattccctgattaatgggctgcagaatagatattttgttaacaggcaagaaaacaacattcatctcctcttacatctccgtagagctcttgggtgaccaggtgcattgtcagtgagtagtaatattttaaaagaaatctgtttttttctgagcagtaggtgtcaaaaatgggcttcaaaataatcagtaagcagtttctctaatgccatttattgactgtcttttctccattgcatgaaatgactgtcctttctccattgagtgttcttggtgcttttgtcaaaaaccagtttgatgtaaaggcatggatttatttattggatctcgattccattccattggtctatcagtaaacaggtgtgctgtcatccaggcttttctgttacacttatagagtatgagtagagtagatttagcatacttgttaacggccttaggattttgggaatggtaaaagatcattggcttcaacttacagtcatcagctgaattagaccttaacaacagagtcagtctgtcctttgaagttttaaagccaggcactgacttctcttctctagctagcaaagtcctagatggcatcttcttccagtacaaagctgttttgcctaaactgaaaatctgctgtttagtgtagccatctttatcaatgatcttagctaaatcttctagatgacttgctgcagcttctaaatgagcacttgttacgtcatcttgcacatttatgtcatggagatggtttctttccttaaatctcatgaaccaatctctgctagcatcaaacttttcttctccagcttcctcacctcttccagccttcacaaaattgaagagttacaatcttgctctagattaggctttggcttaagagaatgttgtggctgttttgatcttccatccagaccacaaaaactttctccatatcagcaataaggctgttttgccttctaatcatttgtgtgttcacggatgtagcactgtttgttgcctataagaacttttgctttgcattcacaattggctaactgttgggtgcaagaggcctagctttcagcatatcttggctttcaacacgccttcctcactaaacttaatcatctctagcttttcatttaaagtgagagatatgccactcttcccttcacctgaatacttagaggccattgtagggttgttaattagcctaatttgaatattactgtgtctcgcagaataggaaggccccaggcgagggagagagacaatggaacaatagtcaatatatggaatcaacctaagtatccactaaccaatgaatgcataaagaaaatgtgatacacacacacacacacacacacacacacatatacacaatggaatactattcagccataaaaaagaaaaaaatcctgttatttgccacaacatggatcaacctggaggacacttcgttaagtggcgtaagtcaggcacagaaagacaaataccacaggatctcattcatatatagagtatttaaaatttgatctcattgaaatagagaatagaataaaggtgaaaagagactggggaagttcaagggtgaagattggggaaatgttggtcaaatgacacaaaattacagttagctagggggaataagttaaagagatcttttgtatagcatggtgactacagttattgataacatattgtattcttagctggtcatggtggtgtgtgcctacagtactcccagctagctgaggggctgaagcaggaggactgcttgagcctaggagcttgaggccagcctggacaatatagcgacaccccatctctaagtgtgtatatatatacacacaaatatatacatatatacacacatatatatacacatattaatgtatatatacacatgtatacacacatatatgcacacatacatatatgtatgtgtctgtatatatatgtacacacatatgtgtatatttgtatgtatatgtgtatgtgtagtattcttaaaaaatgctaaaatgatggatgtaaagtgttctcaccacaaaaatggtacaatgtgatgtgatgtatttgttaatcagctagatttagccattccatcatgtatgtatacttcaaaacatcatgttgacacagtaaatgcatgcaattttatctgccaatttaacataaataggaattcaaacacacagaaaaaatgcaacttattcttgtattactattctaaaactttgtaacattttaattcagaaaataattgatgttatacgtgaataagtaatacatgctttgaaatttttttaagtgtatacttaatatttcaaaaattccatgatatacttttgattgatgtacttattgaaattatccctgatcctgtttgatattgtgctggatagcctctgtctatctctctgtgtctacactttggccttcttgccctgctctgcctcccagtgttgagtggaagaaccacccaacatctatgtatggttcacacttgctttaaagtataagatttgggacttttgaactgatgagatttagttgagattctggatctcatccaccatgctcacatgaattatgcacccttgtcctctggttgtggatgagttcatttgatgagaggcactggcagatgggagggtgggaggtgagtgaggtcagggtatttatccttccttctctctcactgcaagactgaagggttggcagtggccgtgctcctctgcctagggtcatagcacctggcctgtccaagaccctttacccatagatacaactctctctaactctctctaggtgctactggccattattccccttcaatcttgggtggtggaactgtatccccgtatcatgagaccctggtgcctcccatcacttatttgttctcttaaccctgcccacagctccataaatagtctcttcaagaaactctcttatcacccctttgagtgtgttgtctgtcttatgctggatcctcactagaacagctattatggaattcctctgatagcatcaatctaacattgtgaataattttttcccataaataaaattattccagattttcaaaacatttctattttcaaagaattagaactagccatgactaatgtggctaataacaaccaaaataaaagggagtcatttggataattttttttctcctaggacacttctgctataaccaactcttatcactgaataatctgggttccraaatacctgtcatcgccatcaatgatgcactcagggaaggcgagggtacagccaaacagcatgatatgttgatagcaactgaggcgatggagatatgtgaaaaacttgaggaacttttccatttccatgtttctgacaactgagaggagaggtgtcagcgtggcgtggtagggcagcatctgacactggctgtgggtgatgttcatacaggcacctgggaagtaaagacatgcacatttaagagtggacacatcagaagtatatgtttgcaaactcatttaatatttgtttawaagataaagtatacttatcacaagaaaaaatttagatatgcaatcatacacataggtgcatgtaagtatgtgtatgtgtatgataatgaaatcaagctacaaatatttacagaggaaaagcattcgtgtcctgggaaaatgtgtggaaaatacatactcctcatacatatctagtaggcatataaactggcaatcaccttttcttttggatcacagctgggcagggcaatatgtatccaaaaaaatcttttcaccatgcatattctttgacattatcaagtcatttctagaaacttatcctaaggaaataatcatatttgtgaatgtggatttatctacggggatcttgatctttgcatagtttacaatttttaaaagatagaaatcatctaaatattcagcaaaaagaattgttctttagaatatggaacaaacaatagaatatttaatttaggtacatgaaagatgcttcagaagactatttaatcacaacggatgatgctcataatataataagtaaaagtaggaagtcacaaaacaatttgtatacaatgatcttgtttttaaaacacacaattatgcaaagatttgtaatcccgcctatgtcaacagttcaggagcagctcagagcctctgacattatcttctcccatagttggctcttttgggcgccaccatatccatggcttttccattgccttcatgccagaaatttgcctggttgacccgatataaacaaaaatgttgacatgcattcatatgatgggattttaggaatcgaccacattttcttttttattccttattctcttgtctgtataaagattcattgcttttattgttgctgcttaaacaagattctcttattcacaatcgcctcagtttcaagacccagttacatgaaatcatatctatattatacatgagaaaactcaatttttagaaggctaagaaatttgcctagaggtgcatagccattatgtagaaatttcagatctgaaacctatgtcttctgagtaatttccattacttagagctaatgtagagggttatgttaaaaatagttcttgagataattcttaatggctcatgaaaggaagaggctaaaaagcatataatgacatatctcaaggtctgtatgtatagtaatatgtaatacacctgtatattttgaccacacctttttatcagttttaattacattattttatttaggggttatcagcttttgggcttatgcttttgatggaagcccatatttgaagcaattagaatactaaaaggctcattccctccacccagccaaagaaaccactgaatattaagagatcattttaaaaatgcaagatagaaaacatcctaggggccgggtgcggtggctcactcctgtaatcccagcactttgggaggccgaggcaggcagatcacgaggtcaggagactgagaccatcctggttaacacggtgaaaccccatctctactaaaaatacaaaaaattagccgggcgtggtggcgggcgttgtggggggcgtggtggcgggaggctgaggcaggagaatggtgtgaacccgggaggcggagcttgtagtgagctgagatcgcgccactgcaccccagcctgggcgacagagcgagactccgtccccccaaaaaaaaaaaaaagaatcctaggaattttcccatattagcatttggagagcttcactgtttcctttactgctgcataacattccactatatgttgtactgggatttatttaagcaatctccctttaataaatatttggactgttttcaactttttgctattatattgctgtaataagtaacctgtacatatgcctgagatgtacaatagattcccagaagtaggattgctgggtaaacggataaatgctttcagaattttggtagctattgtcaaattcccccatcatcgagaagtaccattttgaattctcgccaacaatgtatgaggatgtctgctttctcagtctcaccaacagagaacagtgtcaaacttttggatttttgctaatctgataggtgagaaattatattgtagggtgatttttcatttgcatttaacttgttgccagtgaagttgagcaccttttcatatatttaaggaccatttgcattttgtcttcagtttcatatgcttggaagatttttcctactgacttttaggggtgttttttctacttttacaaactccttattagggagattaatgtactgaaaatattctaacactttttctatagttttgtggttttgaaatcattttaaagaactaacaactatataatcatttaacagatgaatatattttattctactttaatccagccgttgaaatatttaaagggggctttctttgaaaagtagccggttcagaggcagagctcaaaatcgaatctggagtaaggtatgataatatctgacatttcagtacccctttgtagtttacgaaccacttctacccttatcttttaaggttgtattagttaggtttggtttggctgtagtgaaggaaaatggaatataacattgctytaagcagaacaaaatttctctgccccataaaagtctagatgagtggtcyaggacaggaattggatcccgtggtgccagaaacataggctctttatgtagccctaacttcatggcccaagatagtgaaatctacagtccagacagaagggtggagaagtagtaaagaggacaaagacacacactcttactatttcttaagaacagtttcagctgctacaagacccttccacatatatcccattatccagaatgtcgtcacatggccacatctagttgcatgagaggctaggattattccagtttgacatgtgcccagataaaaatggggagtgggatcaactacaaacgaaggagaatgaatactggtgttcaaccagaaacctttgccagaaaaacaaatagagaaggcatcattatactcattataaaagaaaacaaaggccgggcgcagtggctcacacctgtaatcccagcactttgggaggctgaggtgggcggatcacctgaggtcaggagttcgagaccaccctggccaacatggtgaaaccccatctctagtaaaaatacaaaaattagccgggtgtgatggtgggcgcctgtaatcccagctactcgggaggctgaggcagaagaattgcttaaactcgggaggcggaggttggcagtgagctgagatcatgtcactgcactccagtctgagcaaaagagcaagactctgtctcaaaaaaaaaaaaaaaaaaaggtacaactattttcctattcaagatgtttgattaagcacatatcctccctcctgacatttcaccaaaaaaagaatagtaaaggggaaaaaggcataaactcataacagcaaagagcatggagaggggcttccatcagaagataaatatttttagcaaatttctgccagccaaaaagagcatgcaagaaattttgaagtttgtggaagaggatgaagtcaatctgcccagcagaacctaggagaggttctgggcttgagttgtcagataaggcagagaagaacaaaaactggaactaaaaaagggagatattaaagatctgtatatgaaacaattgctcctcactccacccacacgcacagaatacaagacagccacaaaattaccaccattaaaaagaaaaaaaaagaaaaatattcatctatctctaaagaaattacacaatggtctgaaaactgagaaagctggtatggctattggtaccacagataaggttaacaataactgaaaatgtcgctctgaaaaaatagaaatagttcaagacagaagagaactttaaaaaaatcatcaataacttcagagtaaagtgcccatgtaatttatcatcctacctgagaaaatttaaagaatgataacaatgagctattaatagctatgccaggaaaataaatataaaccatgactgtctcctatgagccaagatatatagatttaaataggtattgcatccataaatgagaataggatgctaagaaaaagaaaactcagaagagaaaaccttacaatcgacaccacataaatgcaaaggatcataagagattactataaataattatacaccaacaaattagataacctagaagaaatggataaattcctgggcacatacaacttaacaagactgactcatgaaaaatcagaaaatctgaacagcccaataatgagaaaggatattgaacctgtcaggcctctgagcccaagctaagccatcatatcccctgtgacctgcaagtatacatccagatggcctgaagtaactgaagaatcacaaaagaagtgaaaatggcctgttcttgccttaactgatgacattacctttgaaattccttctcctggctcaccccggctcaaaagctcccccactgagcaccttgtgacccccatccctgccctctggagaacaacccctttgactgtaattttccactatccacccaaatcttataaaacggccccacccctgtctcccttcgctaactctcttttcggactcagcccgcctgcacccaggtgaaggaaacagccttgttgctcacacaaagcctgttcggtggtctcttctcacggactcaagtgaaagaaccagtaacaaaaagtcttccatcacagaaaagcccaggacctgacgtcttcactattaattccacaaaacatttaaagaactaatatcaattcctctcaaactcttccaaaaaactgaagaaaagtgaacatttgtaaacacattttacaaagccagcattgccctgataccaaagccagacaaggacactacaagagaagaaaattacaccttaataactttgatgaatatagatacaaaaatcctcaacaaaatgctggcaaaccaaattcaacagcacattaaaaagatcatttaccatgatcaagtggaatttatacctgggatgcaaggatgtttcaacatacacaaattaataaatgtgatacatcaccttaatagaatgaaagacaaaagccatacgaccatctcaaaagacagaaaaaacacttgagaaaattaaacatcctttcatgataagaccttcaacaaattaggtatagaagaaatgtacttcaacacaataaaggccatctacgacaaacccacagctaacaacatatgcaatgggaaaagagaaaagccatcctctaagatcaggaagagaacaaggatgcctgctcttgccactaataatcaacatagcactggaagtcctaaccagagcaattaggcaagagaaagaaataaaaggcaatcaaatcagaaagaaagaagttaaacggtctctgtttgtaacaacatgatcttatatttagaaaaacctaaagattccacaaggaaacctgttagaataagcacattcagaaaagtagtaaaagtagtatgttcaaaatcaacataaaaaatcagttgtttcaatcagaaatggagagaaaaataaacttaaattaaaaataaaaataaaccagttctgcttttatacattaacaacaaactgtacaaaaaagaaatcgagaaaacaatcacatttacaatagctacaaaaaaaatacttaggaataaatttaaccaaggaggtgaaagatcttacactgaaaatgatgaagcattgatgaaagaagtgaaaggaaacacaaataaatagaaaaatatcctgtattcatggtttggaaggattaatctcattaaaatattcatactacccaaagtgatctacagattcagtgcaatccctattataattctaataacatttttcaaagaaatacaaaaaatcctagaattcatatggaaacacacaaaaaacaaagaaccaaaaaaaaattgagcgaaaagaaaactgaaggtttcacactacttgatttccaaatacactataaagctatagtaatcaaaaaagcatgatattggggtataagcataaaaccaatgtaactgaatgaagaatccagaaataaatccacacattgatgaccaattgattttcaacaaagatgccaagaatacacaatggggaaacaacagtctcttcaataaatagtgttgaaaaaactggatataaagatttagaagaatgagattagtcttattttacaccatatacaaaattaactcaaaatgaattaaaaacttacatgtaaaacctaaaactataacactactagaagaatacatagggggaaagctcagtgacattggtctggttaataattttttgaatatgatcccaaaggcaagggcaacaaaagtataaatacacaaatgggattacatcaaactaaaaagcttcttcccaggaaacagtcagcacagcaaagaaataacttacaaaatgggagaaaatatttgcaaaccatacacctgataaggggttaatatccaaaatacaaaaggaattttatttagtagttaggaaacaataactaaatttaaaagtgggaaaaggccctaaatagacatttcacaaaaaaatacatacgaatggccaacaggtatatgaaaaaaagttcaacatctctagccatcagagaaatgcaaattaaaaccataatgagctattacctcatacctgttaggatggctattactaaaacaaaaattaaaaaatgaaaaaacagaaaataacaagtgctggtgaggatgtggagaaaagggagcatttgcacactgttgatagggttgtaaattagtgtagccattatggaagacagtatggacattcctcccaaaaattaaaaatagaattacaaaacgatccaacaaccccaatactagctgtatattccaaggatgtaaaatcagtgttttgaagagaaatctacactcccatgttcactgcagcattattcacaatagcgaagatatggactcaataaaaatgtccatcaatggatgaatggataaagaacatgtagtatatacacacaatgaaatatgatttggcctttaaaaagaaggaaatcttgtcatttatgacaagatggatgaacctagagaacattatgttaagtgaaatcaactaagcacaaaaagacaaaaaccacatgatttcacttatatgtggaatcttaaaaagttgaactcatagaagcagagagtaaaatgatggctaccagggactaggggtataagggtgaggattgcaatatgttggtcaaaggatccaaaatttcagttagacaggagaagtaagatcaagcgacctattgtacagcatggtgactatagttaataataatgccctgtacactttgaaaattgctaagaaagtagattttaagtatactcaccccccaaaattatttgaggttaaaaaataaaaacagatccaagtgatgttacaacaacttttttcatatttcatgtaaataaaggcagcattttgcattgggaaaaaatgggttatgagccctcacagagggaccaactagactggaaatttttggtgcctgttcctggctgtaccaggaagtcaactcaggtcaggactacatcagcagagtggaataatgaaggtcattctctattctagataattcacctaagaagaaacattttgccagaatgatttctgggaaaaatcaatttgaaaggatatcgtgtacttaggaagatctgtaagagggttacagtaagctaagagaaaacataaaactgaagacagggtctctccatgaagatttaagctttcgtttttaacttttattttaagttcaggggtacatgtgcaggtatattacatagataaacttgtgtcatggggggctgtcatacagattatttcgtcacccaagtattaagcctagtacccattagttatttttcctgattctttccctcctcccaccctccaccctctgatagaccccagtgtgaattgtttccctctatgtgtccatgtgttctcatcatttagctcccacttataagtgaaaacatgtggtatttggttttctattcaggtcttaactaactgtaaaccaaacctaaacacagtaactattctacttctcataagagaaaatcaggaaacaaaagatgcattttcttaatgagtgatttacaacatttgtaaaaagtctttacagacatagtgaaggcacagttaagccaatgtcttgctaagttatacaaaaatatgtaagtattttgtgcaatgccacgtaaattatcagagttaagtaaaagctagctattcttgtcaagagaaatacgaggtttgggagtttattttctatataattgtatatattctagactaaacgctttttaatgcaccccgattctcttggtgatgtattttgccaagcttcaagctttcacattacatagatagatagatagatagatagatagatagatagatagataggtagatagataattgtctctatcttattcctaaacgcaccttcatacttggttttaagatgtttaaatcataagtaaaggctcataacctgttgcaattcattcattcaagaaactacttactgtgacaatgctttaacacagtgaggggtcaaggtagagaaatgagccgtaatataggcctcggccgatgtgtaggaagaggcagatgaagaatattgaggcgccattggcgtgaaggtagcggatttctttgtaaatcaattattcacattccatagaattaagtgagacttaacattgcagctgtagcagcatctgtcaggcattttttataaattttgaaagaactacaccttgccccataaaatcatccatcctagagttatgaatgaatgataacaataattaaaatgtatatagtgtcttcaagtttgttaaacagttttctatacataatatggtggttccacagtctgattcaaaatcctggctactattttatatttctgtggcctttggcaagttattgaactcctctgtttatcagtttcctcatctgtaaaatggaaataataataactgtgtaataggtttattataaggataaaacaatgcttacacaatgtccagcacatagtatgtgataagaagtttttgctattattattatctcatttgtgactcacaaaaactctgtgaactagacaggggagagatttgtatccatgttacataggtaagaaaattgaggcagaaagctttcattctgcttttttcttctggattctataatgtatccatttataaagggaataattattcatttatataggaacaaaattcaaaattgaactacttagttttgcttacttgtacaataaaacaatgctgggagttataatttttttttaaaaaagtaagcattttaaaacattagtcatttaaaaatacgtattgagtctctactatacaaaggcacttagtgctatagaatgtttttaaaaaaagaatttggaattagaccacatttcacatatttagccaaaatttaacacatatagaaattatttgtttttcatgccaacagtggtaaaaataaattctataatgatgagagtataaaaaattacttactggagcaacatgttcaataaggaaaggatttattgtaaaatccactacctcactagtagtttgttttaaatttcaccactcatgaaggtgatgagatctcagtagactttcagccctatgtagtttattgggaatctcatttagtaatagttaagatttgagtacgggagtaatgaattctaggactaacagggcaggtctgcataccaaagcctggattacaccagctgggtattgtggtccttaatgtatttgtaaaaggctcatttaaataacgctctctaattcagaatcctctaaacttaaaatctatcataagtcagaatcaagttgagcaattgtttacctttttactctctgactctgcaaaggaagattttatggagaataagatcgtaaggaaaggcatgttctacatactcaaaaggaaacatttaaaatgaacttctagtctccttaaaatacacataaaacatgtcatttctttcttttaataaatataccttttatattctaataaatataccttctaggtatatttagtatataaatgtatacctaggtatatatatttattaaaaccaggttcattgatttgaaagataaaaggtatatttatcttttatatttattattaattactaaaagataaaaggtatatttattatataccttttggggagacaaacattctgtccataagattgatctataattttcattttcatattgtctttgctttaaatatctagtttctacttgattcaaaactacctatcggcattttctattttctctagaatattttgcatttaatggtgattaattgttccttaaaagtgtgataaaacttgtctataaaattatctgggattttaaaataaatttttaaaagtaagaatgatttttataggtagttttaaaactactgattatgatggcagcggtggcccatctggagatgctgagaagatgccagctgcagtgcgggaggcatggccagggctgcatgctccactggccgaagtcggtgggagccgggaacaggtgggagccccacccccttctcagctggcagggcaggagccctgcactcccgggtgtgaaagtatgtttagttcatattattaaacatggtttctttctgggtaggggaatttggtatgattttttccttcttgctttatgcttccagttttctatattgcttaaattaaatagtagatatataattctgataaataataaaattattatttttaaaagagcttttaaaataaacttaaaaatatgaccatcttctccgccataagtctggcttgtttttggtgagggatgtgggagtcagcacgaaagggaaattgtagtacatgggtcaaagcaaagaggaaaagggagcaagtagactcttcctgacctttctggctagtattttctgagttcttatcatgtgccagactgtaagactagccccattgacaagtcttgcagtggcttcttctataaaagcagcagcaacctcaacaaagaaggaaatcctgccatatgatatggtatgcatgaaacttgaggacattatgctaagtaaaataagccagtcacaaaagggcaaatactgcatgattccacttacctaaagtatcaaacatagtcaaactcatagaagcagaaaagcggaatgatggttgccagaggttgggcagaaggggaaatgaggagttgctaaccaatgggtatagagtttcaggcgtgcaagatgaatgggcacattaacaagtgtaatgtatactcaaaactttgttaagaagttagatttcatgttttctttttaacaataaagaaattagagataggacaagatggctgactagacgcatacaagtggaacagctcccctggagggactgagatgactggcatgcttttttgttgttgtttttttaataattgtctcatttattatctttctttttttttcatatatactttaagttctagggtacatgtgcacaacgtacaggttttttacctatgtatacatgtgccatgttggtgtgctgcacccattaattcttcatttacattaggtatatctcctaatgctatctctcccccctcctcccaccccacgacgggcccccgtgtgtgatgttccccatcctgtgtccaagtgttctcattgttcaattcccacctatgagtgagaacatggggtgtttggttttctgtccttgcgatagtttgctgagaataatggtttccagcttcatccatgtccctacaaagtcatgaactcatccttttttatggctgcatagtgttccatggtgtatatatgccacattttcttaatgactggcatgctttaaacagatcttcagagggaaggtgctgagggtggatggagggaagacacagaagctcagctgaagagggagaaagttggcacctgtagggccaactctactgggaggttgacagcgtttgatgtgtccccaggcattttctgcttcactgcttctcatgattggctgtgatatgactggccagtacccaaactctagaataagctagagaaactctaggaaaaaactttagatttaaggtttccatttctatggatttggggctttgtcttttgttttttggggtttttttgagtcaaggtttcactctgttgcccaggctggagtgcaatggcgagatctcagctcgcttcaacttcaacctcccaggctcaagtgcttctcccatctcagcctcccaagtagctgggggtttttttgagtcaaggtttcactctgttgcccaggctggagtgcaatggcaagatctcggctcacttcaacttcaacctcccaggctcaagtgcttctcccacctcagcctcccgagtagctgggactacaggcactcctcaccatgcccagctatttgtattttttgtagagatagttttgccatgttgcccaggctggtctcaaactcctgaattcaagcaatccacccacctcagcctcccaaagtgctaggattttggggggtttttttgagtcaaggtctcactctgttgcccagactggagtgcaatggtgagatctcggctcacttgaacttcagcctcccaggctcaagttgctgcgtgtggtatgagccaccacacccaaccaggtctccatttctttcccacagcaacctcccatattattcatttaaaaaaatttctcattaactttaaaggacatattatatggtaacatagttactgtggcttaacagccatcaggacatcataaatcagtctcctgaaatgcacattctagaggattatattgagtgcatatctataaacacatagccacaacaaaacagactctctgagcttgagtacttaaaacacaatggaggaatttggaggccattccaatgagaaaattacaaaattttatatctcccacttcctgaggtgataacattcccattaatacctgcaacagcaatgttggccttcccatactctacagacaaaattgaaaactaaagtctctgttcaattgattcaagataattattaaattttaaaatgaagcagtttaatctgtttaaaaatagaagctccaggatagacctttaaattaaaatatatttttgtccttgtaaagaaaactttacaaaaaaagttgtatttattatagaattaaaatggtatgaattagcaatattatattttagaaaaataaaaagaattgaaatcgatcatgtttgtttctgagcctgtcttatagaatttctcactttatttctcaagttgtaagaatatgttcatgttgcaaggcagttagtagacaactggctgcttggggacaggacttctgtcttatccatctttatagtccatagagccaaaacctggagtatgacatccaataaatagctactgattaacaaatggtgcttcacagaatattaacctagattctccaaaatttgagacatctcatacaatttagaaaagtacacaggcatgagaatgggtttacacagcttaatataattacaaacaagtactataccataagtcttattaattcaaacactggccaggcgcggtggctcacgtctgtaatcccagcactttgggaggccgaggcaggcagatcaagacgtcaggagttcaagaccagcctagccaatatggtgaaaccccatctctactaaaaatacaaaaattagctaagcgtggtggcacacacctgttatcccagctactcgggaggctgaggcaggagaatcacttgaactcaggaggtggaggttgcagtgtgccaagatcgcgccattgcactccagcctgggtgacagagcaagactccgtctcaaaaacagaaattcaaacaccacatgtgaatattagattaatgatctggagcagcaaaatagagaataaaatgtgttaacactgaaacacaagaagtggattgcgtcaaattgaaaagatgtaaagcttttggtttggaaaactcattaccttactcatttcagctacaagtgaaaaggcatattttccaaaggcacaagtaacagcaaacagattcccactgatgggttttttgctctcaacacaaaattatacaaatacttaaaacctgagacagtcaacaaattgaataattcaggcaaaagattacatacagtgccaattttctttcagaaccagaggaaaaagtaaattacatagtttgggtttttttggttttttgatttttgttttgactttcatctgagcctttgacttttaaaagatcattttgaccagtattatttttacaatgctgttaacatgctactgttttgcttgttttcctttttttctctctgtgaatcaaaggtattattaggctgttcttcctaaagaggaaattgtgataatgaagctggagagaaaaaatttgagccacaagcccttttgatgtgactgtttgactctcacttgctgtatgtattaatatggcataaacatataagttttgggggcatttgtcacctgggggatattgcaggattcatttaggagagagggtcaggagtcttgccaagacatctttgaaaaaggaaatctaggactgtacccaaaggagagtgaaacagtcactgttccattactgctttcagaagcctagttctgcagatgactgagtttgctctttctgggaggaacccaatacatcctagggaaagaatcatctaaagatggaatgaggaggaagggaaggaaatcagggaaaagagaagaagagaatccattcttatattcgagctacttttctctctctagaattgtgcaagtctttactagaatgctgacaaccaaacaagcatgcaacgattacttaaatgttgcactcattcttgcttagatgttgctgttagccagaagcccatgtctgaatctcataattgttctttcagaataaaggatatgatttaatatatagaggagagaaaccaactggacctgaacaatgggggtctaacactagtgtccaccagagcacatgggaatggcgtctagaggtcatgactacagtgacttttggaatatcactaagaccttgagaagcagcttaggcagacttcagaccctccaaggtaccaacaaaatatttttttcctctacagcaggtgcccataatcagaatccaaagaaccaatggcccctacataaaatttaggctgtctatgaacttgtatggggaaaaaataacatctccatttccaataacacccaactgaaatttagtataattaaattgccaatgtaggcaacaactatagaaaaaattagaaatcagatatttccatcaatatagagttgttacaaacatttcaagatattatttatgctcatccctattataaaataatggttataggtcgagcacagaggctcacgcctgtattcccagcactttgggaggctgaggcaggcggatcactcaaggtcaggagtttgagaccagcctggccaacatccttaacgggtaagagatttaccagatttcagatatctaattagactccctttctcaaactctcctctaagatagttgcctgatgagtagtaatccaggtaaaactccaaggcctgctctgatcctcttagctgcatattcttttttttttcttttttttttttcttttttagatggagttttgctgtttcacccaggctggagtgaagtggtgcgatctcggctcactgcaacctccgcccccaggttcaagtgattctcctgcctcagcctcccgagtagctgggattacatgtgtttgccaccatgcctggataatttttgtatttttagtagagacaaggtttcaccatgttggtcaggctggtcccgaactcttgacctcaggtgatccacctgcctcggcctcccaaagtgctaggattacaggtgtgagccaccgtgcctggccagctgtatattcttgtagagctcatgttaaagctaatgaaaacatctcatgttaaaaacataaaactaagaagaaagaacaacctaagggttttgaattggtgcgtaagctttctacacccagtaacttttgggtatgagtttagggcatttcggtccatgtctagttatcaatgtaaataaatcactgcaatttagacagcatcatggtcatcatccaaatcattttttcttcagaaagaagactatgtagttcactgagggggaaaaagctagatataaagtgaattcccattattggggaaatggttgaaataaattatggtataatgacaacatggaatactatttagtcattataacaatagattagaattaagctattgccttgaagatactaacttgaagtattcttggatgggaaagatattttgtaaaaaaaaaaaagtaataaaaacaatgacccaaatcctctatgtgaatattatcctgtgtacatgtatgtgtatatgttcatataagattgtaagaggatggagaaaactataaaatcatacatatttggctattaggttcttcttaggcagaggaaaggagaagaaatgaaggaatttatgcaaaaatgggaaataaaaacttcaattacaaataacatatatatcataatcacattcatacattatataaaagagaaaaatcaattccccatattgaaggaaatgaaaaagaagaaatcagagtgaataaataaggtaaaaacaattgaggagtaggaaataatcccagaacagcaaagtaagatcctccaaaaatctactcctccacaaaagcagtgaaaacactgggaaaaaaaactgtcaaagttaatttttttttactagagagcatctggaaagatggtgggataggaaacaccagcaatctgtctccccacctagacaacaattgcactggcagaatctgtctgatataactattttggaactctggattctattgaatgtttgaaagtttcagaggtgggacagagcagttaaaggaacagagtttttgtttgttattgaagttaaactggtataaattcaagttagagtgctataactttaagatgttaaatatgatgccaatggtaaccataaataaaatagctatcgaatatatatatatcctttgagattttatatatatatatatgacaaaggaaatgaaaaaggaatttaaacgtttcaatattaaaaaaaaaactaaacacaaaagaaggcagtaatccaggaaatgagggatgaaaaaaagctacaaggtatataaaaaacaaatagcaaaatgacagaagtaggtcttcatcagtaattactttaaatattaatggattaaattttttcaatcaaaagacagagattggcagaatgggttaaaaaaaccataatccaactatatgctgtctaccacagactcactttagattcaaagacacaaataggttgtaagtgaaaggatacataaaaatattccctgcaaataataaccaaaagaagagagtgggatgactcacttatgatggtttgacttttataatttttcaactttacaattgtgcaaaagtgacacacatttaatagaaactgtattttgagtactcatataaccattctgtttttcactttcagtaaggtgtacaataaaatacacgagctgtccaatatgttattataaaatagggtttgtattagatggtttgtccaactgtaggctaatgtaaatgttctgagcacatttaaggtgaaggctaagctaagctacaatgttctataggttcgatgtattaaatgtatttttgacttacaatagtttcaacttacaatgggtttataaggatataactccataataagttgaggagaatcagtatccacaaaataggctttaaatcaacaacggtggctgggcgcagtggctaactcctgtgatcccagcactttgggaggccaaggtcaggagatcaagaccatcctagccaacatggtgaaaccgtgtctctagtaaaaatacaaaaattagccaggcatggtggcatgcgcctgtagtcccagctactcaggaggctgaggcaggagaatcgcgtgaacctggaaggcagaggttgcagtgagccgagatcatgccactgcactccagcctgggcaacagagcaagactccatctcaaaaaaagaaaaataaatcaaaaatggttagaagaaataaagaaggacattttatattaataaaaggttcaatataaaaagaagatacaacaattgtaaatatttacacacctaatgacagaccgtcaaaatgtctgacgcaaaaaattgatagaactgaaagaaggccaggcgcagtggctcatgactgtaatctcagcacttcgggaggccaaggtgggcagatcacttgaggtcaggagttcaagaccagcctggccaacgtggcaaaaccctgtctctactaaaaatacaaaaattagccaggcatagtggcgtgtgcttgtaatcccagctactcaggagactgagtcaggagaatcgcctgaacccaggaggcgaaggttgcagtgaactgagatcgtgccactgcactccagcctgggcaacagagcaagactccatctcaagaaaaaaaaaaaaaaagaaagaaagaaaaaaagacaagaaacagacaaatctacaataatagttggagacttgaataccccactctcaataatggatagaacaactagactgaagacaagtaaggaaacagagaaataacacaattccacttctaggtataaacccaagagaaccagaaacgttttcacacaaaaacttgcacgtgaatattcacagaagcattattgataatagttttaaaaaatgtatatgcaatcctaatttccaacaatggatgactggataaagaaaatgtgatagagccatatgaaggaatattactcagcactaaaaagaaatgaaatactgacacatgctatatcacggatgcattctgaaaacatcatgcaaaataaaagaaggcagatacaaaggaccacatattgtctgttgctttttatataaaagtttcagaataagaaaatccatagagattgaaactagattagttttggccaggagctgagggaaaggggaaataagggacagggaatatgccttttttttttgcaatgatgagaatattctaaaattagatagtggtgatggtctgaaatagaagattcaggatccggttatcaaagatgtgataagagaacagaacactttaagctttcagcacatcaatttactctcttgtcactttaactcctcatcagagttactaggttattttattgtgttccatattatcttttacccaaaagatcttggttggcaaaagtttcccctttccttaaagttaaatatatatttaaatagttataaaatacataaggaaaaaatggtgaaaataaaaacccagatatagaatacaacctaaaaaaagtccttgctgaaacatagtatgaacattaactatgggccttttcctttttcacattataatttgttttcaaaatgtaactaatgttaactccagaagtaccagatgtcacataaagcttatttcactttcacaaaacctaactgtactacatagtgtaatatgggggtattctggttaaagctttacaaaatgcaggattctatgtcttggcatgacatgaagaacccccaagaaaaatgtcttagggaaagactatttcttggtattttcctacccaggatatttgggtagaatagaatgaatgtctggccattgtatttttggactgaagtatatttaaatagcttttacatatgccaggaattgaaaataacatcttaatttgagcataataaaagaggaggataaaaataaactctctgctcagtgttaatacagatctaagacattaaatgatattttaagtaaaactggtgaaataaacatcaagtcatagaagtgtgatcaggcacttctagcaaaagtgataaatcatatattaaaatttaaaatgactatagttcatttatttattcattcagctaatattttattacacattgactatacagcaataaaaacaacaacaaaataatctactctttcttctctcccagaacttaaaatttgtttaataatgttacggcaaagaaaacaataagattaaatgatgatgaaaaacttgaaagagcactgatcttggagtcctaagatctgaatcaaaatttcatgtctactaattactaggcaagtgatactggatacatcaactaatttctctaagcctcaaattcacaccgtgaaaaatggggtatgctactacctgtctggtgtatttcatcagttaattataaggatcacagagaaaatattcaaacattccctaaaaactctaaaagttctataatcacaggcttgcattattactgaaatgtatggaaagctatccaatttcttgcaataaataattttagttgatattaacagtatactgagagtctatgtggccagacaggaaagactaatgctaactgtcaagtacattaacaatataaaatgacacatatgctagggttttggcctttctccatttagccattctaatttgacctggatttcctctacatgtcaatttatgctcatattcacaagcaatgttccaatcataggaagagcaaatgagtcagacagacttctatcaaacttccaatctgagcaacaacagccacatgtttctttactcttcaggacatgtatttgtcaatcctgtttgaatcttaacaaataatggaactttcaaaataaagacaaatgcacttagtagaagaaaataacaattactgtaattgcaaccacattaacttgactgagtttttgtttaaattacttctgtacttctatgaaaaacactgttcttaagaataatgaagtgcttaagacatgactgaaaaataaaacctcacaattaaacccatgaggaaaataaatttaacttggcataattctggtttgcaaaaatactgtcaggtaatgaacccaaatccatatgaatcactggtaaacactatgcacaacaaacagttaatacctataggtgctctgtgaaacagtggaatccaaactgtctgtctcttttgggttggagaaatagaataatcctgcttttcctcaaacactggcaaacatatactatgatagctaaaagtcaacttaatccttcctttcctggctcaaaataaaaataaatacgccatctcagacttaagatgtgatatccctttgtgggttttcatgaaagagagagaaacacacaagaaaatgatcatggttggatgggctttgtgtaattttcaatcacataaccttgttttagaaagtagaaatgaagagccaagacaactatggagaaaattctggcagtggctgtactgtgctctgattattttttattagcattggttgtatcacacccaaagcttcttggcattttccatacaaatccactcccaccgagtattctgtattccggaagggcagtaactttatcaaaaggtagagtcacattccagagcatatcatctgtcacctctcaccaactcaccacgccccatgtccacactttctgtcttttctctctcccagctcttctggaataactaacaaatccttccctttgccctcatgcagaagagtttggcacatgccatttttctcaaggtgtgatttttttttttgtcattcaccaacatgtaaaataaattttacagccaataatagcaggtgaaaagggaagcaagatgaaaaaaggacacatgaatgtctcaaaaggaaatagggggctgggtgcagtggctcatgcctgtaatcccagcactttgggaggccgaggcgggtggatcatgaggttaggagttcaagaccagcctgactaacatggtgaaaccctgtctctactaaaaatacaaaaaattagccaggcatggtggcgcatgcctgtaatcccagctactcaggcggctgaggcaggagaatcacttgaacccaggaggcagagattgcagtgagctgagattgtgctactgcattccagactaggagacagagagactccatctcaaaaaaaaaaaaaaaaaaaaggtaaatagggggatagctcccattaaatcactcagcatcctgttattgaattggtcctcctgcaagggaccaaccacaaagtcagtgacttaacttacttattaactcaaaataagtaacttaaaacttcaaaaacttcaaagctgaagcgcaaactttcacagatgaaccactacaaaatcaatgccactatactggggcaagcagcataaattttcagacctcagaaatattgaatggcattgatacgttttcatttcttactcagtcctacctgaacatctgggctaatggcatttcatgtttaagaatagggcactcagcagggcgcggtggctcacgcctgtaatcctggcactttgggaggccgaggcgggcggatcacttgaggtcaggagttcgagaccagcctggccaatatggtgaaaccccatctctaccaaaactacagaaaaaaaaattagctgggcgtggtggcgggcgcctgtaatcccagccactcaagaggctgaggcaggagaattgcttaaacctgggaggcggaggttgcagtgaggtcagattgcaccactgcacttcagcctgggtgacaagagcaaaactccgcctgaaaaacaacaacaacaacaacaacaaacaaaatagggcactcagctacgcttaccaggaaactgagtggagattttcctgtgtgaccggcaagtgattgtgaactaaaagcattggttgccaaacttaaaaacctacctgtgggacattaaaagcctctagcatgtatcacctttggacttacttgtattcctgtgactttggtcccctgggagagaagcatccgtagtccaggctggaacgtgttggtcgggatgtgcagtagacaccacagtgctctggttataaattgtatttgtaagaataacatcggacccttggatttcaccatcagtgaccaaaggttcactcccatttgatttaaaatagaccttttgtaatgttcctgaaagacaaaaacaaacacaaaaaaaacctatctttgaaacattactagaagtgtttattttaaaaaacattaagaaaactctagagctactttccctatgtcattctaaccaggtaaacacaaagacgaagatgaaagccgtaatagtgacctccttcttggggtcaacaaccacaaaaccaagagtttctcttctaccacaaatcacacagccctgtgatgaaacatggctttctcaagagcttacggtttagaaactgggtctcctatcaaggtttcctggtgcttcaaaaatgtagggtaattctacctcacctgagactcaccacacaataaaatgtggtgaatcttacagcattctctttcacttccttagtttcttaatctcaccggtcattgtttgctactcaggacccaggacatgtgctctacctctctctgtatctgtcatcaaaggacacaatggtgcttgccatcagctttatatttcccacattttgcactaatgttcagtaaactatgcatcacacacaaataaaaaataagagggctcatacatttatcaaaacttgtatcataggaaccaaaaaaaaaaaaacctctaaagcacaaactaaaagaagaaactaaattatcttcatcttcgaccagaaaataaaaatgtaattatatgaaataagaaatactcatttaaaaaatttatttccataggttattggggaacaggtggtgtttggtaacgagtaagttccttagtggtgatttgtgagattttggtgcacccatgcaccatgcaaagtttggcacatgccatgagcagtatacactgcacctaacttgtagacttttaccccaactctctttccacactttccccgagtccccaaagttcattgtgtcattcttatgcctttgcatcctcatagcttagctcccacttatgagtgagaacatacgatgtttggttttccatactcattaaactaagattatcaactggccactttctcaaggtatccattcattgacaaaacaaagaaccaaacctaagattattgaaaaccaccttgctttgtctttaggaagaaacatttgaaaactttgaaagagatcgtgtatttttaactcagtcaaaatagacagcagattgtgtttccagaatatcgcactgtacttgagcatgccacgaaaataaatgaatgtgatattgacccatcgatagaaagagccaagggagattttcttttctaaaagcatttacagtgaatgctctaattggctctcacttttctaaatagtcccaaggaccattaaaaataaaagaaacataaataaaatgtttaatatcagtctatggaaacaatttctctacatatgcttgacacttggaaaacattaactacaaataaaaatagaaaagcagctgtttctagctaactgagatcaacagtttcctctgccaaaagattgtaaataaaacattgaagcataaaagctaaatcatgatcatgtaatgcgggtaacatgctctccaaaccatctgtgtgatcatgagtaaaagtcaaatgcagtaggtaaaatgaaggaattcatttaattgttattgattttcaaaatgatttagactttatcctaatcaaaataaatgtgataggtttaattactataggaaatgtatttcacacatacagaataattagtaattaatcaattacctatagttttccttacatccatttgttaattgctctcttccttgcttatttttggcataaagagattttttccataaggtgatatttatgctaatgtggttgtaatgaatatataggcccattaagttgatttacttatcttgctgaatctatgagtaggcatccagttctgtcaacatacttttagcaaatgccaattgttcacggttgtaccctggagtaattcccttaaaattagttccttctcatataaaatatttgaacacttgttcctaactttttggtaataattagccttattaataatctttcctttgtcattttaatatttcctttatcattttaaccaaacagtgtttaaagtgttcataacatctggctgggcacagagactcatgcctgtaatcccagcactttgggaggccgaggcaggtggatcacctgaggtcaggagttctagaccaccctgacccgcgtgaaaccccgtctctactaaaaatacaaaataaaattagctgggcatggtggcgggcacctgtaatctcagctactagggaggctgtggcaggagaattgtttgaacccggcaggcagaggttgcagtgagccgagtttgcaccattgcactccagccagggcaacaagagtgaaattctgtctcaaaaataaataaataaataaataaaaataaagtcttcataacatctgtttatcctaagaagtcctctgaaacattgacatttttaagaaaacactgacttggataacaactttcttttaaaaaggcagcttcattgctcttaagctttatgtattgaaagcaatttggcagaataaaaagaaagataatatttgagaggtactgtagttaatgtttttaaagtatattttgggggaagagaaacagaataaacttaaaggacatgtctttaaaagcctgaactcactggacaacttgttttcaagtatctctggaagctgaccaactcccaacacggttgtctactatgcattttcttttaagcacaagaattagaactcaataaaactaaatgctttcaacctgtatcatgatgagctataaaaatgctaagaggccgggcgcggtggctcacgcctgtaatcccagcactttgggaggctgaggcaggcgcatcatgaggtcaggaaatagagaccgtcctggctaacacagtgaaaccccgtctctactaaaaatacaaaaaaaattagccgggtgtggtggcgggcgcctgtagtcccagctactcgggaggctgaggcaggagaatggcatgaacccgggaggtggaggttgcagtgagctgagatcgcgccactgcactccagcctgggagacagagcgagactccgtctcaaaaaaataataataatactgctaagagatattagcccaaagtagagtatttattcttctaatactgcctcattcttttctacatttctatgtttattgtgctatggttaaaagtacaggtttaaatcccatctctaccacttgccctgaaactttggacaaagtcttaactgccataaaggaaggaaaaataaaatacctcttcatggggctggctgtggtgagacagccaagtaaaaatggctccccggcagaacccccgactggcctgcgcactgggaggagcgtgcactggggtggagcctcaggaggttcacaccgtttgcagaggtgaggagcctggcctctcctgttccggggtggtatttgggactcaacttgtgaggcaggaaactggctagcaggactgtcattttgctgagagtccctgtttcccttttttttccccttttagcccgataaattccagttttctcaccgttcaaagtgtctgtgagcctaatctttcatggctgtgtaacaagagcccagcttttaggtgaactaaggagaaagtcctacaacattgggatcaaatcagtcaatacctatataaacacttcgaatggcttttggcactaagttctccgtaactgttagtcattactacacattgatggtaatgacaataaaattgtcttctttaggactgctaaggtacttttagataaatatcaatttcattttactataagtggatcccagtgtcacaaaatggctaactttcagaagtgaatcacttaacccacatttggagtgagaaaactatggctttttcgtgctaaattattaatagaaagtcacattgtattaagatagtctggctcaaaagtgtttcagctctatagccaaaaaaaatgtaatgatatttaagaaatagtatataattctaataataataatagtcaaactttactgattccttgtaatgaagagattgggcactgtggtagacagaataatgctcccccagagatgccacatcccaattcctagaacctgtgaatattctgctttacatactttacgtggtaaaagggatgttgcagatgtgattgaagtaaaaattttgagatgaagagactatcctggattattcaggtgagcccaatgtaatcacaagggtctttataagcagaagagggagataagagagtatgtgtcagggtcatgaactgtgagaaaaactcaatggaccattgcttgttttgaagatggaaagagccacaagccaaggaatgcaggaagccctagaagctagaaaaagcaagagaatagattgtcccatagagtctgcagaaggaacacctaaattttgcccagtgagacctattttgaacttcttaactctaagataataaatttgtactatctttttaagctaccaagtttgtggtaatttgttacaggagcaataaaaaattaatacaagcaccttgctaagttccctcactataggcatcaactgagttaaccttccaataatcctataaaacagataatataattaatcgtttgacagagttttagagagatggaaactgaagtttatgagagtgaattagcttgctcaagatttgagttgggacatggcaaatagacatatacatatacacacacttttcattctggacaaaacatacaggttttaaaagtcaaccattatgtgcttgcagaatttatcttcctataatgtgattttaaaattaatttcttagctttgtatctttagccatgtgaaacacatttactttgcattttctatgtgccaagaacttcatacttactctgctgagaacacaatatttagtaagaggtccttactatcaagatgtttatagattagttgagggagacgggcaggcaatctaaaaaatattaatataaactatggtacaagtgctttgagaatgatatgcctaggacaatctggtagcaaaaagtagagagatagtcctcattccatttgaaaaagtcaggaaagcctgtttagagacgagtatcctaaatgtgaatcttaaaagatgattagggattttctaggtttaagcaaagtatttgtggggaggagagtggcgtggcaagaggaagtgaaacattttctagataaagccaagggaaaaacatatgaaaaggcccagcagcaagtaatttaaaaacatggctagtacacaggagcctggtaagagaaaagactgaaaagggaagagacaccagacaggataggtcttgtacaaggcttggaatttaccttgtgatagaaaattttagaaaggtcttaaatagggtgaaacatattagaatgatcactttggcagcagggtgacgtttaaaagtttagagggtagttagaaggctattgtaatactccaagtgagaaaagagtaaggccttagccaacgcaaaaaccctatggacaaagggaacattaggagaaagctccaaagatgcaaaatcatatgaacatgagagaaaggtcccttcgaggtctctggtttgaataatgtagtaaacaaacatatccccaactgaattggtgtcatatcgttagtgttgttcatcaaatatttccagttctctctccttctactggggcataagctgagcattgcattctctggcctcttgagtgaggccttgcttcaagttcaaggctataagcaaaactaaaaagtgttgcttctaggcagaagcatttaattgctgatgtaagagccttcagagctctgacacaatcatcacaaaggctcaagatggtggctagttcatcaatttggaccctgaaggacctcgatgagcacaggccccctgccatcttgcaaaggacatgtagtattgtaataaattaactattgttgtttgtaaatcaccagtattgggggatttgctgttgttacatgacagagtctagccaatcttgactaaaacaatagataacagagaatgaaaaatagatttgtagaagcctgttgttgttgttgttgttgttgttacactttattgaatataaagggcctgtgaaacattcaggggggaaaaagcccaaatctgaagcaatctgatgatttcctccagatgcctcaccagactcccccacaatgctgtccctcctttgtgttcccagagcacgcactggttatattgtagcacatatgcactcaagtggaactgtctgtcccatgcatctatacatcaatccccgagcagaacacctagcaccagtgtagggctccataaatattcgttgaacgtatgaatgatgaatggactaatggaaatggctgatattgccaagaggggtatcagtgtaaagtgagaagacagctgaggacagacagctctttttaatgccatttaatggacagttaaagaaaggttagcttaaggaaaatgagaaacagcaggcagagatactgaaggataatcagaggtgacaatatgaaggcatagttgaagagcataatgagatgaaagtagtactcaacactgaggaagatcatatgcgcatagcacatctggggagaagaaagcattgctggcaccaactaacaatgaacattcttaccatgaattgatgtacacagacacagagagaaacataggttcttcatttcaaagtctcgttcaaatacacattggtttccaatgcagcacattggataaaaagacactggtgggcttgctaagtacagatataggagtatgaaaagaagtgaaagagatgatcagaaggggactgatagaggtataggaatcatctggggtggttcttgttagaattcaaattcagcaggtttggagtggggactgagattctggattctgcattttacacaaacttccaagtgatgctgatgctgctcgtccatgggccacacttgagaacaaggctttagactaccatttcaaaaagctttagacataacatataacctcgggcctcagtagttaaagaaaaaaaattgtcatgcttgagaatcctccgctggtgaatctgcaacagaaagccagatttattcaaagaatttgaagtcttaagtaatgtggagtcaggtcatgaaagatcatagagaatcttaaattttgggtgtgaagaaacaagaatttgggaggttttctatttttaagtgatactaagaatacattataagttaggaagttaagattcttttaactccaaattcttgtaaaagccacaaactgctgagaaatttgctaagagaaaactgtatttaaattcaatgatctccagttcatctagcatttttgaggagaaaggtcatttctgaagagaaatatttttatcgaattcaagaaaaatgaatggtttattaaactttctatagtctacataccactataatttttcttttttcctcatttactcaaaaaattaagaagccacacatacattttccatcatattaagaaaactagaaatgtaattttaagctagttttcataagcttatggctaaaataaatttgttttagatatatatggatgagtgaataagcagatgaatatttaaaaccaagtcttcgacaggctgagaaagaaaaagtcaggagaattctaatgagaatttttgggaacataacttgggtgaataaattgagatgaagaatagtttgaaaaaactaattcagaccataccccannnnnnnnnnnnnnnnnnnncatacatttataggactccctgccacatactcagctgtaaccctttctccatacagctgccaatgacaccttttaaagctgaaacgctttctccatacagctgccaatgacaccttttaaaagtcccaaccaagataatcatttccaagaccttgaaagagcttttttttccgatgttttcttctaggagttttatggtttccagttttatgttttagtctttaatccattttgacttgattttggtatgatggtataagataagggtcccatttcatccttttggatgtggatatgcaattttcctaacaccatttgtcaaagagagtattctttccccctcgtgtactcttcacacctttgttgaagatccaatgaccatatacatgtggatttatttctgggctctatattctgttccattggtctatatgtctgtttctattctagtgctatactgctttgattgctgtagcctcataatatagtttgaaatcagcacatttgatgcctctatctttgtcgtttctgctcaaaatcgctttgggtatttgggatcttttgtggctccaaatgaattttaggattgttttatctgaaaaatgccactgggatttagctagggactgcattgaatctatagatcactctgggtagtatggacattttaacaatattaattcctccagtcaatgaatattaaatgtcttttcatttatttgtgtctgatttaatttcttttatcagcattttatagttttcagtgtaaaaatatttcccttccttagttatgtttattcccaagtacttattcttgttaatcctattaacaaggatttcttagacatgacataaaaagcactggcaacaaagaaaaaaaaaagaccagcagtgttacatcaaactgaaaactttgcacagcaaaacaatcaacagaggttgagtggacctaaaaaatgagagaaattatttgtaaaccacatatttgatcaagagttaatattcaaaatatgtaaaaataagaaactcacaaatcaatagcaaaaaaaaaggtaacctgatttttttaacaggcaacggatctgaatagacatttctccaaagaagacacatacgcagagccagtagccagtaagtatatgagatggtgctcaaatcactagtcattagcgaaatgcaaatcaaaatgataaagagatgtcacatcatggttgttatgatggctattaccaaaaacaaaagataacagatgttggtgataatgtgaagaaattgaaacccttgtacactgttagtaggaatgtaaattgatgcagccactatggaaaacagaatggaaggtccttcaaaaaaattaaaaatagaactatcgcatgatccagcaatcccacttctgggtatacatccaaaaaattgaaatcaggatctcctatctgcactcccatgttccgtgcagcattattcacaatagccaagacatggaagcagcctaaatgtccactgatagatgaataaattttaaaaatgtggcatacacacaatggtatatcatttggccttaaaaaagaagaaaatcttatcacttgtggcaacatggatgaacctgggggccattatgctaaggacaaatactacatgatcacactcatatgagaaatctaaaatagattcatagaagcagaaagcagaatggcgattgccagaggggaagaggaaataaggcgatatccaagggtataaagtttcagtaatataagataaataagttctagagatgactatacaacatagtgactatggttaatacttctttgggtacttaaacatttgttaaaagggcagatcttatgcaaaatgttcttatcatggaaaaaaataataaagatgtgaggaaacttttggaggtgatggatatgtttattgcagaaattgtggtgatgatttcacaggtatatacttgtttccaaactcatcaagttgtgatacattaaatatgtgcagctttttgtatgccaatcatacctcattaaaagggcttaatgaatgaataaataaacaaataaataaataaatgctacaaccagaccctgtcactctcttatatcaacatccttattgtggatttcatgtttaaagtactacttactccctagggaatcttccctcatctcagcccagtttctgtccctgtcgtaagttctcttagcaccttgtctcttcccacatagcagtaaactctgttgtaattacttaatgaagtgatcatttgtttcatgccttcttccctcactgtggagtccctgagggtaggctttattcactgctgtccccaatacctatagcacactgtgttgcatataacagacactcaatacatatttgttaaaggggtgaatagtattacattatagctaattttgtttcttttaaatgtttctcaacatatcaaaataattttactttaaatgttgcatgatgatgtatatttataatatataatataatatataattataatacataatattgtgaatttataatatagtaaataattatatatgtatatgtaaaatttgaggaaggtatcagttcaatctcaaagtactctatggcataaagtgacacttgttgtcacatgaaggcagcacaaaccattgcaggtttagttcttataagaaagaaattagtctctgaaagtaaatctcaggcctaagaataaaaggcctgtcaaacttgccatcacgttacaaatccaactgttggtcaactttatttcttcctagctacttttaggcaattcaaatatcttgcagcaacagcctgattctagggctatggggttatggatcatggggttactatgacaacaggtcatagcacaaaggttttaattcttatggacagagttaatgtgagacaaaatgcatgtttagttaattgttacttgggtataatatgactatttattaaaataattatctgatgataattattcataatcaaataaaacaaattctttactactataatgaacttatcacttataaaaacactttcacaaacatttcatttgacttccataacaattctgtgatacaaaaaagaattatctcatgtagaaaataaagcatcttacctaaactcccatgtctagtaaatggaagagtaaaaccctaaagccagactttctagtgccaagttgcatgctctttcttctttgtcatatggaccatcagtatcagactataactaatgaaataaaaatctacatataatttaactttcttatttttcaatttctctttgaagaacctgagtccttgttttagagtccaaatctttggaaccatatggacaactcagactatctgccgagttgagaaatacaaaactaaacaacctttgtagctctagcttcagtttagtggttgggttgaaaaacaatttactactgctttcttctatagcctgctgctaatacaattatttgacaacccacctctcgtatcttcagaaatcgttttaccatcttgactttttgcatgagggaaaccacaacagacaaaattagagacacgtagtacatctgtgtttgttagcataaggcttttatcttttctaatcaataatcttctcattattatctccttggcttttgaagctagagctcctgttatttatacaccactgatatctcagcatcccttagcaaccctaatgtacacagaaataactacaaaactttgtatgagcacaaagttataaactcaaaccaaacagagcattttttaaagtaagcaatttaatgaggtttttaaaacaaagatataaaatgcttgtattgctcattacaacaacaaacatctcagttacaaaataaggaatatttatttggacagatattacttcaatatggctatattaaatcatctggtacagaatttattaaaagaatgtttttaatttttttctcttttttataaatttcaacttttattttggattcaggtacatgtgcaagttgtaacatgtgtatattatgtgatgctgaggattgggatacaaatgatcccatcacccaagtaatgagcatagtagccaacagtttttcaacccttgccctcctccatagtccccagttgtctattgttcccatctttatgaccatgagactctagtagtagactctagtagtccccagtgtctattgttcccatctttatgaccatgagcactcaatgtttagctccttcttataagtgagaacatgtggtatttggttctctgttcctgtgataatttgcttaagctaatggcctcccgctacatccattttgctgcaaaggacatgatttcattcttttttatggctgcatagtatcccatggggtgtgtgtgtgtgtgtgtgtgtgtgtgtgtgtgtgtgtgtatgtctcccatgttttctttatccaatctaccactgatggacacctaggctgaatccgtgtctttgttattgtgaatagtgctgccatgaatatatgagtgtgtgtgtctttttggtggaatgatttattttcttttggctatatccccagtgatgagactgctgggtcaaatggtagttccatttgaagttctttgagaaatctcaaaagttttttccacagtgactgaagtaatttacatttccaccaacagcataccttttctcaacagcacctgttgttttttgactttttcgtaatagccattctgattggtgtgagatggtatctcactgtggttttgatttgtatctctctgatgattagtgatgttgagcattttttcatatgtttgttggacacttgtatgtttattttgagaagcatctgttcatgtattttgcccactttataatgaggttatttgttttctgcatcttgaattgttaaaagaatgattttgaagatgcgtgggaaaacccccacttcctaaagtttgcctacatataaacaaaatagcatataggagcagttacataagtgacacaaaattccactcttggtatatacccaagagaagtgaaaatgtatgtccccacaaaaacatacacacaaatattcataacaggattatagataatagccaaaaggtggaaataacccaaatgtctatcaattgacaaatggataaactatggtatatccatacaatgaaatattgttcagccattaaaaggaatgaagtattaatatgtgctacaatgtgagtaaaccttaaaaacatatgctaagggaaagaagccagtcacaaaataccacatatggtcatacagaatgtctagaataggtacatctacagtgaaagaaaatagattagtggctgcttggggctaggggtgaggagatggggagagattgcgtggtagctaaagggtacagagttttgttttgagatgacaaaaatgtcctaaaacagactgcagtgatggttacattatctatgaatatactaaaaactactgaattgtagactttaaatggttggattgaatggtatattatattaataagaataaattattaattaactaataattaattaattaaattaataagaataacccacttaaagcaaagcattcctcctttgccctctcctcagaggcctctaagcacagacgtacttaaatgtacttacattttatattagcattagaccctgagaatgaaaggaagtgttcctcaaagcatgtgagccaatgaacatagtctcatgacagactttttaaaatgacagtggtatagctgaggaagctcctaccagacagatctgtccagggataataactataaactctggacaaaacacaaaaagacaactactgaagggcrctggagagggaggagaagcaggccaggtctggaagggtgttgactcttaagaagagagtggcagagacgagtttcaggacggtttactgtcttagcctgagagcaggccacagttgacaccacagagcaagaagcgactaaatctcccacagaaaaccctcagtcttcctgggctggggcactcgttctgtcttcctcttacttggtcaccctctgacctctggcatctgtgaaagccagcatttctgggttcctttccttctctgactattcttcctgtatctctttttccctcctgtttgtcttccccttaaacactagcatcctccagagcattgccctcagcttctgcttaatgcattttctcttcagagttcatcgactcctgctgcttcaactgccactgagactgccgcatgcatggcagacctcccttctcaacctccctcctggatcccctagcttcagtcctatgccaatgacttggaagttaaattttaaagtcagtgctgctctgtcacagaagccaaacatcatatttggtcacaatttctcttgaaactccttaggaaagcaacatgttggatttctcatttttctccatttcttgacctgctttcactgttgaattcaactatgattccattgtatttggttgtcccataagtatctctaatacacaaatcaaccttccaatctttatttcatctgcctgtatcagactcctgcacctttacttcctatgttaacaggtagtatcaaaactaacctggttagatacaggaggcagagcaagaggcctgatagaagtctatagcattggtcccccaccccaaaggaacagcaaattttaacaattaactacacacaaaaggcactaatacaagaatcaaaaatcaggtgagcaatcacaatacctggttttaacttcatatcactgaagaagacagtaaagagggcaagaaagatagtcttgaatgctgacaccatcctctcccatcccccagcagtagccatgcagcttggagaatgtgggcacttgggagagggagagtgcagcaattatgaggctttgcattgagctcagtgctgccctgtcacagcagaaagcagagggaacatttggacaggcccaggccaaagggtaattgcccatcccagtggtgagagcttgagttccagcgagcctcaccactgcaggctggaatgctctgggactttaaatgaacttgagggacagcctaggccacaaggactgcaattcctaggcaagccctagtgctgagctgggttcagagccggtggactgggagacacatgacctactgagacacaagctaggtggctaagggagtgcttgtgccacctctccttcatcctccagcagtgggtgtgtggcatggagaaatcggtgtgcttggtaaagggagagcacagcaactgggggactttacattgaactcagtgctgatctgtcacagcagagacctggcaggagtcagcacttgctgaccaaagagccccatggccctgaatacccaacagcaatacccagagccttgggctctgagatgtgctggcttcagatgtgacctcgcacattcctagctgtggtggctatggtgaaagactctttctattaaaagcaggggaaaaaagtaaaggggactctctctggcacctgaggtgactgcttggcctcggtggggtagggcaccaaccaggctcttagggtccctgagtctaggcctaggctcttggttagcatttctggacctgccctgggccagagaggagtccactgtcctgaagagtgagtcccaggcctggaagcatgcatcattaaccaactgaagggcctttgggctctaagtgaacatcagtggtggcctggcaaaagcccccatgggttggtggttgtggtggccacagggagagactccttggccaatggaaatgggagggaagagtgggaaggactttgtcttgtggttcgagtaccagcttagctgcagtagaatagaacaccagctaaagttctaaggttttttacttcaatccgtggctccaagacagcatctctggacccacctgaggcctgggggagctcactgccctgaagagagggacacaaacctggctggctttgccacctgctgattgtagactctaaagctttgagtgaacttaggtggtagccaagtagtggttatagcaggccttgggtaagactcagtgttgtgctggcttcaagtctcaactagcacagtcccagtggtagtggccatggggatgttgtgttcctgccccagttccagaaggctcagcacagggagagagagagactctgtttgtttgggagaaagtaaggaaaaagaacgagagtctcggcctggcaattcagagaattcttccagactttaaccaggaccaccaaggcagtacctttctctagaagtcttcaagaattgcagcattatagggtcgcaggcccaagtcccttagaagacctgaaacaccttcccaagaaaaatggacacaaatgggcccagactttaaattaatgtaactgaagtagtgaaagatctttataatgaaaactaaaaactgatgaaaaaaactgaagaggacaccaaaaaatggcaagatatttgatgttcatggattggaagaatcaatattgttaacatttccatagtactcaaagcaatctgcagattccatgcaatccctatccaaataccaaagacattcttcatagaaatagaaaaaacaattctaaaatttatatggaaccacaaaagacccagtatagcccaagctatcctatgcaaaaagaatgaaactggaagaatcacattacctgacttcaaataatactacagagctatagtaaacaaaacagcatgatactggcatacaaacagacacacagactgatggaacagaatagagaacccagaaacaaattcacacacctacatagacctcattttcaataaagatgccaagaacatacattgcggaaagaacagtctcttcaataaattgtgcttaaaaaactggatatccacatgcagaagaataaaactagactgctatctctcgctatattcaaaaatcaaatcaaaatggattaaagacttaaatataagacttcaaactatgaaaatgctaaaagaaaacattggggaaactttaggacattggtctgagcaaaaatttcttgagtcataccacacaagcacaggcaaccaaagcaaaaatgaacagctgggatcccatcaagttacaaagctcctgcacagcaaaggaaacagtcaacaaagtgaagagacaacccacagaatgrgagaaaatattttcaaactacccatctgacaagagattcataatcagaatttataaggagctcaaacaactttcttttaaaaaatcgaataatcccacttaaaaatgggcaaaagatttgaatagacatttttcaaaataaggcatacaaatggcaaataagcatatgaaaaggggctcaacatcactgaccatcagagaaatgcaaatcaaaactacaatgagatattacctcaccccagctaaaatggtttatatccaaaagacaggcaataacaaatgctggtaaggatatggagaaaagggaagcattgtacactgttgatgggaatgtaaattagtacaaccactataaagaacagtttggacattcctcaaaaaaactaaaattgagctatcatataatccagcaatcccactgctgggtatatgcccaaaagaaaggaaatctgtacatcaaatagatatctgcatttccatgtttgttgcagcactgatcacactcgtcaatatttggaagcaacctaaatgtccatcaacagatgattggataaagaaaatatggtgcatatatacaatggagtactatgcagccataaaaaggattagatactgtcattttgcaacaaaatgaatggaactggaggttattatgttaaatgaaataagtcagacatagaaagacaaacttcacatgttctcacttattttaggggctaaaaatcaaaacaattgaactcatggagacagagaatagatggatggttatcagaggctgaggctgggaaggatggtggggggtggggagggggggggttgttaatgggtacaaaaattatgtatagttagaaagaatgaataagatattatttgattgcacaacaggatgactatagtaaatagaagtttaattgtacatttaaaaataatagagtataattggattataaaaatataagatttttgggaggccgagacgggtggatcacgcggtcaggagatcgagaccatcctgactaacacagtgaaaccctgtttctactaaaaatacaaaagaatagccgggcgtggtggcgggcgcctgtagtcccagctacttggtaggctgaggcaggagaatggcgtgaacccaggaggcagagcttgcagtgagccgagatcgcgccactgcactccagcctgggcaacacagcgagactccatctcaaaaaaaaawaawaataataataataataataataatagagtataattggattataaaaaaaatagagtataattggattattgtgacaaagtataaatgcttgaggggatggaaagcccatttttcatgatgtggttattgcttattacatgcctgtaggaaagtatgtaacatacctcataaatatatacacccactatgtacccacaaacattttttttaaaaaacctggttacccaagccagaaatccaggagtcagccttgactcctctctccctcacaccaaaatccaatcagtcttgatttctgttgattttaatgcatccaatgccttatttcaaacactcatcaccttttacttagaccagagtcagagccccgaactggtctccctctgccttcatttctttctgcctccagtactctgtagtgtatccagttctaccgccttttgcaaatgtaaaataatcagagttctcctttcttggaaagatcctccagtggtaatccaccacccatagcagtgttttgtaatcatttttatagcagatcaatgttattttcaaataaatatcataaaaagcctaatatctattaatagatatgagctgaattttattgtggttaacttactttataagatctaagtgtgtaacttctataaaccagtaagaaaataatagggaggtttggcaaaacttaaaaattcaaaatcattggcaatgcaattagatcagcatcgtcttgatatttatttctctgttttatttgattgcacatattttttgaaatcctgattcatatcattaggtagccaccagtgataatagtttattgctttttccaaaaagttcacttttcaaactttaagtatcattcacttagaaaaagatagcaagatgcaactaatgagctaactaatgagttaacctgtcagcacatattacttggtttctggtttttacttggttaaaaatgtggtatgtaatatttagtttgagtgtgtttttaagatttttttttttaatgaaagtcaaagcaaacatttgtgcaatccttaagtctcctccttagaaccttgttaccatggaatagagtttgaaaaccagtgatctaaaagctaaagcccaaattccttagtatttagtatgaaaatgtaagatgctgtttaatttggactttattgatctagctgcatttcccaccactgccaaattttcacccagttttctaaatctatgttcatctttcaaggggttatagttttgcagtagttattttctctgccaaatgtgactcctgaactactgtcttctaacctaaatttctattaacttaattccgaagttaacacattaactctccatgatgctttctttgaatgtgcccatgggaccttgtctatacacttctatcttaaacacrtgttgccttgtgtgataatcatcacttcctctcaactgtgagctcctaagaaaggactaatttaaccatcctggagttctcaggaactttcaaaatgcctgcaacctagtaatcattccttaaatgttttaaattcataaactcattcattaatattaataataataaccagtagagtggttacagtagctgaaactgcagatttgcataacgtcatcaaaagataatcctctcattgactgacactttgggttaaataagtactaagtagaaatcactcttctagatcatgctaattttcactttaacttcatttttatttaataatggcctcacccaccaacataggaaagcaggatcaccagcaagagaacgagagcacagatacatggaatcaggaccagcaataggaaccggaggaggttagcagtcgccagcttctgagagcagccattgcccatgttattgtcatcagctctcaagacctaaagtaaaagaggaaaatgcaacatggttttagttttacaatacatggtatgaaattttaggttacagctatccatttagaacagcacattccaaaaagattttacagtttgtggtttagggtatgaaatgagcttagtcaacaaatcatgccaataaaggaacagataactgtacatctacattcagggaagagcaaactatctatttctgaaacatttttcggaagtacataggcttttaacaatatcccattttgcttttttaaaacatatttgtcaatttggtatgattccaaagggctatgaatgaccatggcaaaaccttaccctggcccaaagctatgacagaagtgaaggctgcctaatacagtgataaaaaattggtaagtaggtgtagacagaatattatccagacttcattcttttttgtctcattagtctaaaccaaatgtgaatgaatctggataaaataagtttttggccattaataattcagccaggctcactgttactgaccatgcatttagtgacaagttgaaatataaggaggagcctgcctgattgccaattaaacgctaacaactctgaggacatcctcggctgcccatgctacccctgcagcccatcctgtgtgagaggatgtcaaagtgcaacaacgacggttcagataaagttcttgtcttcaaatgcttcaaattttgcttagttcaatctcttgccagaaatgatatctggaaattcatttattacagatggctagcttaaagcagtgacttcaaaaaaacatctgagatggtactaaaagggctttgaataactacaagaaactctccgagtctccttaatgaaggcatttctcatgattctctcttggacttctgactgcattttctcctctgacagtttcagaacttgaactataacctcagtgtaactacctcctgaatctctcttgcatcctgtactcctttcagagttacactacatatttccaatgcctggtgggtagcagcgtctctttttaacaagtccaaaattaagacgaaccttctctctctctatcttcaaactagttcttctcctgactttcatatttatgtttacagaaattcctccattccaatatggggagtggagtccaaagactccccatttcatcatccccctatgccgtacatcaccaggttttgttggttcttcctcttaataaataccaaactttttttaaaaaaatgaatgacctttgagaaagagccttataataatcaagaagttgttctaacacaatggccctgtaatattctcaggacttcctgacgagtatttgattatttcccgtggatgcaaaggcaattttgaagggttcttctgaattgcaaggcatatgtgattcccatttctgctttattctctctataagggaatataggttcactaacccatattgcaagcagtgttcactacataatatgatgacaccttctgtaattttaagaattctccatgagagacattatttgaagtaacttgtgttgttaacttgagaagaacttcatttcctaggttaatgtcttactgatccattgtacctggattaagctaccagccaatgtgttataatttatagttaatttacaactgatcttcaagaagacaattgatcttcaagaagataagtgtacaacacttacctacaaaaaaatcaatcaataaataaaagtgtgggactacaggccaacaaagttagtggcagaaacaagttgatacttgtttattttacttagttattgaatacctactaattataataatagtgatggatacgacaatgacttcaaaccactgtctctcaaaagctcacagtcttgtaggagagatgaaatgtacatgactatattgcaaggtagcaaatgataagcaccatgacacttatagctaaagtgatataagaattcaaaagatagaaatacgatttcttgctggaagatcacgtaagacattgtagagagagcaaccctgaatcagccataattctgagaaaagtacccctgaacaagtctgttacgagttaaaaaaagttgcaaagtatttaacttctacaacagtgaagaagcttccttgctaaggtgatcacagaagcattataggaataaccttggctcattgccatctggactcctggagccagatacatctcatttagcatttataagtaaagagtcagtggagaaaatgctagaggcccattttaatatgtcatctaagtagatatcaagtactggacctccaaaaacaatattcatgattagaccaaatattttcttcagtgacaagagaattgattgcttttttttttttttttttttttttttgagatagagtctcgttctgttgcccaggctggagtgcagtggcacaatcttggctcactgcaacctccgccttccaggttcatgcgattctcctacctcagcctcctgaatagctgagattataggcacacaccaccactcccggctaattttttgtgcatttttaatagagacagagtttcactatgttggccagactggtctcgaactcctgaccccgtgatccacccgcctcggcctcctaaagtgctgggatcacaggtgtaagccaccacgcccagccagagaattgattgcttttttcaaagggagaggaggaagaaataggtaggagaaattcaatacttcaacactttcttcttgaataacttgcataactttcctcttgcactcatggccacttaggactgttgcaaatgctacattatgcacaggcccttggaggttcctctgaacacaaggcaactctcagacttcactgttgagtaaatgccaggtgaaataaacaaccagaatcatccttaagctttgtttcaatggactctaaacaatcctcccttcaaatggcatccctcttccacaagcaccttcctcagccttgaaactaagctgagcacaggcacagcattccatggcaagggtagggaacgatgcatctgattggacctgcacatatttgtaaagcatgtcattcttttgtgttttgtttgttgttgtttttatttttggttttggttttgggcttttgtttgtttgtttgtttttggtgttttgttttgttttgagacagggtctcactctgtcgcccaggctggagtgcagtggcatgatctcggctcattgcaacctctgcctcctgggctcaagtgattctcctgcctcagtcttctgagtgactgggacaacaggtatgcaccaaacatcacgcccagctaatttttttgtagagacaggatttcaccatggtgctctggctgatctcaaacttctgggctcaagtgatccacccacctcaagcttccaaatgttcttatgttttactaatcttgttactgaaaatgtgtttcttctatcttaagaactacatttattttaaaaactgtcatgttgttttatataatgtacactggcacagtgtaccattgtaccacaagtgtatgctatcttggtatcatttgagaggtcaaaatttcagatagccagttcctccttcttgaagcactttcttcctttggcttctctttctcctacctctctggtcattccttctctttctgtaggctcaattctcacattcactcgctccccaggcaatgtcacccacacatttaacttcaattagcagccctccataggtgactcgcatctttaaataacaaccatagatctttcctctgatctccagaggaagattgcattatatgcaactgaccacttgacatctcctcattggaggttgtaaaagtagctcaaactcaacaagtctggaaccaaataaacaattttcatccccatatctggtattcttccagggtttgtgatctcaaaaaaggtaattgcacaactatcatgtgtcaggcattgtttgggcacttgggatatattaatatgcaaaacgaaactctctagtctcatagatgctacattatagtaaaaataaacatatctctcctgaaatactgcaaatacctcctcctatctggtttacctatatttatccatgcactccctaacctgttctccacactatagccagagtaagaaagaggctgtattatctttgcatgatgagaaaaaacaacgtgaaaaatgaccccaaagctgaactaattcaagaatgcagagcctggaaccagagctgatcatgagaaccatgcacccagaggttctggggagggctttggatttacattagggtgtacgaggttttgagtccattttatcaagtttgcaaaggtcaaggagattatagttgacatttcaagtacataagtctttaccctcttttaccttcaggcagcatttgactttgtcaacacatggtgcattcctgagggcacatccacatctgcgaatggcagacaatatttgagagcttgtttggaggttctagctggggggtgcacctacttgaatacccctgaccaaaggtgagtcctcatctatcagggatggttgtcctttcaaatattcctgcctcctaaagtgctgagatcacaggcttgagccaccgcgcccagccgaggattattttctaattggttggattaccttttgggataaattttacatcttaaatatatagaacagggatcagaaaactagtctatggaccaaactcagcacacctagtatttttgtacatacagttttattggatacagccatgttcatttgtttatattctgtctatactgctctgctgctactacaacaacattgagtagttgcaacagagatcatatggtactcaaagcctaaaatctttactatctgatactttatagaaaaagtatgtgagcccctgatgtagtgtatcagtgtatatctgcatatatgtgtatttttaaatttgcatgtttaatttgataatcaaactaaaatataaattcttttaagaaaattgtattttaatctcttcatcagggcttttaatgaaatatgatataattgtacagggggtaaattagcagacaaaactatttgttgctgtagtgcaaagttactccagaaaaggttgaaagataaaaataatcttcaaagtagaaaaaaaattatcaacactatatatgtggctgggcacaatggctcatacctataacaccagcactttgggaggctgaggcaggaggattatttgagcccaggagttcaaggtcaaactggacaatatagtgagacctcattctctacaaaaagaaaaaaaattaatgttagccaagcatggtggttgttgcctgtagtcccagctacttaggaagctgaggtgggaggactgcttgaacccatgagactgaggttgcagtgagccaagatcgtaccactgcactgcagcctgggagacagaacgagaccctgggtccaataaataaataaataaatactatatgcactacattaggagaaaggaaagcactagtttcagaaacattcaagctgaaagagtaccacaacatgcatcatagactataggaaccaacaaatactcataagattttagagctagaaagtacaaatttattcctgcttctttaaaaacacaatcatagcagaagtcataccaattcagtctatttcttgctatatatgcaaatattgcccttttctcatcagtgaatgctctgtatctagaacagtacctgaacacggtcaggagttagtggataaacacttactgaataaatgaattaattaaatttcctaaataaaaattactttgtacataattatgcaaataactacttcttacagagtctattcctaaatcatccaaaaatccttcaagtagaaaatgtatttggcaagaagtaaaaatataaataataaccacaattgcatactaatatgatgtgtacacctgttgactaccgcacaactccttacaccttggaatcagatcagacaccaccacccctcattgcctgctccacatggattctttcatagcacaacttttgcatagcaaccgccaagaacccagctttgtsgagacaggacaatatcaaaaggaatatagcacaatctaatgttgaaactgtgagctacctcaagctagtatttcatgtgatgaccaataaatgtcaagtatcgctgcatttgcctcaaaaactaaaaatatccagcaaagtcccttgagtcactgcagcaacctggaatacaacagcacacagtttggaaaccatagtccaagtccttgcttatttatttctcccaatacctaatttaaaaacaaacaaaacaaaacctatcccttgaccattccaaggttttgccaaacatatgctgtctttagctctgaaagcaataatatgcactcagagaaattgtctacaaagagattaacatcagcctgctatttcttaaggtacagcatcagacatagagatatgttgatatttttattttaaacaagatttgtttaattgccatcaaagatcaggcaaacttgaggcagaatttaaactgtttctgataagcagaatattttgaaatgtgaagattaattctgtctgcctaatgtgacattataccatggattttattaaataccaaaattattcttaccaaaattaaataccaaaatgttcttaaataaactatgtagacttagttaatacatgatggttagtcaacacagtctgtgaactttatttagatgtacaaacagtacttgctagaggttatcctaattcatatgccaatctggtggatttagctaaaattctatttattgtttgaagtttctgatattaccaagccaaaatgtcaaactgttctcaaaccaaaatgagaatgttcattttaatagatgggattgtatgcaaaattatggcagaattcaatgaccatttgtcttatcacaaaatatttgcttacaatgttaaaaacaaacaactaaaaagaaaaaaatcatccaaaatcaacactatgtattggcttgagacaaatttagtaccttaattctttaggtaggaagatgataaactgcaaatatactcttccatttcagcaaagcaaggaccagcctcaaggataataaagtgactcctactggtgtgtcctaaacaggacacagaagctccctctaaacactgtgggggcattacagtgtcacatattaatatactcacgaatctaaagaaatgcagacactgagactctacttgcggctagatattcaacttggaactttgtcctgcacaatcattatgccaaaatgtgatttgtkttcttttttcagtcatagagatggagtttttccaacccatctccactctgtccgtagagcaaaaattagtcaattgttaccccctcatttaagatgaaaaatggacagtgctagatgcttcccactctgttcttaagaaattatgaaagtgaccttcacatgaattaaaagtagatttgttgagtaacagattaataatgtggatagttctcaagccaggcatctgcaattctctgcaataatagctctcactcaaccaacaagcaaaatgcctccaaaatcatcatgtcttttggtgtgatgtttgtttttaatatcccaggaagcataaagaacacgcatctggttttcagtaagtcttttcatcccattttctggcatgtagttgaagcatatgaagtttaaataactcatgcagtctctcaaaatgaaattactcagttcataccagaacacatggtactgcaagccaactctgcccacattttccctttgaaagttaacaaaataacagcaccagatagtcctctcccaaatttcagaatcacatatcccagaatgtagattcaatatggagactaaataccaacaaaatatgtatcctatcaaggagactagataataataacccagtacgcaggcaccatataacattagtgtttctgttttgaggatacattgtttagctgaagtctgaactgtgagagacgagattggaatgtttcaaaggcaacttgtacaatactttctcagccactgaaaatctacgtaaccttataaagtcatcttccattcttaaccgtatctccgtatctgcaaataaggcataaaaaggtctttctccaaccacaaataccccaaaagtaaagtgaaattagtaaagcaaaagaaaaatgaaaaaaaaatgtttctttcaagttcagaaagctcaagagtcctgatttttttttaacacatagttcagagcttgctcaatttagtttccctggaggaaagttattatctttatttaaatgaggagatatcttcagaggcaacaggagaatagtttagccttttaggtaaatcctattttcttcagagcactgtwggagggtcatatttctgtaatagttatagaagatgattttgggaagaaacagtaggctctcattatccagacaagatagataaataggatcctgtgtcctttttggagatgactttgccctcaatctcaaacttgccaatactatcattttatgaaagacacaaagtttaaagtaataaagtttccttttaggtatatacaatatcagaactctttctgcatatattggagagtcttaaaggtcagtttttcagcctatattttttaaaacaatagagaatacggggggaaagagagttgggttatccatttcttgggaaattaaatatttgatatttattgataaaaatgttctaaatttcacatcttgattattcgttactacatctctaagaaagctatggcaaaatccaaaggagtcaaacagttaacataaagccaaacccacatttcatttagcgctaaggaggctcctgaatttgtgcaaatcttagaaacttaattgactcactaatcctataacaatggaaatgttgtgacttttaaaaatkgaaacagattgtcaaagtgagtagcgaattaaaagattgactttctacagctgaaaataatcagggaaagcatagaagacaaagtggattttatgctctacaacaattcatttcaggcatttcaatgcaaagtaaaacataaacagatgttgaaaacaattaacctactgaacctacctgctgaaaaggaatcctgcagtgaaaaaatacaagtaatgatgttatgcattagatgaagcagcaatttctttctgaatacctaaagcaaaagatgaattccaaacttaacattcatcatatgttttgctatagttccatgaatattctagttgaaaaatgagaaattctgtgttgaggtttccattacaaaacacgtctatgtgacatgttaaaatcccagtaatttggtttattccacaaatgcttatgtaacatctattctgtgttatagggctataaagatgaagaaaacatagtccctgtcctcaaggagttaacagcctacctccaagaagatatacagcttcacaggtgacttcaataccctatgactagggtaatgcagacatgtaaaaagtacaacaacaaatcaaccataggtgcagtgtgaacttttgcactgaaacaacagtatttcttgagcgtttattccaatgagcctcaaagcacatgtctgttggttgaaggaggaggggggccaaagagaagcaatgtaattgatattccgagaaggacaatttttcactgatggactctctcacatattgcaggatatttggcatccctggccaccacctaataaatgccagccatagcacaagcacacacacacgtgcacacacacacacacactcacacactcattgtgaccaacaaatagctcctactttatttccaaatgttctttagagtactgccttccctagttgagaaccacttgggccattcagcaatcatctattgagcaatacggtgtggtcagcttgactctctggatacaaggcacagccctaagtaagcaaactgttacccttcctataggcattaataaacactagctctttaggtaagtactaaatcttatgccttttttccacagaggtatgggacatttaaaaaataataatcattatgtctcttaattgtgtgtgatcatcaccctacctggaacacaaagaacacagaatttgaatgtcaacatcaatcgaatatcaatcaaaaagaagtggcagaatgtattaagtcctttaaaacatatactactaactatatatatataacaaaawtatatatatataatatataactaacatatactactcttgaaccaggagtcttgagagagtatggagtggtactagggtagaacaacacacatggagtgattatttcttgatctggcacagcatgaggctttaagccttggtggacccataccaaacatggtccatgtaggactttagactttggacagtctctgcagcctatgccagttcccagtgtttcagctgtggctgaggtaggatcaagtttttagcttctggaggtgaacaggacaaaaggtgctgcctggaaactacaaaacagctgagattctttggttctcaagaagtagatgtgagcttctagttttgactatttgtgccagtcttaaaataagtattaaactgaagaaaggctgccccaaattctattcctccttatgttgttttaagctacattcagggccatggaaagaaacagagaaggggagatctcaatccttaagatgcacagaatttgttcacaggttctagccaccctctatcacatgatcctaagttcactctggatttgttaaacaaataatctctgacccggtctctagatttcatagacctaattcatggattcagctgtagatttacccttctacagctggtagatttacccttctacagctggtagatttcatttgaaaacaaaaatatacaaggctttatcatcatgtattccttcttcttggggtgaagtaggaacacaactcaataaaacttttgcaaatgcaaaggctaaaaaggcaattcaaaggcctgtgcattaaacatcctgtctctacagaatgtttatctcaggaggtcaaaaaatatctggaatggtttgaaaaacatagttcagtcttactttcagaaaaagtgttgactaaactactaaattagaggaagacataagtttccttaagagaagggttgagttttgagcaggtaggctgagcagataagaaggaaaaagtgagactctgaaggtctgtgtggatagatatagacgagcaaggagttgcacccaggtctaatacgcttaaagagtttattggaaagagagagatgcttctgataactactagacaataaagtatggctggaacccaaagaaatcaaacagaggaagaaagacaagttctcagaaaacaaatgaattgtctgtccccaaaaggtcaaggatgtgataaattactaaaaggcagttttttaaaagctgcagatagacatttgattgtaaaaacaactgaggaaccatgcctaaaagattggacaactggtcagacaaggtggctcacacctgtaatcccagcactttgggaggccaaggaatgtggatcacttgagctcaggagttttcaagactaccctgggcaacatggcaaaaactcgtctctaacaaaaatgcaaaaattagccagacgtggtggtgcactcctgtggtcccagctacctgggaggctgaggtgggaggatcactggagcccaggaagtcaaggctgcagtgaaatgtaatcataccactgcactccagcctaagtgacagagaaagattctgtcaaaaacagaaaaaaaaaaaaaaaaaagattggacaactatgccaagcagcttttgaaaatctggatatattgaacagggtaagatctggaaaatcaacataaaattatccaataattcttacgtatcaagtttcagcctgacacagttattataggtgagtacataagtactgtgtgtgtaatataatagaaaatttatggaattaggaaaaagagaagacatagcaaaaatgaaaaatatttaaaagggagctgggcaacccataatagattgagtccaagcctaggttagatgcggatttgagaggagaacaccttctgggtaggaattagccaactcaggaggataatggtagacaagatttacttgaacatgaaagcattcagcagacccaaaatctactcatatttctcactatgggagacttcacaaaggaagtctagaagagcaagttggcaaagatcatggccagaagacaaagagaaactaaaagcaaactgagcaaaaattactgaacctacagaaaatatagataggaaatgactaaattaagaaggaagttaaactcttgcaaactcaacagggccttcctagaggaagaggggacagagacaaaaatagccagggaaagacaatctctttacgaggagtaataaaggctaatatgaggaaccaaccattcctatgcaaaaaagcaggagacagaagcagcgagagacatgaagggaatcagagtctcccaaaaatgggaaggataacgggagaggagaaatgatcccattagccttaactggataagggtttcacaagatcctgattcagaatcagagatcagaggcatcctgcatctcatctgtgtaccttgatgcccataattccattaattcccaccagccttctacctccaaattctacctccaaattctagtccctgctttcctgcccttaggatctgtgagacatcaaataagccaaagataaaatccccttcgtcagtttagccagttctaagaggttttcataacctataatcatcagaatgctaccaaatacagaatgctcccaataattttatagaccatccagggggatcctaattgaaactgctattacaatcctgaagccagacaagcagccccatctcccagggtttgggaaatgtccggagtataaaagtgcctgactccggaaagtgtcactttcctcccctcccgacacattcttctttcaaatggaaccatccatggtttcaactattgttcatgccagtttaaatacatagtggcagtcaaaagaaagagagaggaatttctaggagcaagaaaagaaagggaaactgaaagccagaacagtaaaagttgaggctaagacatcctggaaattagggttagagggaaataatgagggtgaggggagaaattttcttggacgtcagactaggagcttgggtctggggtttgaatgccaagaaagagacctgagaaaaggcctaggttaggagctggaaatgagaacctcaaataaatccaggactttcacaatgctacactgtcagtgaaaaggaagttagaaagctccacttagcccaaggaaaggactaaaaaagagcatccctgtaaaagtgaaaacaataaaaagctcttatgagaaatgaaaaatttgctgtacaaatttacattgtacagcaagtgtagaattcccaagctgtgaaattaatataaaagtagatctcagactggtaattctactagggtgcctatcagaagcaaaccaaaaccactctgcacttccgaaactgccccctgcccgaaaaatgagctcacaataaaaaatgtaaaacacatgagaaagtgatctgataaactgtgctaagaggtagaaatagaatatagacaagtcagtagtccctgtccttatggaatacacgaactatcaagggaaaaatagagtcaattgttacacaaatattcatttaattactattgtgattaatgctatagattgagtcatactttttatgattaaaaaatgctatagaaagtacagcataaataatttatggcaatgtgaaaaatgaactcatggctgggtgtggtggctcacgcctgtcatcccagctctttgggaggatgaggcaggcggatcatgaggttaggagttcaagcccarcctggccaatatggtgaaatcccgtctctgctaaaaatacaaaaattagccagatgtggtgacgtgtgcttgtagtaccagctgctcgggaggctgaggcagaagaatcgcttgaacccgggaggcagaggtttcagtgagccaagatcatgccactgcactccagcctagacgacagagcgagaccccatctcaaaaaaaaaacaaaatgaacttacaaactgacctcaacctttttattaaaatatgttcaatttaactacaacagagagcagtctcatgttgaaaatacttcaatgattaggaatattaattaatatttattataggtacttatatatatataatattagaattattatttcagtcataatcaaataatttaccttccccgcttctttccactgatggttttaaatattttaaataatatkttaatacatacttataaaaaaaactgtctgaatgtttaatatttatgatcggagttcaaggtattaagaattatgtaacattttctaaaattataagaagttgataaaaagaaaagaaggcttttgagagtgtagatcccattgttccatccatcacatttttaaattttgttttgacgtctttccacagttggtattcccaagcaagaaaatattttttaaatgattgtctcatttcttcccagcgctaaagttatctgtactttgagacaaaaccaaacatagaaatgataaatgttttaaactatgtatattatagatgcacctaatttgcttatgaaaagacaaacctccagatccaaatgagaacagactaaactaatttaaaagagttctataaatgtttaatacttgcctagctttcatgtatcaacttttatccttttcaaaggaaacacaattaagaattgtggatgtgaattaagggattataaataatcctattttcaattgaagaagttaggggaaagatatttcatttaagattaagttgtatattaacagtatactaaattgttcactactttcaaaaagaaaaaatgtccrtgactacaaataaagtttgtcttagggtagattttttaaaaatgcaaaagtgaaatatctcctgaaattattaaacaaaatgtatttacttttttcctttttaaaaaatttaaaacacacatgtttacagaagagttgaaggtacagtataaggaactgacccattttcttctgacttttcttctgacccgtttgatactcagttgctaaccagatgcctcactgctccagaatatattaatggatatttcctataaacaaggacattctcctgcctaaacacaacacagccattaaaatgagaagattacattgatatattgcaaccacctaattctcagaccccactggtttttccattagtctcaataataccccttctaccaaaaggatctaatttagaatcacaattacatttggttttcacgtctctttagtcttcttcagtcttctcttatcttttatgactttcacagttttgtaaattacaggccagttgttttgtagaatgttcctcagttgtggtttaggattaaattcagacatctttgggagaaataacacaaaagtgatgttgcatttttctcattgaatcctatcaatttgtccttttattgatgacagtcatatccaacacatgatactgttgggatgggtcaagcctccccattgtaacattattttgtggagaggtactttgaaaccatgttaatataccatctcttcaaactttccatttcttttttttttttttgagagggagtctcgctctgatgccaggctggagtgcagtggtgcgatatcggctcactgcaacctccacctcccgggttcaagcgattctcctgtctcagcctcccaagtacctgggactacaggcgcgtgccaacatgcccggctaatttctgtatttttagtagagacgggcttcaccatattggccaggatggtctcaatctcttgacctcatgatctgtccgcctcggcctcccaaagtgctgggattacaggcgtgagccaccgtacccggccccatttctttttttattcgcttacataagcatggactactgttttcctatttcattcaatggtttataatttgttactatcataatttacttagatcctcaatttgccctccatttggccaatggaagttcattaaagctggctgctgtgtccttgtgacatgccccatcwttctttgagcacttccttgctttttggaacaagatgctttgaattcatctgctactagccttgcatcacccttggaatcagccatttctccaaggatcctggttcctttttgtagaaaatgacatttaaaaaacaagatctgagggccccttggtatgcatatgatgtgctcattgttcctggggtggtgttgttcccagtttctctcagcagaaagagctatatggaaaaatgtatttatattgtgtgtgcattcacatatgtacacatacacataggcctctgtatttatttctatatctatctttacacattgaaaaccagatatttatacacatatctccagtttcaatcccatatcacagaggtccagatctactatactttctatacttttaaccccttttccaacagggagaaagctggtttattgttaatacatttaattgcttgatcaatcccccagtctgtaactaatttcccatgtcccagccccagctgccatgtgggcgccatgctcaccctgtcccagacgccgtgctcattctgccctggctctcctatgcatggacaccttcctcctcctactcagaccctgaaccccatcttaggttgacctccacacacaccatccttaccctgcttaggcaccaacatactctgctggccacctgtccttgttgatgtggctgacgtgctgctgtccctccccacactttagaacccaccttactctgtccactgaaccattcaggactcagttgttcaccaaggagcaaggaataggaaaatccaaagttttgaaatctatggaaagcaatcaatgctattccttttttttttttttttactccttttttctcctaaagcatatataaaggagaataacaatacaagagcatttttaggagtggctgacatgaaatgatttgagaatattgttaggaatatatgtttcttattcaaagagcatttttgttcctcttatttgcattcagttaatagaggtagtgttaaacaacaacagaaaaaaaaaaaaaaaaatacacacacagtgctaccaggaggccaaacaggtaagctgagcttgtcataaaacaactcggaccactgaccaaggcacacccaggtgagatcttgcaggtcctttgttggggccacttcacgttctcaccaggatgccttaggaaaagcttttctttctttctttttttgctttgtagagacagagtctcagtatgttgcccaggctggtcttaaactcctggcctcaagcaatcctctcccttcagcctcccaaagtgctgggattacagccatgagccaccatgccccaggttcaccttctttgttttaatttcaaacaggatggaaactcaattctattgttatgattctattgttctgcagaagagggcagaataaaaagcaccacaggccagattagagctgtgtatccaagtctagattttgaattcaaaaaaccacaaaggccaaggggaaagagaacgctaaactctcaagtttgtcctaacctctttagggaatgaaactggacacagccagacagtccttcagtcattcctagcttgaaagatccctccccactctgccttgcttacccaacgtgggcagctgagtgtgacagctttgaggggcctccccagggctatttttaacctggtgttatctgcttacagactttccaccagggcagccgcaggtccagggagtcactccacctgggaaatgtgagcacaccgctggcctgtggcaaatgaggtatttttaactgagacttgagaagctcagaattgtcatctgcttcaggcctcagggtgcgagacacaaaacagagccaagcaagagaggctgtgtgcggactctccagttccttagcaaccaattgctgggcttgttgctggaggagggctctgtaagtgtccggatcagcgatggaaagccagcctcagagtctttcctggcaattatgtggccccctccccatagaagtgaggcctgggagtcccccttgcaggcgaggtattctgccgggctttcccacaccacacctatctgcggctaattagcatcacctgggacttgttagacacatgaattcttgggtctcaacccagacctgttaaattagaaactgacaatgggacccagcgatccatgttggatcagaccctccaggtaattctcatgcacactaaagttctaggatcactggcctaatcacacattcgctaacattcatagataaagacgtaagagtaacacttgaatcccaccaagcccacattgcagtaattcttttaaatgaataacttttagaacatttttacacttaccagaaaaaaaaagtgagcagatagtaaaaatcaccagtaactttttcaaaccactgcttttttttttttttttttttttagatggagtctcactctgtcacccaggctggagtgcagtggcgtgatctcggctcactgcaacctctgcctcccaggctcaaatgattctgctgcctcagcctgccaactagcttactagattacaggtgcccaccaccatgtctggtcaatttttgtatttttagtagagacagggattcaccgtgttgtycggactggtctcgaactcctgacctcagcaatctgccagcctcatcctcccaaagtgctaggattacaggtgtgagccactgaatccagccaaccattgcttttttctgctgctcactgtaccctaataagaaaacctccttcctctgttcgtccttaaaggcagtgataagacaccaactgagtttttgccatcaaaggcggcaattgggtcagagaaagaaatagaccccagcgctaagggaagatagcagtaatgcacaaaaaccctaggaatgactgcaaatgcctaccccagcacaagctgagatgaacaactgtgattgtctaagactctgcagccagggcaacaccttcacaaaacacgcttggaaatgatgtgaatatttgtgtatcagttatatagttgtttcttcttgctgctgtaacaaattaccatacacttagtagtttaaagcaacacaaatttattgtctcacagttctggaggttggaagtctgaaatcagtttcactggactaaagtcaaggtgttatcaaggctgcttccttctgaargctctcaggggaaaatctgtgtctttttcagcttatagtggctgtgtctattccctggcttgtggccccttcctgtatcttcaaagcacatttctcctcccatctctacatccaccatcactaattgtcacatgtgattctgacctttctgcctctctaagggctttgtgatcacatcaggacctcccacataattcaagataatctccccatctcaaaatcctttatttaattacatttgcaaagtcccttttgacatagaaaataatattcacaggtctcaggcattagtatgtgggtttatctagggggtcattgttcggaacatctcgctccataaagccctgtaccctctaatgccatagacactcgctatgtgttgtcattgagcacctgcaatgcagctcatttgaactgagaaatgctataagggtagtgaaatttaaagacttgttatgaaaaaaaggtaaaagatttcattaataatttttatgttgattacatattaaaattataaaatcttggatatattgagttaaataagctatcttattaagattaaattcatctgtttctttttgctttttcaagtgcagctactagacaattttaaattacatctgtggctaacattatatttctattggagcagtcctactacagaccataaaggaggcagggtgacattaactttcagttgttttatttttgccttacttataagagagcccagactttggaagcaacatttcttctttctctagagagagccactaaattcctgcaattaagatgtcaattcaagagagatattttattagggatatgcacaactagataagcgtaacaataaaaaaaatacatttatccagcaacatgcattctaataaagcattttcattaatacattctttcattaagtcctcattacagccttgtaagagatgtattattccaacttttcagagaagaaaatggagcctaagggaaattaacttgctggaggagcacccagtcagtaagtgataagctagaacttgagcccatgtctatgcacctctgcacccaaggctgcctgactgatttcctggtttgggtttagtggtttaatcaggctcactctacttcctgagtggttttactttccaccctcctaaatttcagagatctcaggattttccctttctaccttaaagttctgctcttttgctattctgagcacatttttattatgtttttttaaaaattatttcttaactttgaaggcataggggcatatttcccacccagttatttaaagaagattttctcctgtgtcacacttcctcagcacccagaggcacacctggcacccagcttgatcctgggccatctggtggaagagccctgataccaatgactgtctctcctcgttctgttcaccacccatagctgcatacataggtaagatgttcggatctgacctctagccagagtagataccctcagagaaaccagagctatggtagtttaaactgcctcccagctttcctctgatcagtcttttggggttgaacaggcaatttttcactttggcagagggtcactgtaagaagaattagcaaatgcccactaagagggaagtggacactaaggtcatgtaggatgccccttacccaggcagcactcctatggcataatcagaagtatgtgtttgttttttttcccaattcctgacacaggactccttaaatcccttggaatatcctgagtgataagagtgataagagcaccttttgttctaacttttgttctaacgaggtgattcttggattcttgaaaactcctagctagcttcaggataggggctggtctccagaaaaaccaaactttgattagaagcctagagttttcagccctactccccaacctcctgggaggagagagggctagacattgaattaataaccacatactcatgcctgtgtgatgaacaaaatctccataaaaacccctaagtgtcagggcttagagtttctgaattggtgaacacatctacattctgggagcactccaactccatggggacagaagctcctgcactttctaagggcattgtgatcacatcaggacctcccagataatccaagataatctccccatctcaaaatccttaatttaattacatttgcaaagtcccttttgacaattttgacatataaaataatattcacaggtctcagggattaagatgtgggtttattccaggggtcattgttcagaccatctcacwccatataaccctgtattctctcataccgcagacatttgctacatgtcgttattgagcatgtgcagtgtagctcatttgaatggagaaatgctgtaagggtagtgaaatttaaagacttgttatgaaaaaaaaaggtaggcccggcgcggtggctcatgcctgtaatctcagcactttgggaggccgaggcggacggatcacgaggtcaggagatcgagaccatcttggctaacacggtgaaaccccgtctccactaaaaatacaaaaaattagccgggcatggtggtgggcgcctgtagtcccagctactcaggaggctgaggcaggagaatagcgtgaacccgggaggcrgagcttgcagtgagccgagatcgcgccactgcactccagcctgggtgacagggcgagactccgtctcaaaaaaaaaaaaaaaaaaaaaaaaaaaaggtgaaatatttcattaatttttatgttgattacatattaaaattatgaaatcttggatacattgagttaagctatcttattaagttcaaatttatctgtttctttttgctttttcagtgcagctactagacaatctaaaattacatctgtggctaacattatatttctactggggcaggacccttctggaccttctggaccttctggaccttggcctaggcacctcttcatctggctgttcattcgtatcctttatcataaaccagtgaatgtgagttaagtgttgtcctgagttctgtgagccatcagggcaaattatcaaacctgaagagggagggagttatgggaacccctgattcatggccaatcagtcagaagtgcaggtggcccagaacttgcaactgtcatctaaagtgggggcagtcttgtgggatctggcactaactccaggtagatagtgtcagaattgagttgaattattggacacccagttggtgtcagagagttgcagcagtggtgtcaggaaagataccatgcatctggtgtcaggaaggaaaaaacacaccacttgtcagctatcagaaagggaagagagaaacaataaagtaaaatgggacagtgtcctgctcattttctgctgccacataaaaattatagcctttagattgaaaaaggccctgaaagagtaaatagtccaactacctcattttacacaagtaaaccaggatctaaaaggttaactgacttctgtaaaatctcagcaacctaataccaacttcttattgaactcccctttctgatgatgcttgacttggacaaaactgttttaaaggatgacagagaaatagtaaataaaacaatatagctttgatttccaaaccacactacagagaagtagcatcttgctcccagaataaggctctaaaataggcacatgaagatgaaaatcatgtactgtcaaactaatccctgaaaagccttaagagagtgtcacattggagaccaatgtaacttccaacaataaatcccacatggtgtttgttttttttttgtttcagagctggaacaggctcatcggttgagtaccagattaattaattggcttgaggttagggaataaaatggcacaatctttaaacccaggatcacacgtggaactgcaaaaaggatacacataaaaggcaccaggttctgaaactaatggcagattcctttctctcatcttttgctcttactccaggacactgaatagaatgactcatattaattaaacattcatctctcctccctgcactcatggtttagggtttattgcttagttagaaaccaagcttcacaagtgcatgaatccctgttttgttcatagatgtctcctaagtgcctaataatatacctgtcacataaatgtttgttaaataaggagatgaatgtattctttttgtccagcctgtatagttgaattctcatacattaaagctatttaggtctagctatggctttcacttcttgggaagttgtggtgctattaccagaaaaattcaaacagaactatgcataaaaagatttttcaccattcaggaggttcttggagtctcagattaagatttcctggtactgtcaatctctatctatgacacttcagcagaatgacacttttgtggcttcagagacactgacacctactttcayagctgcataggactttaaaactcccccaaagtgctacaaacaaaaagtactcttcaagtgctgtcaacctaaaggttaacaggttgaagggaccctgggctaaggaagcacaagctggagacaccaaaatggtcttcgcaactcgcctctatattttctgccctgctcctaagccagcctgttggccgactggcccttctccacagatgtcatcttgagcctcttacagagtttcagcactgacattaatgacaagatggatcacctacaggacaaccttggatcctcaaccagcctgattaagcattgacactgcatttgtcaccaccagctctgatggtttggacatgtagaaatgtattgcaggagaatatgcaaacagctgctgtaaggtgagctgatcgggacaactgccagcaggcagaagggaaggcataattaatgggcacccttcagcagagctcagagcagaccaaacgccaatgcagaaggctcaagaaagaggcaaacagactagccactgctccaggatgactgtggctctttatgagtgaagagaaaggrtggagactgaagacagaactggggacagtgacaggcttggggaagaacagctgattcagcagtcccaaggtgagtcatcccatgtgttccacacccaggtagaaagcgctcattagcagaacataatctcccaacctgcatgatgatcgtctgtccatgagaataataaacattacagattgtgcttgcactaaagcagatttagtaaagcctcaggaacagaatatacttcatggggtaagaaatccagctagggaaaagactgacctatctatgcatctgtaatgggttgaatagtgtctccaaaatatatgttcaccgagaacctcaamatgtgtccttcctttgcatayagggtctttgcagttgaagttagttaggacaaggtcatactggattagggtgaagcctaaatccaatatgaytgatgttcttataataagagaacacacagaaacacacaccaggaaggccatggaagtaaaatatatagtttgtcaaatgaggatgagttcaagaaggggtcctacgtagtgaggtggagtattagtttttaagcctgattaaattaaacacttggtggatctttcccccaaacattgtacttagtattatagtgctttcattcttgtaaaaaatggtacaacatgtaggagtacatatggagggagaagagcctccttctgttgtattartttctgctgtaaaaccaggaaaatcatcggccataaagctcatagggagggaaaagaacaatacataagcaaaatcatcaaggctgaaggggagaactcagaggattatgtgactaatactcacttgtcagtgatttatacatcaatctggccatttactattcaacaaatgcctaggccaygtaagagacctcaacaaacggaagtgattctgctataggaaaccacttcttaaaagaaaaagaagcaaatagaggtgctttacaggaaaactttttcttttcttttctttctttctttcttttcttttctttttttttttttttttgagatggagtctcgctctatcacccaggccggagtgcactgggatgatctcggctcactgcagcctctgcctcccggatttaagcaattctcttgcctcagcctcccaagtagctgggactacaggcaggtgccatcacgccctggtaatttttttgtatttttagtagagatggtgttttgccatgttggccaagctggtctcgaactcctgacctcaggtgatccatctggctcagcctccagtaatcccagtgagccactgtgccttggcctaggaaaatttttatcatcctaaaatcttatatcatcactcaagcaaaagaaagctctagaactgcctgagagaacagcctgcaacgaaggagatcatgtatctgtgctgcccaatacagttgccaccagctttataaaataactgagcacttaaaatgtgcccaaggagactgaagaaataaatttttaatttgatttaatgttgattaaatttaaacaaccacaattggctaagagctactccattgcatcacatggctctagagtcacagaaagctgcctgtggaaaaagtcttgagacatttctcaccaagtctaggatgagactggatcctcaagtaaaaacagattaggaaacaaatcaccaaagcaattacgagcaagaaaaaaaaaagctagaggtatcatacgtcatgatttcaaaatatattacaaagctacactaatcaaaacagtatggtactcatatgaaaacagccatatggccaaacagaagagagatcccagaaataaactcatacatacatagttgacaaggatgccaagaatatacaatggaggaaagatatgtcttcaacaaatggtgctgggaaaactggctacacatatgcaaaagaataacattggaactttatctcatgccatgcacaaaaatcaagttaaaatggattaaagacttaaccataagacctgaaactgtaaaatttctgaaagaaaacataaaggaaaatcttgacattgayctcggcgataatttyttggatacgacaccaaaagcataggcaaaaaaaaaaaaaaaaaagcaataataaccaaataagattatgctaaactaaaaagcttctgcatagcaaacgatatgatcaacaaaatgaaaaggcaatctataaagtgggagaaaatatttgcgaatcatatatctgataaaggattaatatccaacatatataaggaactccttcaattcagtagccaaaaagctaatagcctgattttaaaatgggaaaaagacctaaatagacattactccaaagaagacataaaaatggccagtaagtatatgaaagatgctcaacatcaccaatcaacagagaattacaaatcaaaaccacaaagagatttcagccctttgccactgttaatgtgatcaaaaaacaaaagataacaagtgttggatgccaagaaaatgcatctcttgtatatggttcatgggaatgtaaattggtgcaaccattatgggaaagagtatggaagttcctcaaaaaaattaaaaatagaactatcatatgatccagcatatgataccagcatacagtatagaactaacatatgatcccatttytagatatgtaaccaaagaatttaaaattgggatcttgaaaagacatctgcattcccatgtgcattgcagcattattcacaatagcaaaaacataggagcagcctaatgtccactgatagatgaatggataaagaaaaatggggtatatataaacwgtatgtatatatacatacagtacaatattactcagccttaacaaagaaacaaatcctaccatttctgacagcagagatgaacctagaggacactatgctaagtgaaataagccagacacagaaggacaaatactacatgatcccacttaattgaggaatcttaaaacagtcaaactcatagaagcagagagtggaatggtggtttcccagaggaggaggaaatggggaggtattggaccaagggtataaagtttcagtaatgcaagataaataagtcctagaaatctactacacagcatggcttctgtagttaagaatactatattctatacttaaaaatttgctaggtgggtagatcttatgttaagtgtccttataacaaaataataataacaataataaagatggcagaagggaacttttgaagatgatggataggtttgtgacattaattgtggtgacggttttatagatgtatacttgtttccaaacctatcacattgtttacattaaatatatacaggtttttgctcgccaatacttcaataaagtagttttttaaaaaaaggttagggaaccttcaccagaatataccactattacataaagtacttctagtacgtattccacagtctgcagtgtccttaccagtggtcagtagtaccatctacattttctgaccaaggaaactgaggcccagcaagattatttgacttgcccagagccttgcggttcttaaggggcagagtcagaggtctgacaccaaagctcctactcttcccaccaaggcaggtcatctacagcaccttctactcttaaggggtctgccatttccaccctctctgaacagacataaaacaaacaagtgtattatgtctgtgtgtgtctttatgtgagtgtgtagactctgaggaacaggtaagtcttggaatcccttgagtgtttagtgtgaacctagtatgtttagccagccagtatcaggtcagtaccctttagccagccagcctcattttccatttggtccagcaaaatggaatgccaagaatagtgatggggctaacaggatgcatgaatccatacttgttgaataacttattaggtagaagtagcaggtcaaacaaacctttccccctcagatacgctcagcaacaattcagtgttgcggctctcctgctcctcagagagctcttattaccccagcagtggggacactcagaaaccctaagaccacaagtctttgtgttgaaagaggctacaagtgcggaaaagaggaaaaataaggaaaggagtacctcattaacagtatggagatttgaaagtacaggcttttgaaagtgactctctgaagctcctgggccactcagcttctcctctaacttcctgtctgcccccaacagtgggggaggtcaacagaggggctggccagtcaatagaactagcaactgctgaaatccacatgaagctatggtggagaatgtgacccttccaaaaggaaaccacagctggttgtggaatgcaagatgcggaagcactgatgcctgccttctatgctgttgctattgtgatttctgcagcattatgaggaaggtttctgatggaatgaattttgcatcttttaagaaagtgtctctrtacctggatatgtgcttgataaggttaatagagcaattcttggtgtgtctttttaacccacaggaaggttaacagaggctttcatcgttggtcctgtaagcctaccctgaaaggaactttctggaaagagtcccctcccccttaaaaaatgccttatagaatcttgrggttttgaggttgatgtgtttccacacccaaataaccccaaaatagttcatcctattgaaattcttggtgtcctgkaaagcattctatggaaaacctgcctggtcagccaagcccacacgtgagtctatgcagacatctcctctaacctcgcaagccccaggaacctcctctaacctctcaagtcccaggatctgaggaccaatttttagcacaatctcacacaacaaacctattgggcacctaataatagaaacaagctaatgaatgttttgactgtgacaaaaaaaaatggtttaataactttttataaatgcattgtttcttctcattgtctcagggttatgccaaaattaatttcaaaactatctgcttaaatgtgtccttggacaataatcaccagtaagtcctgacttcaccccctttctggtagcggtctgacgttcctttgcagagtttcgcttccatcgataagttactttaaataaaaagttaaaataaaaactagaagccacaattgtgcctatgtcagtcatcgaagtcttgtacaggagtccgtcttcgcagcgcatcgttctcagaagtttcccgcgggaggaaagctccactttatgaattactcgaacagcttccctgggaatgcccagccccgaagcttccctgctgaattcaaagtcagagctcccagggctcggtcccaggaaccgggagccgtgcaaaaagcgcgtacactgccatccactggccccgagcaggtagtagcaggagtgaggcgcctgccacgggagctcaggaactgggtcccagtaagatccgacaagacaccacctcccttccgcccgcacagcctgccctctctgcctgcagctagcgtcacsggtcggtccccgattcggagcagctgggaccctcgcggtagcaagcggattccggggccctaatgacaccgaaggagaggggcagccgcaaattagaccttcttcctgggggctcaggccagtagggactgtccgtggtgcccttccctttctttctcctcctgaacgagagccaacgctgccccttcccaggactggatctgagccaaccaaatcctacagcgcagagcctgcgcccccggcggccagccctcctgtgcctaggcaggttcacgccggagaaagtttgcacgcagggacctacaagttcccagcactctgcaagagggccagttctgggatgccagcacttaggacgggcgagtgatccccaggcaccaactgggggccggggaaccaagcgcgagcccgggctgtggagggaccgacacccaggcgctcgcagctggggaagggggcttacgtctggggcaggcaagactgctgcacagtccctccagccacccggcgcccgmgacgccggcgcagacaggaagctgtagatccccgaggggctggctccgacagctccacctgcagcctcccctgccgccagtgtgcagccaagtccactagatgcttggagggcaccgtgcggaggagggactctgcaggaaaggtggcatcacccccggcatggagaccggggtctccggatcgagccgactcgaacactgaaggaaaccctgcccatgaccctgggagggtctcggacgccgggcgaccggggtggtggtcgggaccagggccgtgcgcctgggaactgggtgcagggcgctgagcgcggaactgtcagagcgggagctcaccggcggctggggaaggaggtggcatcgggcggaggagaggacgggggcgggaggggctgaccctgaattcaccgggactaagaggccatcacacctggctgcggtaggacagcgaatcatcgatcttaccggctttggggacccggctctgcggyagcgctcttccggagcgagggcaggagactgtttcatggataaaaagtctcgcttattcttctgtccacttttatcttggtcgcttttctctcctctacgtgtcccccggggaggcactacggatgattttctccaagctcaagagagacaaactgaactttaagcgccaggggccccatattttgtctgctctacagatcccacccgcgggccacaccctcccttcactcccgtctctgggtcccacccataataacccgtaatgacagatcctccgtgtccccacctctttgcattcaaagaagttattcttcaggggcatatggaaagtcagtttctgctggtctccctcaaaaacttacactccacgagggcagcagaaaaggacaggacgattaagtttaagttgtggaagactggttgggagcaaaagagttacttttctccaaatttgccatatcacatcgaaagcattttcttttaaccagagtgtagccaatcaaaattaactgcaggcgctggcaattaaagaacaagtttatctcaaaaaaggtttaacgtttggaggccattatttgcatcaggcatatggaaacttgcgttctgttaggtatgctgaagaaactgcttttgccagactgcctgagtctttgctgaggctgcagggacaagggagaaccccaccctgactgcttccaaaaccctagttcctgatttcctgcagagggcacctacaggctgaacctaaaaggcgaacaaattcctgcctgtcattcaaaagcagctaccttttctaaggcagcgtcaaggagggcactggaggtactcaacacagtaatgattactttaccaagtccaaggcaattgtcaaatgtggcaaagaaaaacacttcattgggtttttcttagaaatgatttttcatccaatttcaatcaagatcttaatggaaattttgaaaattactcatgaggttatttaataaatccatccccattatttaaagaaagccatgtaaagacaacaaaatatgggccaagcacttgttcttgaacattattgctgagaaaaaaatatgcatttgtaaaatggggggggcagtattttgtttctgaagtgagatcaaatgtagaaaatattgcatatgtatagtaaaatgactgaaacactgattccatgttattctaacatccgatttgtaaaccagtatctgacaaatttatcataattcacaataattcagttcatattatgtggcaggtgtcatactaagcactttacatgtattctttcagttccaccaactactctgaggaagaagctattatttttattttagagataagaaagcagattcagggagctgaagtgaagtaaccagcctacgcaagctagcaagaagctgagctgggattcccccgaggcagtgacttctggattgtgttcttactaagatactacctcatcacacaccatcaccgcagtgccagtctgggaatcaagaactgtgagcaaatcacatagtctttctgggccacagttaactcagcctataacataagggctggattcaattgctaaggtttctacaggcattctgaggccaagtacaagtttctatttcatcttctttctcttccactttctgccctctggtggaggtgctacagggactatgaaattaaagtagctacgtcagtggatttgagatagggtcgatcagtctccctcacttttccacttttagttcctctgagaactaaagctaattgcattaatggtgtaaaataaacattttttaaacttccttttagcaagaaaacccaaccagttctagttaccaacagcaccagaattaatacctgaggtattctttgcatgaaggtaatgacataaaaaatgagggtaaagatgttttatattctttataataaacttttaaaatgtcaagaatcataaactattagaagtctcaaaacatattcaaactgatttgaatatgcagtgtgctcattaaaatgtcaagaatcataaactattagaagtctcaaaacatattcaaactgatttgaatatgcagtgtgctcatagtaatctttaatgacctatttgaattattctttaaaaaaaactagctacatttgcatttcagcttcaagtgacaaccatcatctagtttcttaaaataattttacaaaaagaaacatttctagcctattgaaacttttattgtctagcacttcaagcatacatccaactagttagataatttaaaagaaaacacacacaaaccttgaagagatttatggaaaaattaaaggtattgaatatacctcaggaaacggtgattttacagagcaaacttcagccacatatcacattacagatcaaattagtacttagtactacaactgaagacaatttaagaacaagaagagatcacggagaagcaagcagcatcccaggatgataacaggcaagcagtagctaaaacagatatgctaccccatggctcatctatttagctattcattcaactaatacttattttgggtttgctggctgccagatgaacaacctagacagagttcctgccctcaccaagactttcagtcttgtggaatgtattaaacaaatacacaaacatgtaaactatgaaaaaatacttgcaaataatgtgagaatagctttggggagttagaatgtaatattttcagctgagatataaagatacaaagccttcaaaataaaaaaaattaaaaacagcaagaaaaaggtaaactggaaatttacctgttgcagagaggggagagtttatttagtcaaaagggggaaaacaacatacccatatgtactataatacactctagcccattgatatattcagtatctgataaaacaatttgtgtagatcttctgtttgatgtacataatatttctgggacatcaatcccctactctaatataccacagtagtcattgggaaggaggtaatatatgaccctgtaagaaatttcaaaggaattttatttttagtcctctcacacatctagtgctatagaggggtcccataactgcaatttcactgcctaaatatgcccctacctttggccagcatcccacccagtcctccctcaatgacgtggagctccctcaatgacatggagctccctcaataacagtaaccatatgtgcaaaaactgagatgcctcacctcacctcacctcacatctgatgcctcagattttttttctgatttgtgaatcaatttgagatgtcttaaagttatgaggtaaagtcacatatctatattattgtagctaagctattctatgtactatgtgccaggcacttcataaagtgacatataattttctaggtttttcattcttgaaacaaatctagtttcctttgtcataaaatgagaagtgtaataggctcacctaatacggttgttatgaggattacatatagaaagtgctttaaaatagctatagacacataataatagttaaaacttattgggcacttactgttatttcttattgtcaccattttacagaagaaactgaggcttacaaagttaaatagcttgcctaagagctcacaagtagaaagtggtagaagcagaattggagcctaaaaaatctgggaccacaaactaatccttatgttctgtagcagttattaagagaagactgtgatgaaaacatccaaggggtttacagcttagaatacactctgaattttcattcacccaataaatatttactgagcactgtagtaggttagtgtccccccactactccctgccaaattaatgtccacccagaacctcagaatgtggttctgtggaaataaaggctttgcagatataatttgttatatcttggtttgggacttctggccacctaaactgtgaaagaataaatttctgttgttttaagtaactcatgtatggtatctgttacagcagccctaggaaacgaatactagcatctactatgtggccaggcttctctactctgaggttacagtaataaacaaaactgcactcctgccctcatgaagcttacattccagggaaggaggcagataataaacagacacttaatatgaggacaggtactatttagtgctatgaggaaaaagtattgtgagaagatagaggatgaccagatgacagtgactgggggggggggctttggaaatattaggtgatgtattaagagaatacatatatgggatacagaggtgttaactcaaatgaatctggactgtggagtttcaaactgcatacaatccttcacagcacgacttaaattactaattggaaacttagcaagaagagaagcttagtaagcaatagacctgagcttgttcaataagccaagattctaaaatatgtaaaaatggcttcccaggtggacacctggtcttgcttgtctctttaagttgctggaaatcacagggtctctcagttcctcccaccactcccaaattctcgcatcttttctaggaggtagtagctagtactttgcttcttcctcaccctggaagctccccagcctcataagccttgggtcttagagtggtctaatcactgccactcgataaagactgcaacttccacagacccaagaagagacagagctatctcatgtcaactctagctctacagcttagacatctgcttcagttcccaatatccaaggacagacagacattaacagctagagtcacctgggtcctcagaggttctttttacagccttccttttactgtcctatacctggtcacagcaattttggctactgctgcatttttagtgttcttggtttaacacccaactaattctttgttcttctggagatcagcatacagcatctcccattgttttaataatcttgattataaaaggatggatgaggcccaagcaccctaaaaagtcacccttggcagtgggctagatcccccacatgggtggcctggcttaatcttcacctgtttgcttatgtggaagaacccacaacacagaccatatgcatagtgaggacagaatcttctattaagttcatcactgtgccaggtatctaggcaaagaaaaaaaatatttctcaaagagaaatggaacactttaaaataaatctcttcaaattttgtcttaaatagtatatctatttccaaataaagcctgtttctggtattactcatgagcatttaaaataacatgaagagccaaaaaattcttatatgtcatctctctctaaacactagcacagagattaatctgtatttaaaatttttaaccttcatagccattaagttcaagcatcataacttctttatagaagggaaatgttttcactgctttgcctcagcaaaattcctttgacaatttcagtagcaattgtacttatttgagattgttttcatttaatttagatgtgaaattaactgaaaaacagtttgtcaattctgaaaagcatttaaaccaaaaaaatctaaagatttcaatatacatattccacagatttcaaataggaagctcatacactttgttaatgccacaagtaaggaggaaaacaagaccaccacattcacaatcttaggccattgttagtggctatttggtaactttttccattccttctctaattcgctcagattgaacctaaaaggacaatatgcattactttatttccctcagaacaaatcagtataactacttagataaaacttaacttgtctctgcatcattatagtcttttctctatatcgtagccagcggtctttaaaaaaaagtctcttccttgtttaaagccttccaatgctgtccattgcaactcaaatacaactcaaatttcttaccctggtctatcaagcatgacataaactggcctagacacatcctcctctcaatttaaatttcattaggctccagccacaccagcccttctttctgctcctcaggtgtgccaagcatttcccaaactggggactttgtacttactgctttctctcgtatagatttttcgctgatcttcaaatggaggtcattcaggtcacggctctaatatcctcatctcagagggattttcccattctaaattagccagtgtccttgtatcc

SEQ ID NO: 96691 - DNA, 44663 bp, Homo sapiens
aggagagggaaagcagggtcttcctgccataaattagtacattaagtctttctttctttctttcttttttttgacagtctcactccatcgcccaggctggagtgcagtggcaccatctcgactcactgcaacctccacctccggcgtttaagcgattctcctgcctcagcctcctgagtagctgggatttcaggcgcccagcaccacgcctagctaatttttgtattttttagtagagacagggtttcgccatgttggccagactggtctcgagctcctggcctcaagtgatccacctgcctcggcctcccaaagtgctgggattacaagtgtaagccactgcgcccagccagaaattaagtctcatagaaattcaatgttgggccggcgcggtggctcatgcctgtaatcccagcattttgggaggacgaggagggtggatcacctttagtctctactaaaaatacaaaaattagctgggcgtggtggcccatggctgtaattccagctactcgggaggctgaggcaagaagaatcgcttgaatctgggaggcagaggttacagtgaactgagaccgcaccactgcactccagcctgggtgacaagagcaaaactccgtctcaaaaaaaaaaaaagaaagaaagaagaagaaatttaatgttggtgtcaccaagagattgcttctggactcagtaaattgaagcccaaatttggaactgaaggccagaggtgagcaacctgtcccagtgctctgcaaggcggccgatgccaagccagcacccttcccaccgttctgtgctgctttgtgttagaggaaggaaatgtcctgtgtgaatgtacttttaacaaaaagagaagacaaaaatagccaaagaatgctataaaggaccctgaaaataatctcccatttgttcagggaccactgagttccttggtggggtggacccagtgtcctgcagaaaggagacaatggctcaggccttcaaggattttcttccctccagacccactcctgtggggctctttccatcggggctcaggcctgggggtgtttcctcaccccagtattcctggaaactccacctatcccacaatttccctgtctcactcaccattctgcagccagaggcagggcttgtcagtgaggtaggtggggccagagcagaggcttcatgtttggtggcagcaggagttaccaggctaaggcctggaaagtccaacacagagctctgtccctatcactaactctgaagctcgcgctcggtggcttcctgaaatttccccttccaacttcccaccagtcagcctactctccacctccctgagaagcaagctcagcagcccatctcttgagaaggtgacttgaaagtgggagaaagtcaagaaagagtctaggccaccagacgcggtggctcacgcctgtaatcccagcactttgggaggccgaggaggtcaaatcacctgaggtcaggagttcgaaaccagcctgaccaacatggagaaaccccatctctactaaaaatacaaaattagccgggcatggtggcgcatccctgtaatcctagctacgcaggaggctgaggcaggaaaatcgcttgaacctgggaggtggaggttgcagtgagccgagattgcaccactgcactccagcctgggtgacagagtgagtctcaaaaaaaaaaaaaaaagaaagaaagaaagaaaagaaaaacaaagagtctggccttagaacctgaagcccaaacatctacttccgtctctgctgtttgttaactgagtactggaagcaactcacccacctccatgagtatgagtgtttgcatccataaaatgagggtgaattccatcctgtgagaatcaaatgaaaatggccacatagaagagaaaacagcatccccaaagttagtcctcaggaacttaagtccaatgagatactccatggagaaaagtctccatgggcaaataggtttggaaaatgctctgtcgtctcttgaaattcatgatgcatgctggcaggccaagcgctctgagaaaccctgcaataaagagaacaggtgaaaattgtttaactacaggtgtgtaccaccacacccagctaattttttgtatttttagcagagacagggtttcgccatattgcccagactggtcttgaactcttggcctcaagtgattctcctgccttggcctcccaaagagctaggattacaggtgtgagccaccgtgcctggccatatcatgccatttatataagcgatttgagcgtctttggattttgatatcagtgggggtcctggaaccaactccccacagataccaagggacaactgtattattcaaatatatctaagttattctaacatatgttttttttttttcttttttctttgagatggagtctcgctctgtagcccaggctggagtgcagtggagtgatctaaggtcactgcaagctctgcctcccgggttcatgccattctcctgcctcagcctttgagtagctgggactacaggtgcccgccaccacgcccagctaattttttgtacttttaggagagatgggatttcactgtgttagccagcatggtctcaatctcctgacctcgtgatccacctgctttggcctcccaaagtgctgggattacaggcgtaggccaccgcgcccggcctctaacatatgttttatgctgctataacagaatacatgagactgtaatttatttacatttatttaaaatagagacaggggtctcactatgttgctcaggctgctcttgaaatcctgggctcaagcaatcgtcctgcctcagcctcccaaagcactgggattacaggtgtgagccaccacacccagctgagactataatttatttatttatttatttaaattttcaatttttttgtgggtacatagtaggtgtatatatttacaaggtacatgaagtgttttgatacaggcatgcaatgtgaaataagtgcatcatggggaatagagtgcccatcccctcaagcatgagactgtaattttttttttttttgagatggagtctcactctgtcgcccaggctggagtgcaatggtgtgatcttggctcactccacccaccccctccgggttcaagtgattctcctgccttagcttcccaagtagctgggattacaagcgcctgccaccatacctggctaatttttgtgtttttactagagatggggttttgccattttttttttagatgggatttcgctttttgttgctcaagctggagtgcaatggcacgatctcggctcactgcaacctccgcctcccaggttcaagggattctcctgtctcagcctccccagtagctgggattacaggtgcccgccaccacgtccggctaattgttgtatttttagtagagatggggtttcaccatgctggccaagctggtcttgaactcctgacctcaggtgatccgccagcctcggcctcccaaagtgctgggattacaggtgtgagccgccacctggccttttttttttttttttttttttcagtagagatgggggttttgccatgttggccaggctggtctcgaactcctgacctcaggtgatccactcacctcgacctcccaaagtgctgggattacaggcgtgagccactgtgcccagccaagactataaagaaaagaaatttattggccaggcgcggtggctcatgcctgttcccagcactttgagaggctgaggcgggcagatcatgaggtcaggagatcgaggccatcctggctaacacggtgaaaccccatctctactaaaaatacaacagattagccgggtgtggtggcagcctcagctcctcaggaggccgaggcaggagaatggcgtgaacccgggaggcagaggttgcggtgagctgagatcgcgccactgcactccagcctgggtgacagagcgagactatgtctcaaaaaaaaaaaaaaaaagaaagaaagaaagaaagaaagaaaagaaatttatttcttacacctcctgaggctgggaaggttaagagcatggcgccagcaccttggagatggtcatctcatgggagaatggcagaagatggaagcaagtgcagaagacagaagaaatcagctaaactcgctttgagaacaaacccagtctcgagataactaacccactcccatgataagagcattaatccattcatgaaggcagagtcatcatgacctaatcacctcctaaaggcttcatgtcaattaaatctcatgagtttcagaggggacaagaattcaaaccataccaatacctaaatatagataaaggccaggacaccctagggtgtgcctgtagtcccagctattagggaggctaaggcagaggggtgtcttaagtctgggaatttgagaccagcctgggcaacatagtgagactccatctctaaaaaaaaaaaaataatagaccgggcactgtggctcacgcttgtaatcccagcactttgagaggccgaggcgggcggatcacgaggtcaggagattgagatcacgatgaaaccccatctctactaaaaatacaaaaaattagccaggcgtggtggcgggtgcctgtagtcccagctacttggagaggctgaggcaggagaatggcgtgaacccgggaggctgagcttgcagcgagccaagatcacgccactgcactccagcctgggcgacagagtcagactctgtctcaaaaaaaaataataataataataaacataaatatagatgcacacatccatatccatatacattatgtatatttatacatgcatagaaaaggtctagaaggtacacccctaacttaataggggctatcttttcagaggacatgggattaggaagggtgagagtacagcgaggcttgcagtatttccatgttgccgtagtcttccactgttgctgctgagcagcagctacgtgttgtctctgtgttggtcctctggctttctattcagcatgcactttggtatcctgtgtctttggtattctgtcctcgttacatacccaaatgtggatttcttatttactctgcttgggattcatgggatttcttgattttggggatttaaggtgttcatcaggtattctttctttaaaaagttcctttcttgccaggtgcggtggctcacgcctgtaatcccagtactttgggaggctgaggcaggcagatcatgcagtcaagagattgagaccatcctagccaacatagtgaaaccccgtctttactaaaaatacaaaaattagctgggcatggtggcgcatgcctgtaatcccagctactcggaaggctgaggcaggagaatagcttgaatccgggaggaagaggttgagctgagatagtgccactgcactccatggagcctgggtgacggagtgagactccatctaaaaaaaaaaaaaagaaagaaagaaaaaaatgcctttcttggccgggcatggtagctcacacctgtaatcccagcactttgggaggctgaggaaggcggatcacccgaagtcaggagttcaagaccagcctggccaacaaggtaaaaccctgtctctactaaaaatacaaaaattagccgggtttggtggcacgtgcctgtaatcccagctacttgggaggctgaggcaggagaatggcttgaaccctggaggtggaggttgtagtgagccaagaccgtgccactgcactccagcctgggcaatagagtgagactccgtctcagaaaaacaaaaacaaaaacaaaaattgcctttctcctattctttcttttctttccttctgggactcaaatttgatatagttagattttctcaggatgttctgtctctttccacctatttcatggtttcctaagtgtcataagtatgtatctcattccattccaaataatcttctaacaccacatttctccagcatattagctctctctccagttggatttaataattcttttttttttttttttttttttgagatggagtttcactcctgttgcccaggctggagtgcagtggtgtgatcttggctcaccacaacctctgcctcccaggttcaagcaattctcctgcctcagcctcctgagtagctgggattacaggcacgtgccaccaaacccggctaatttttgtatttttagtagagacagggattctccatgttggtcaggttggtctcaaactcccgacctcaggtgatccgcccgtctcggcctcccaaagtgctaggattacaggtgtgagccaccgtgcctggcccagttggatctaattctaaactgtagtttatcccatcgagttttacattccttttttccatacrgaatctcactctgtcgcccaagctggagtgcagtggcgcgatctcagctcactgcaacctctgcttcccaggttcaagtgattctcctgcctcagcctyccaagtagctgggattacaggcccctgccaccacgcctggctagtttttgtatttttagtagagaaagggtttcgttgtgttggccaggctttttttgttttgttttgttttttgagrcaaagtgttgctcttgtcgcccaggctggagtgcaatggcgcaatctcagctcactgcaacctgcccctcccaggttcaagcaattctcctacctcagcctcccgagtagctgggattacaggcgcctgccatcacgcctggctaaatttttgtatttttagtggagacagggttttgccatgttggcgaggctggtctcgaactcctgacctcaggcgatccgcccacctcggcctcctaaagtgctaggattacaggcatgagccaccacgtccggtctatttttatttttatttttgagatggagtcttgctctgttgcctaggctggagtgccgtggtgcgaactccgctcactgcaacctccgcctcctgggtcaagtgattctccttctcagcctcccaagtagctgggattataggcacctgccagcatgccctgctaaatttttgtatttttagtggtgacagggtttcgctatgttggccaggctggtgtcgaactcctgacctcaggtctcccaagtgctgggattataggcatgagccaccgcacccggcctatttatttatttttatttttatttttattttcgagactgggtctcactctgtcacccaggttgtagtacagtggcacaatctcggctctctgccacctccacctcccagactcaagcaatcctctcacctcagcctctggagtaactgggactacaggcacacaccaccacacctggctaattttttgtatttttttgtagagacaggttttcgccatgttgcctaggctggtcttgaactcctgagctcaagcgatccattcacctaggcctcccaaagtgccgggattacaggtgtgagccactgcacccagccggacaattatattatttatgtttacaagaatgaatcagagggcagatgcattggctcattcctataatctcggcactttgggaggccgaggtgggaggatcacttgaggccaggagattgagacctgtctgggcaacatagggagatctttgtctctacaaaaaaaattttaaaaaaacattagctgggtgtgatggtgtgcatctatagtcccagctactcagagcgaaaccctattccccatccccaaccctcctaaaaagaataagtctgtggaaggctgggagcagtggctcatgcctgtaatcccagcactttgggaggctgaggcaggcggatcacctgaggtcaggagtttgagaccagcctggacaacatggtgaaacccctgtctctacgaaaaatacaaaaattagccaggagtggtggcaggtgcctataatcccagctactcaggaggctgaggcaggagcatcgcttgaacctgggaggcggaggttgtggtgagccgagatcctgctactgcactccagcctgggcaacaagagtgagactctgtctccaaaaaagaaaaaagagttctgtggaaaaagaaaggcattccctgcaggtgtcagcaaaggtaaggaggtcccaaagaacaggaatagtgaggagtccttgggggaggatggggaggttgcccaagctcatcctttatacttgagacctctggtccagagaagtgaagtgttctgctcagtgtcacaccactggtcaggggcagaccggaatcagaaagtaggccttatttcttcatcagagtctaggaagccgccaggggaaagaggctgtgctttagaaggttaaggcctatgatccaccctgcgtcacccaaagtaaactaggaaggaagtgtaaataaaccccacaaagatcggacatttttccatgatgaccacattgatgcatttattaaaaatacaaaatgctaataatccaaaccagccctcttcccttttttcccctttgggagcccttgcactgtggtgcatgaaacacatgcttsaactaggccattgggaactgcrgcttggacaaggaacagccacagcttttcctgtactcagagcaggcaaagtgccattaaatgcagctggaagccagggcaggggaaggggtgggaagctcctggagagcccccagctcctcccagttactgactggctctggaggagaggagctagaaggccgagatacctgaggagacaaacctgggscaccactgccacctgatgtcttcctatggccattgcagtggtcacagccccaagccccgtggcagcctggcagcagagtgaaacaagagggcaaagaaagcctatcggtggaagtttttatttacccttgacggtgggtactcccagacagtgggtatgtctgaaatacttcatattgaagaaagacatccatattgaaaaactaaacagaaaacataaatggaaaatgaatcaacatatacaaagtagccacagtatggaggtgcggatttgactttgcctgcggaagagctgtcctgctctggccagcactggaagggactctgcctcctctgttctgggagygtgcaagcaggaactctggactgggctttgcacaacttccaggagtcattgcttagaaatcagaatgaccaagatcttaaggtcttagaatcatctaggtaatccacccccatcccagctgccaggtcacagtcacacagaggctgagcacgcccaatgccatgcccaatgccacccagtcttcccctgctgctgtttctgcctcgcctccctgtccttccccyaccctaccctagcrtgggcaggctttgtgtcccaaggtcaccagtgacatatgtcccaccacaggcagccgagcttaaccctatcactgagacctccttgtgrctgctccctacccctccctgcctggcttcctggcatcctgcctctaacctctctctctgcttccctgtcttctacattggtagaactgccacttggatacgtgtgacaacttgctgtcaccagcctggatatttctctggagcactcctcacattcaacacttgaccactcaggcatcgggacagtcactgcccagatccccccgtccacataggagctcagcatgacagcccctcttttttatttaatttacttatttcaatttttatttttatagagaagacgtctttctatgttgcccaggctggtctcaaactcgtggcctcaagtgatccacccacgctggcctcccaaagtgctgggattacaggcatgagccactgcacccggcccagccccyttttaaaatgttttcttttgaaataatttaaagcttacagaaaagttgcaagaatagtacaaagaattcccttatgccctttgycaagagtcatacattttaacgttttcaaattttgctgcatttgctttcttccctttgactctgtctacttctctctcttacacacacacacacacacacacacacttaacctgtaatatttcagtgtattatttccttagaacaaggatgttctcatacataactgcagtataattatcaaattcaggaaacttaacactgagttactaattttacctggtgggtcacagtagctcatgcctgtaatcccagcactttgggaggccgaggtgggtggatcacgaggtcaggagttcgagaccagcctgaccaagatggtgaaacccccatctctactaaaaatwyaaaaattagctgggtgtggtggcgggtacctgtagtcccagctactcagggggctgagggaggagaatggcttgagcacaggaggcggaggttgcagtgagccaagatcgtgccactgcagtccagcctggccaacagagcgagtctgtgtctcaaaataataataataataataattttacctaaagttcatatttcaatgtagtcaaatgttccaaaaatgtcctttatagtactctttttcggtttggtccaggatcccatccaagatcacacatttcatttagttgtcatgtctcttgagtctcctttaatctggaacggttcctgggcctctctttggtcatgtatgacactgatatttataaaatatgcaggccagtaattttataaatttcaacttaggctttttcaatatttcctttccttgtgtatttctttttttttgagacagagtttcactcttgttgcccaggctggagtgcaacggcgcattctcagttcactgcaacctccgcctcccaggttcaagcaattctcctgcctcagcctcccaagtagctgggattacaggtatgcaccaccacacccagctaattttttgtatttagtagagacggggtttcacaatgttggtcaggctagtcttgaactcctgacctcaggtgatccacttgcctcggcctcccaaagtgttgggattacaggcatgagccaccgtgcctggccatgtatttcttgatttcttgctctgagtaccagtggtccagccactccctcaggtcaggagccaagagaccatcstgaatccatccctctccctcactcccatctacccatccatcaccagatcccagcacctaaagcccttccctcccatgccccagcttctgctatgactataattatcatcattccttacctatcatccatcctttgtcttgctctcagcaattacacggcttcacactgctcccttcttaaaccctctacaggctggctgctcaaagggtagcaaaaggatcagcagctttgagagtctgttaaaaatgcagaacctcaggctgcgacccagagctgtggaatcagaatctgcgttttaacaagtttcccacgtgtttgagaagtcctgctctcatagatccctaggcttacagactcctcagaatggcgttcagggtcccccccccccgcccaccacaaacctctcctaccttgttcacaggtatgaatgcatggtatttcccctttgaacacaatttctttttcctggaacaccctgtctcgtgagactcctgctgaaggttagatttgaacatcgcctcctatggggtccactgcttgctctggagccccatgtcctctggacccctctctatcctagcttctgttacatggaaacgttacacctaagacctcgtcatttttagtgactatttctcccactagccagtgaacgccttgagacaaagcctgcatcttacacacttccttatcctcagtgctcagcacaagtcaaacgtttattgaatgagagaaacagcttttcctccatagaggcccttccaagtagatttgaagtgggtattgcaaaggggccatatgcaaaggggccatccaaatgccagagccacggtatgttgggacaggggcagtcacagagaacatctacttatctaattctttttttttttaattttttttttttttgagacagggtctcactcctgtcacccaggctggggtgcagtggaacaatcttggctcactgcagccttgacttccctgggcttgggtaatcctcccacctcagcctcctgagtatctgggacaataggcatgcaccaccatacctggctaatttttcgtatttttagtagttacagggttttggcatgttgctcaggctggtcaagaactgctgggctcaaactatccacccaccttagcctcccaaagtgcaggcattacagccatgagccactgcacctggccggaaaatctagttcaaatgcatttgttatttgtgaagaaaggccccagagggagaagtgacttactccaggtttctctgctggagagatgtagcctgagtcactattgattcatgctttgcccttcttggagccaagtgcccttaagtgtgataagcagagaaataaaaatcaaagtgagtcacggatgaatgagcacataatggagattgttttgttttagagatggggtctcactatattgcccaggcaggttttgaactcctgggctcaagcaatcctcatgccttagcctcccaagtagctgggattataggtgcacaatttgtaaagtttgaaaacatgaggcctggcgcagtggcttacacctgtaatcctagcactttgggaggccaaggcagggggatcacctgaggtcaggagttcaagaccagcctgaccaacatggagaaaccccgtctctactaaaaatataaaattagctgggtgtggtggcacatgcctgtaatcccagctactcgggaggctgaggcaggagaatcacttgaacccaggaggcggagattgtggtgagccgagattgcaccattgcactctagcctgggcaataagagtgaaactccatgtcaaaaaaaaaaaaaaaaaaggaaaaaaaatctgaatctatcttcttgcttaggaaatagtcataccagggaaggataagtgttacctttatgggggttgggtgcagctgaagagtttatgatgaagtcagggtaggcaaggggcttcagctaagctgttcattcttaagctggtgtgtgaaatatragtgttgattttttgtacatctttgcatactttaaatttttaaaatctgaatcagatcacaccttggatggaatagttttccccaaaatttaaagtgagttaagttttgcccatggttttgagttaaccaactcttgaccttgtgggtgtccacacataaatttttctatagtaaatgcaaactttctgcatggcaggcttcaagctctaacaagcaagtttcagagagcaggggcattctagaaacagaatcctgacctctcagtgaagcataaaatgagcagaggctaaggatgaggttgcatcttagcatacgggctaaagaggtcgtttcattttacaggcaaaaaaaaaaaaaaaattaaattctcaataatgggttgacttaatttgcaattttaggaaggatagatcagacaggaagccagctgacctttgcagcaatccagggaaatattacttgctcaaagtaaactttaaaaagcatggtggctcacatctgtaatcccagcactttgggaggctgaggtgggaggattgcttgagcctggaaggtcgaagctggagtaagccgagatcacaccactgcaactccagcctgggcaacagtgagactgtctcagaaaaatatatgtatatataatataatcaaatatgcctgaacccctggttttccaacccatacmtaaaggaccatgtgttttctattctgggcgtccctctgtgcttcagcccaatatattttgtccccagtagcccccagcatcacattatgtgtgggcactgcagccttgacctcctggcctcaagtgatctgcctgcctcggcctcccaaaatgcggggattacaagcatgagccactgcggctggcctcaggcacactttttatgcacccatttcatcttgcaaatcaatctgaaccacaagtttttggagtcagagcttcttgaggaaatgtggccatcccaaacactaattttagttaatgtggtcccaggaccttaaagggaaatgtaattctccttaaatccatcaagaactaggcagagagcatgggttcaagatcttttattttcagagcttccaacagttggttagtaatgctagctaagctggtataatctgaaggccatcccacctttctctttaggcagtcaaccaacagaatctctttcttacaaacaatatcattaaccagttggaatctgtctcaatgcgcgtgtaggaagaagtcctctcccccacatttttcccaacaagattgttttatagccaaatgtaactcaaacccgtaacacagcaactagccatctccagtatcactgattcccaccccaagaagttgaggtaagaggggagagactgtctcctgtttaagaaaaacccacctacacctcagtgaagccgtgatggtaaggaggctggcaccagagggcagggatgagtaggcactgaaacaggtctctctagaatcaatgaagtctgccccagctccttggatgaggtgttcttttgaaattcccacttttatggagttagataaggggacaaccggtgatgattcatcactccctgtctctaaaattaaaacatgataaacccagaaagttttaccttcaaaatccaccaagctccctcctgagaaaattctatccagtcatgtccatgccagcacccactcccttctcctaatgcccagggcttccagcccctctcctcacccttgggtggtccatccaacactgatttgatactctttgactcataatatgaccattttttaaaaattagaaaataaaagctatcaatatcacagcaacataaggaagatactcagtggacatgctcctcccccatcctgtggagcccacctacccccaccccccttccctgggaaacctacactgcaacattccagcactgagccgggggtggcccaacagatgctgcctcaagtgctttcctgactgtggctcctataccagccaatgtcatggaactggggtgaggaagaacagggccacacctcccaccaaatagatatcggtagccagtggtgggtctgggagatttagcttatgtcaggcagccaagcctgggtccaacgctctcaccaggacctcagttcttggcttaaatagcagcagccccagtaccacagcgcctcctgggggtgacagagcacctagctttctgtccgataacttataacaggtttgcattttcttacccacttcttttttttttttaaattaaaagccgaggtagtccctgggataataaaaccctacctagaatggcagtatttcaacctaatgaagcagtaaaataagtctccaggagttagaaaaaaaaataaaataaagtgattgatgaagttgaataaattaaacatatggattatcccacaaagacctttccttcccaggttgtctttgctatttggccagcagcatttctgtgtaacttctctactcccctccgtctcctctcccctcatgagatggctggagcccgataaggccccggctggttcatcccactgtggctcagrgcagcttgacacggtgctcagaactgcattgtggcacagttctgatatggacggaggacgtctaacagggacagaagaggcgtagccagcaagatgccctgggctccaaccttgggagtgtgggaggtaggtttaaggcatggaagtcccaggccccctctccaaatgtcacacagctgtcccctttgcttaagtttctctgcagsaaagagggtaaagggggatggagggaagcttgggctgctgctggctggtcctgccgccctcagagcttcttcagacgactgtacatctccctcttgctcttctcccctgcccaggtccggctcttggtgcggaacttcttcaggtcttctttaaagtcctcgtggtgcatgggccggtagctagggggctcacagtaagactgaggggacaggagagaataaggttagggtacacctgcctcacacccacaacctggtttcctctctgcctagggctacaaggctgaaagcggccaggcagacctagggagccagttctacaggggctttctttgggttcagcagatacccaccttgtcccccgacccctggaaagaaagtcatgaccaccagacagatccattagtctaccactgggggcaggggaggagagatgctctccacaaccccagtcttacctggcatttcataaagaactccttgtatccccccttcaggacatacagctcagggtagtggagtttggggtattcattacccaggcgatctctctctctcacataccggcacctagtcaggggaaggaaggccaaagcagggttagcttttccagcacagcaacaaggcaacgcagtcaaagcagcagttgtggtctaagtcccccttatacacatcttcccaacttgacatttattcttagaaacaatcagtgctgagttgcaagttcctggccacatgagcagcactcacagccagtgccagtagatggtctcttccccaattttcctttctccaacaatcctagcatctgagtcctgcccagcaccttcaccaccacagtttgtggcaagttttcactatatgagccagcttccccttgctttctccaccccagccttctcttcagccaggctccctcactcacctccttctacataagtgggcttgtttctttctgtggcttttaaagaggctgaacttgctcctgcctcggggccctgtttctatcctctacttggactgaatggtcttcaatatccagccaatggctgcttactgcctcgcccttggtgaaaaagcccgaggccccaagtccttcagaggcctacagctctacaggcccctactgctgctctgccccttgttcaccccacgccagcccctgcagccccactactgttcctccagcctgcctgggagctccaccactggccttattttcctctgaagcaccttcttttttctgagacagaatctcactctgtcaccaggctggagtgcaagggcgtgacctcaggctcactgcaatctccgtctcccgggttcaagcaattctcctgcctcagcctcccaaatagctgggactacaggcgcgtgccaccgcccagctgatttttgtatgtttagtagagatggggcttcaccatgttggccaggatggtctcgacctcttgaccttgtgatccacctgccttggcctcccaaagtgttgggattacaggagttagccaccgcacccagtcaccttttttttttttttttgagatggagtctcactctgtcgcccaggctggagtgcactggcgcgatctcggctcactgcaacctctgcctcctgggttcaagggatgctcctgcctcagcctccaaagtagctgggattacaggtgtccgccaccacgcctggctaatttttgtatttttagtagagacgggatttcaccatgttggccaggctggtctcgatctcctgtccactccgaaatgtaagttccatgaaggcagagattttttggtctgttttgttcactgctcttctccctcagtatctagaaaggtatctggtacacaagagccaagagtatctgctgattttctcttgaagctcagtggtttggggcctttgttagctgctcatgagggatgggcagcagcttcctctgcagcacgtagcttaaaccatttgcctgtggttaaaaggagtttggctgggcgcggtggctcacacctgtaattccagcactttgggaggctgaggcggtggatcacgaggtcaggagttcgagaccagcctggccaagatagtgaaaccctgtgtctactaaaactacaaaaaattagctgggcgtggtggcaggtgcctgtaatcccagctacttgggaggctgaggcagagaaatgcttgaacccgggaggaggaggctgcagtgagccgagattgtgccactgcattccagcctgggcgaaagggcgagattccaactcaaaaaaaaaaaaaaaaaaaaaaaagagttcacctgtgaatcccaaatctttccccagtggaacaacagaaagccagtgatggcgaaactcaagtggggaacgaagtgtaaggggtatctgtagatggtgatataaacatgcagcttgcaaatacagaatacagagatggggcgttttctgtatatctaggtgaagtttcaatatggtataataatgtcctttatattagaggtgttaaagaggaagatggggaaatgagagattaagagaatagcatcttttgggctgggcatggcggctcacacctgtaatccaagcactttgggaggccaggattgcctgagcccaggagtttgagaccagcctgggcaacacagtgagaccctgtctctataaaaaatacaaaaattagccaggcatggtgatgcatgtttgtggtcctagcttcctgggaggctgaggtgggagaatcacttgagcctgggaggcagaggctacagtgagctgtgctcctgccactgtactccagcctggacaacagagactgaccctgactcaaaaataaaaaaaaaagagagcagcatcttttgtgggtttaaaaacaatttacatgtgtgtgtatgtgtgtccagattagtttgtttcaggcctataatcccagcactttgggaggctgaggcgggtagatcacttgaggtcaggagttcgagaccagcctggccaatgtagcaaaaccccgtctctactaaaaatacaaacattagcttggcatggtggcatgcacccgtagtcccagctacttgggagcctgaggcaggagaattgcttgaacccgggaggtggaggttgcagtgatccgagatcgcaccactgcactccagtctgggtggcagagcaagactacatctcaaacaaacaaacaaaaaaactgctgagtgaataattccattcatgaatgagcatcctttggagacagatgtttgaaggacttatgagatgacagtcaaaagtgtcaagttgtactgtagttgcctgtgtgtagagcatgtacatacaaatgtgacaaaatgttaaaaattaataaaatcaggtgaagtgtgtgcaagtataacctttgtgtgtgtgtgtgtgtgtgtgtgtgtgtgtgtgagagagagacagaatctcactctgtcacctaggctggagtacagtggcatgatcatggctcaccacagcctcgacctgctgggctcaaacgatcctcccacctcctattttttgtagaggtgtggtcccactgtgttacccaggttggtctggtctgaaactcccgagcaagtgatcctcctgcctcggcctcccaaagtgttgggattacaggtgccactgtgcccagccataacctcacctcttcttgagctttaaaatggttcaggtcaggcgcagtggctcacgcctgtaatccaagcactttgggaggccgagacgggcagatcgcaaggtcaggagatggagaccatcctggctaaaatggtgaaaccctgtctctactaaaaatacaaaaaaattagccaggcgtgatggtgggcacctgtagtcccagctactcgggaggctgaggcaggagaatggcatgaacccaggaggcggagcttgcagtaagtcgagattgtgccactgcactccagcctgggtgacagagcgagactccgtctcaaaaaaaaaaaaaggttcaaaggggtgggcacagtggctcatgcctgcaatcctagcactttggaggccaaggagagaggattgcttgaggccaggagtttgagaccaacctggccaatatattaagaccccatctcaaaatttgaaatttctgctgggcgtggtggctcacacctgtaatcccagcactttgggaggtcaaggcgggtggatcacctgaggtcaggagttcaagaccagcccggccaacatggtgaaacccccatctctactacaaatacaaaaattagccgggtgtggtggtgcacgcctgttatcccagctactcaggaggctgaggcaggagaatcgcttgaacccaggaggtggaggttgcagtgagccgagatcatgccactgcattccagtctgggtgaaaacagtgtgcctctgcctcaaaaaaaaaaaaaaaaaagaaagaaagaaagaaagaaaaagccaggtgcagtggctcacgcctgtaatcccactactttgggaggctgaggcaggcggatcacctaaggtcgggagttcaagaccagcctgaccaacatgtagaaaccctgcctctactaaaaatacaaaattagccgggcgtgatggcgcatgcctgtaatcccagctacttgggaggctgaggcaggagaactgcttgaacctgggaggcagaggttgcagtgagaagagattgtgccactgcactccagcctgggcaacaagagcaaaactccgtcaaaaaaaaaaaattgaaattttttaatttaaaaatgttttttaaaataaattggttcaaaataaaaaggtggcataagaacgtggtcctgcagaagtctcccttggaccatcctagttaagctgcactctctgtcctacctctctgcctgtcctcctagcatttatacggatccccacttggatctctgctgcagtagggtccttgttggtcctgctcgctgtggtatttttactgtactgtgttttactgtagttacatttttattgtcagtgcctgacaaacagcaggcttgcaatccttttagaatggacacagatgactgatgggcagctctttggcccccttttttcttttcaccctgaaattggtaataatatcaagtgtttcaaagcatcatatcatatgaggttttacagaatgagaacttcacacttttctggcatttgcataaggaacggtcactttgtacttgaaggaggtcacatgagaacagtagccccacagatcagactaaggacagtcggggagactggaagagccaaagttcacctcaggataaaattacatatgaaaatggcttgttatgtgccagaggttgcttgatatgctaaaatatgctccaagtgcaagccacaaaccaccatgtcccacaaaagcatcatggagcctgtgccccagaacccagttccgtgcagcactcacatgcggggacctctctcagaagaaaactcgcagtgaaacacaacaatgacacgcttgccatcagtaggtacaatgggcttcttcaataagaagtcttcaacctcttcttccatgtgcaagttcactgcaccctgtgaagacaacagagacccttggaacctgcacgtttcacacatgaagtaatgattcagcaagatgtaatgattcatcaagagtgatctttaagtccacaagaccagtttgtgatttttgcagttcttctagctgaatagcccagtagaccatttggcacctgtatctcaatgragctttgtgggtccgtacacgttcatcatacagtaatgcacatggggactggaaatgggcaattcaaatatgacaatggtacactttataggtagttttataaatttggggattttcaaaagccacaagacaatggcaaacagtaacatcgtatttaaagtacctccttactatatttaaacactattaatcgggtaaaacattaaaatggcaggccaggcgccgtggctcatgcctgtaatcctagcactttgggaggctgaggcgggcggtttgcctgagctcaggagtttgagaccagccsgggcaacatggtgaaaccccgtctctactaaaaaaaaaaaaaaattagccgggcgtggcagcgtgcacctgtagtcccagctacttggaaggctgaggcaggagaattgcttgaacccaggaggcagaggttgtggtgatccgagatcatgccactgcactccagcctggcgacagagcggactctgtctcaaaaaaaaaaaaaaaaaaaagattaaaatggcaaaatcagttcctttcttcttgggaacgtgtgtcccaacacgcccctccaccaggcagcttgctgaacaatcaactttggaggcatcactaagcctggcacagacaccaggacatgttgccagagatggtcttctcctcatcaggagccctggggtgctcagacattggtacccaagcctcttaaatgctatgaaacccattcttgtcccccgaatgacttaaacatcagtgggtacctcctacaagtgtccttgataatgatggtgtgagggacaaacatgaagaataactgtagcacaaggtggtagagagtattgcagacaagggaacattcgttaagagcacccggaatcaaatgccttccacactcactgtattgtttcaaaattctaacaactagcatatgagctaagtggccaggtgtcactgtcctccccactttaaaaccacagatcctgtttagggctccttctacagcaagtctcaggaatccataccttgatgtggcctccctcgtattcatatgggtatcgacagtcgatgataacaaactctttaatgaggttggcaaacttgccattcaaaacagatgccatctgttgagagaaaattagggagaatcaactttgaccgtcagggaaaactagattcaagtacccgatgtgtggtgggtttcaaaaggatggacttacaatttctggagagatgtattttaaatcctgatgtttcccagcaactgtatgaaagagataacccttaaaaagaaaaaaagatacttagagaatctgaaagcctatatattattcacacttatactgttttgtctggctggtaggaggcatcttttaaaaaacaaacattaatggccaggcacggtggctcacacctgtaatcccagcactttgggaggccgaggctagtggatcacctgaggtcaggagttcgagacaagcctggccaacatggtgaaaccccaactcttttaaaaatacaaaaattagccgggcgttagcatgcacctatagtcccagctactcggaaggctggagtgggaaaatcgcttgaatccaggaggcggaggttgcagtgagctgagattgcaccactgcactccagcctgggtgacagagcaagactccctctcaaaaaacaaacaaacaaacaagcaaacaaacattagttagtacacactagttactcttctagttacttcattaacatcctgacatttaattttcacacaaaccaatgaggtatattatccccattttgagcaccttatccaaggttacctagctagtaaggcagatttaaataaagaaacctcaggtaatctcattttcctcctgcttttgtcaagaatccacacgtcagtagttagactgcgaatagcacttaaacatacagatttcactcatttactgagcacctgctatgtccagcatggtgccaggcactggggataggaaaaaaagagacctagcccagccttgaggaggaagatgcacacattagcaattactcattagggtgactggctgagccaagagttcatctatccccatgcataggcccattaagacaaatataaccaggcctcaattcaagttgaaaattccactgagtgtggtggtgcatgcctgtagtcccagctacttgggaggctgaggcagggggagcacttgaggccataagtttgaggctacagtgtactatgatagcatgtgcgaatagccactgcactacagcctgagcaacatagtaagaccacatctctccctgccaaacaagagaaggttccaaaactgaggatacagctggatctttgcttgttctcttcattctccgttccttcaaaacccatttgggctgaaatatcaacggcccaaccccagacgttccccaaccccctagccaagataaacccttttacttctcacggcatgctgtttatgtttacacctcactaaaatttatttcagtctaccatgtggtacatgtagttcacgtctcacctctccaaccacatgctaaattctttgagggaaggaactgtatctcattttggaatctctgcctaacacataagtgcttcaataaatgttaactaaattaatgaataaaacattgatctggtaaccttcaagtcaaaatgtgattaaagaagctgctattgacacattccctgtcctagccttgtattttactgcagccaagccttcatgtagtatatcaggctattagaagatcttcctctagacttcctggagggtcttttccctcaatggccaagcttctctgaacggagaaattcagtctcaatcccagaccttctaagataacctttcaacatgcagacttgtagtgtggctacagatttatttctgctgtacactatcctgctaattactatttttataataacacagttcccagagagcctagtctttgggttacaatcaaggtggttggtggacagctccctacctaaaactgcccatcagctatagtgatatctacagtctcagaaaccaacatatacctgatcatgagaaactaagtttgcttccctacctttaacattcttttaactgtgtccttttggaggtatgccaggaaccaccctggggagggagacaggctgagtgggattctaaatacccacactccctcctacacttgccagagcagctctgcttgcaattaccttggagaagtctcctataaggtcccttgggtcattgtccaaaatgttctcaatggttcctttgggggaagatgccagggataaagactgatgaagagtctgtaacaaatcaaaggtagagaatgagacaagggttctgaatggaacttctgaaaacattcacttggagcatgtctcgaggagactaaaatgttaatgcctacatttagtaagaagtttttattttattttattgaatctggagtgaacaaaaacagatgtgggttattgactaggtctcctattattccagtgtctaaccgaattgctctgaaactaagttttccttccttccttaaaaaaaaaaaaaaaaaaaagggggtgcaggtggtttggctcatgcctgtaatcccagcactttgggaggccaaggtgggttactcacttgagcccaggagttccagaccagcctgggcaaggcaggtgaatcgcttgagcccaggagttccagaccagatcaaagagcaagaccctgtccacacacacacacacacacacacacacacacacacacacacacacaagctgggcatggtggtgtgtgcctgtagtcccagctacttgggaggctgaagtgggaggatcacctgagcctggggaggtcgaggctacagcaagtggtgatggtgccactgcactccagcctgggtgacagactgaaactatctccagaaaaagagaaagaaacaaggggggttaaaactaggattaagtttagaaaaagtatgtcttaacttttttttttttttttttttaaaaagacagagtctcgctctgtcgctcaggctggagtgcagtggagtacaggagtggagtgcaggctggagtacagtgatcttggctcactgtaacctctgcctcccaggttcaagcgattctgccgcagcctccagagcagctgagactataggtgtgcgccaccacgcccagctaatttttgtatttttagtagagacggggtttcaccatgttggccagatggtcttgaactcctggcctcaggtgatctgcctgccttggcctcccaaagtgctgggattacaggtgtgagccaccgcgcccggcctacgtcttagctttattcaatgagaagaggaagccagctgttaaaaaggggataatttgagtaaaaggataatacttgtaatacacagaaacacattaaatgttttaacccatgaattcctgattattattgaaaaacaactataagtcttgctttcaactttggaagatgcttggtagggcattatttggaaactggcaaataaagagatccaatattcatcctgcctttcccaagggtaaccacagtgtttgatgagtgtaagtttctctttatagatatattctagctaattaatgaggaaagaatgtaaaaactgcagtatcatctttctgaaaccctggtgaaatgaagtaaaaaatctgggcagcaatcaccaatggctgcctggcacattatacttcctgatcaaagtagacaaaatcacctatgtgatattcttgccaaacaaatagaactggaattcaatccatcctttccagagttaggttaaggcaatataggggatagaagacaatgtctgaagaccccacaggactgtgggaacctttgcaggacaaatgacttgagctcttcaacaaataaaaatatgcaagagggaaacagatggagcactgaaatctgaagagtaagagacctattgaccaactacagtgtatagactttatttggatccagattttaacaaataaactgtaaaagtacttaggagacaactggggaaaactgaacccagactggatatttgacatttgatagtaagaaatttagctctgccgggcgtggtggctcatgcctgtaatcccagcactttgggaggccgaggtgagtggatcacttgatgtcaggggttcgagaccagccttgccaacatggtgaaaccccgtctctactaaaaatataaaaaattagccaggcgtggtggtgggcgcctgtagtcccagctacttgggaggctgaggcgggagaattgctggaacctgagaggcggaggttgcagtgagcagagatcgacccatggcactccagtctgggcgacagagcgagacttggtctcaaaaaaaaaaacaaacaaaaaaacacccagaaatttagccctgtatgatatgtttgtgtgaggaaaacaccccacaaactcaaagtgatttttcttattccctcactcaacagcaacagaagacagaagtgctgttacccccagatatgaggggatttctccctaccagcaagcaagcaagcaagcaagcagttctgcagtggaaaatagctgggtgccgtccaattcaattctgacactatctacctgcagagcgtcagatcaggaagttgagggccyagtcctcaaaaccacaccacccttcagacaccagttgggcctctggatcttctgatctacgaccaccagctttaagtaggggttcccatgaccccttctttgggtttaatttgctagaagtggctcacagaactcaagaaaacacatttaccagtttattatgaaggatattcaaaggatatagaagaagacatgcatagggtgaggtatgggagaagggacatggagctgccatgctctccttgggtgccccaacctccaggaacctccatgtgttcagctatccagaagctctctgaaccctgtcctttcaaggttttagggaggcttcattacatagaaatgattgattaaaccattggccatgagtgatcaacttgacctttagcccctctcctttccgtagacattggagggtggggctgaaagttccaacctctaatcatgtctctgtctttccagtgaccagtcccaccctgaagctatcaatcattagtatacaaaaagatatgaccttggatattccaaagattttaggagttatatgacagaaggggaagaagactaaatatatatttcacaatatcacaggtatgataactgtactctagcaatgcttgacattttctccacaatggaatttaaaatactaaaaattaaaatatatgaaaataaaccaaaacatgagggccaatatatatacaaaataattattaacagtattattttatccaaaaaaagttttacaaatatggaaataaaaaggtcaatctctattacggtaaaagaaaatgaatattctggccgggcacagtggctcacacctgtaaccccagcactttgggaggccaaggcggatatatcacctgaggtcaggagttcaagaccagcctggccaacttggtgaaactccgcctctactaaaaatacaaaaaaaattagccaggcgtggcagtgggcacctgtaatcccagctactcaggaggctgaggcagagacttgcttgaactggggaggcggaggttgccgtgagccaagatcctgccactgcactccagcgtgtctcaaaaagaaagaaaaagaaaatgaatattcttttttttttttttttgagatgaaatctcactctatcacccaggctggagtgcagtggcgtgatctctgctcactgcaacctccatttcccgggttcaagcgattctcctgcctcagcctcctgagcagctgggattacaggctcataccaccacacccagctattttttgtattttcagtagagacagggtttcaccatattggccaggctggtatggaactcctgacctcgtgatccacccgccttgtcctcccaaagtgctgggattacaggagtgaaccacagcactcagccagaatattattaaatattgatagatattttctgacatgtatacaatgtaaagtttcacaaatgttcttgcccttataacccagaatttcatttttaattagaaataaaaggaaaatcaggggaagggaaattctaaatgtccagaaggtgatttattcaattatttctagtatacttgtaagtcaaaacactatcggccaggtgcactggcctgtgcctgtagtcccagatactttggaggctgaggtgggaggactgcttgagcccaggaattcaaggccagcctgggcaacacagtaagacctcttttctacaaaaaataaaaaaaaattttttttaaattaactgggcatggtggtgcatgcctgtagtcccagctgctaggggggctgaggcgggaggagtgcttgagcccatggaggctgtactgagctgtgatcgtgctagtgcactccagcctgagtgacagcgctagaccctgtgccccccacaaacaaaaagaacaaaaaccaaaaccaaacaactctcccaaaacaaaaatactatgcaattattaaaatattcttttagaacaatactttaaaaacattcataaagcattaaaaacaaaagcagatacgataaggcagtaggcctaaatgctaaatgttttcctagctgtcatctctctaaccttttaagactgtgatgagatttacttaaaccttttcatgccacagaaaacacaggtagttcaccattttataatgcttaataccaaacctcaatataaggacagtataatgaaggaaaaacatacaaataaaccagtgttttgtgtgtctagccacagaataaatagaaaaaataacacaaaggaccataggacttaggcccagacaaccatgacactagctcacccatgccaggtgctgtgtctaacacctatgatcctggcactttgggaggccaaggcgggaggattgccctgagcccaggagtttgagaccagcctgcgcaacatggcgaaagcctgtctctacaaaaaatacaaaaattagctgggtttggtggcacacacctatagtcccagctgcttgagagcctgaggtgggaggactgcttgagcctgggaggtggagagtgcagtgagcggagatcatgccactgcactccagcctgggtgacagagagaccctgtctcagaaacaggaaacaacaaaacagcctatacaactatgagcaatgcaatgaattaacttgaagaattagacagacagggctgggcgcagtggctcacgcctgtaattccagcactttaggaggctgaggcgggcggatcacaaggtcaggagatggagaccatcctagctaacactgtgaaaccccgtctctactaaaaatacaaaaaattagccaggcgtggtggcggggtcctgtagtcccagctactgggaggctgaagcaggagaatggcatgaacccgggaggcagagcttgcagtgagctgagatcgcgccactgcactccagcctgggcgacagagcgtctcaaaaaaaaaaaaaaaaaagacagacctttataaaaatcaagtatttaataggccatgataggtctggattaaaaggaaataaaatatctacaacaaatgataataaaaacatttcaggtcaaaagttatgagacaaatctaaagcagtgggaaattcatagattcaaatagatttatccagaaataagaaaattaaaaacgaatgagttaaccattcaactcatgaagctggagacagcaacacaacaagccccaagaaaagcctgctctccctaggcaaaggatggcctattgaggcagaagacttttagacaataatcattctactagtcaacacagaaacaattatggccaacagcaagcgggggcctccacctttgcccagctgtcatacagtgccccagtcaccaccccacggggatggaatgaacttccactccctcccagcaataatgagacaagtccccacccaaggtgtcaatggagtttgtgctggggaacccggacttccacccatgcctttcttgcagtatcagaggaagcctgctaaaacrtaaaatttacatagaccggagactcacaaatatacaggagacaatggaagaatcaccggtcataccaagaaccagaaaaatcccaacttgaacaggaaaagacaatcaacagatgccaacaacactatggatggatgttggatttgtcttacaaagattttaaagcagccatcttaaaaatgcttcaacaggcaattatgaacatactcaaagcaaatgaaaaaccaacatgaaaacagccaagtatcagccaggtgtggtggctcacacttgtaatcccagtgctttgggaggccaaggcaggaggatcacttgaggctaggagttcaggaccagcgtgggcaacatcgctagatcccatctctattaaaagaaacacacacacacccacacacacacacaaccccacaaaaccccagcaaatcttagcaaagaaaataaatgaaccactaagtagaaatttttagaactgaaaaatacagtatctgtgctagagcaaaaaggaacctaggaaactaacctcatgggccttctctggattagttgactctttggggctggccccagacatgctcttcctcctctttgtacttccaggtggagactcctcttgagatcgttctggtctcttcaacactgaccgagtgctggagctacacagggaaggggagtcaaacagcttgcatcggttgtccttacaggaaaaaaaacagacagacccatctttcattaaaacctgttcacttgaatggtaaracaaataaaccgaaggtttcctgggatgatctaagatcaattctaaattagccaacagacactgccgattcatctagtcctagcaactctcacagggcctggcacatagtaggcactgagcacttagtgctcaatgaatatatactcagctgacattatatagagatgagcaaaacgtcctttgccctcacaaaaactgtctacataatcctgcgtcaagagaagtgtgaccttccagtcaggaacacatttttggcttgcctatcttcccctccattttattacttgcaccttgcttaattaagcaggtcaacgggtttaaataccccacttaaatccagaaaagatgcacagtagccaggttataataaaaatgggggcatctttggttaaggtatagttaagatggtaaatttggagggagtggggatgggcagagtagcaaatgcctttcaaaattgtgttcaaagtctttttttctacttggtcttttaaagactaatttcccaggctgggcgcggtggctcacgcctgtaatcccaacactgtgggatcacttgaggtcacaagttcaataacagcctggccaacatgaagaaaccccatctctattaaaaatacaaaaaaattagccaggtgtggtggtgcgtgcctttaatcccagctacccaggaggctgaggcacgagaatcacttgaaaccaggaggtggtggttgcagtgagctaagatttgcaccactgcactccagcctgggtgacagagcaagactctgtctcaataaataaataaataaataaagacaaattttccagagcccaagggaagccaatctgaccagtggtagcaagagtcagctctctaaacgcatctcagcctattctcgactccatgtgtcttggcctggcttttccttctgcacagaatgtcctttcacatctcagtaaaccattcattttcaagttgatgctaacatttcaatgtcacttctttgaaatcttcctgatagtccccagtagaatggatcactcccacatctgctcccatagagaccggggattttcttcctcttttgtgtgaagtttattttccattacagctcccagcaatggttagtttgtaataaccatttgtggaagacatttccccactattaagagcttacaagcccatgcttatgactctaaaatcaaatctataaaactaacagccacttccaaagtgttctcacattttatgtaattttatgcctatcaaaatgacctggtaaatttactcataacatttgtactgcgttaacatattttctcaaaagctatgcacatgaatgtactataatccataagtgatctcaaaactgtagcttggctgggcacggtggctcatgcctgtaatcccagcactttgggaggcaggtggatggatcacctgaggtcaagagttcgagaccagcctggccaacatagtgaaacctcgtctctactaaaaataccaaaaaaattagccgggagtggtggcgtaagcctgtagtcccagctactcagaaggctgagccagaagaagcacttgaacccaggaggcagaggttgcagcaagtcaagactacaccactgcactgcaccccagcctgggcaacagagggagactcygtctcaaaaacaaaacaaaacaaacaaacaaaaaaactgtagctcatttgttctgtaattatagttcaggttattgagaattaaaaaatatgaacttatcaatttagatgtgtacctaagggtgtatatctctgaacatacaggtgtatatatctgtataggcacattcttgcttctaactttgaaagtatccctatgatgaaaacacgaatctatagcatgtgtatgtgtgtgtatatatatgtgattttgaatatatatacacacatacactatagattctgtatctacatatactatgctttctgtttgaaagtatccctgatggaaacacaaatctatactgtgtatgtgtgtgtgtgagtatatatatatatatatatatataaaatatatattatatataatttttaaaatcgaaaatatctacctgaaaatacccagcctcaggtaggtattttcaatgaaaaacaaaacaaaacaaaacaaacaaacaaaacagcaacaaaaaacatccagccaggcacagtggctcatgcctgtaatcccagcactttgggaggtcgaggtgggcagatcacctgaggtcaggagatcgagactagcctggccaacataatgtaaccccgtctctactgaaaatacaaagattagctgggtgtggtggcaggcacctgtaatcccagctactcgggaggctgaggcaggagaatcacttgaacctgggaggcagaggttgcagtgagccaagattgtgccactgcactctagaatgggcaacaagagcgagactccgtctcaaaaaaaaaaacaaaaaacacagaaacaaaaaaaatcctgtgagttactgttgcttgtctaattttatgctaggttctgtggaatataaatgagaataacctaaaaaaagtaaagtattcaggctaaaggcttcagataggcttttttcaaactgactagatggtaaaagctaggaatgaccatggtccctcctaacccacactccttatacatcaggagacatgcagagagataycatgactaaaggtcataatttgtaggtagccaaagtgaggcctaaaacccagatccccaaatcctatcatgcatttcaatctttggctatactcaactaaggactactctgtccagtgccccaatcacgcagggcttcctccagacacactagaacaactcacaaggtttgtagttctcatgacgagaggagctgtccagaggcttgccatgcacgagggggtctcctcctcattctaaagaaacagaaaaactgattttaaaaagagcctgtagagactaacatttgtttaagtgctttaggtgtgtttctccctgaacaataccagataggcctggataggaagtatccttaatgtaccatcctataccgttctgatttcatgtttcttgcatatagattgttagttagctccttcagggtaagaaggatcatgtgtcttcttttgatgcccccatcccccaatccaaaggatttaataaggctggtagccctattattaaatgaattatcaccaaatgaacaaaaatatcagctaagcaagccccggggaactgctgttgctgttctttttcacatcacatgccttctccagaggtaattaattagtagaacaaataggaacacacacacacacacggtaccttcagattctctccatcgagaaggtccacgaagccatcatcctcatcagacaaagtggctgtcacaggtgactggggtgtaaaaagaggaatgaaattccctggttcactgctatctctttcatttgaggaaagctgtaagacaaaattcatggattaataatgagagctctgatccactttcatttccttgratgggtcactagtttttatgatgaaaacatactatgttatacttgttatacaaagcaaaattttagccattactgattatatgaaaatgtatcccaagattataaatgatttgatgaccacacacagccctgagtagtcagtagcctttacagagaactcttgccagaagcaattcaccttataatgggtactagagatagcctcttgtgaagaacaaggtttcttttattagaaggttgcatcagtgaacaccgatcagcattgaggactgtgacagtatgagaatctgctgaaatgagttagggcaagcagatgcaaatctctataaagaccataaaatggcctagagaatgcacttatatataactccagttctgacaggggggaataaagggtaacttccytctataaaatctatcctcgttctttagacttgggatttaaatgctcagtttttaaacgaggaattactgtgtgccagatactacgatataatctttatacatataatccaatagaagcctcacaatacactaaaggtagctaatcctttcctttttctttagcaaatcaggaaactggtgcttaagaggttaccaagattatacacctcatctgtttgactccaaaatccaaactcttctcaccacactatctccctaggagaaaaccattcctggaattaaaatggcggtacctcattagccaacctatagtcatactttttttgggaaacctctaaacatggaatatagaaaatttagaaaaactgctcataaatccacacctgaagataaatcctaccaatacaaacactgctaatactgaattatttattttctaggcactttcaaatccagaaaaaaaagtttagagttatttttttcacagtagcagggtagtcccaatgttatgacctacaagtaatccttaaaatccaaatctctttggggtatgaatctgttgttagttaagtggccctctgattttctgagtggatcatgcaccaaggaatcctctctgcagctggcctattctggttctggcattagctttgcttcacaatataaaacaagttctgagcagtctctagtcctccccaagtgcacactctgggaaatggcaaatttttttagcctaggggtagataactttattatggggcagtacctttatcacgaaagctcacactatatcacaccaacatttgtgaggtatgttctgggattcctaggtgcagatgtgatacaggctctagtcgctaagcacacaccaaatatattgtttctgatacccaactcttaaagcattactgtgtacttgggaatttagagattgtttattgagacagggattcattgtccaggctggagtacagtggtctgatcatagctcactgcagcctcgaattcttgggctcaagcaatcctcccacttcagcctcccgactaattgggactataggaacaagccaccacactcagcttattttttaactttgtacagatagggtctcactatgttacccaggctgtcttgaactcctgacctcatgtgatcctcccacctcrgcctcccaaagtgctgggattacagccatgagccaccacacccagccagagatcattaaatcctggtttcctacttatgtatatcctttggtaaatcatccaaacctctctagtggtactttcctaatctgttcaagtggattaactccacttcacaagacaagaacatataaaagtgctttgtgcaaatgatagacagagtaacaatactggctgaacctcagaacacaaagcagattggaaaggtatattttcagatttaagatcctaggtaaacctggaagccaaatgtggtcatcttgctcaagttgggcctctccaatctatagatgctatcagttaatccaattcagaccaacagcaggaaactttggaagtaatgacagtccctgtctggcaaatacatagccctgaaacgagtgaccccaaaactgcccagcagcctgagcattcactgtaatccataatagttctttaaaaaaattaaaaataaaaaaaatagagatgtggtctcactatgctgcccaggactcaagcgatcctcctgtctcagttttccaaagtgctgagattataggcatgagccatggcacctggcccataactgttcttaacaaaccacctttggaagaagtcaagtgctctctctccagttccttgagaagcacttagaatgcatagtaaagaccaagttttaagtaagagatctagtgttacggctcttttaaaatttgtctcgcaggctttccggtttttgccagaaagcccttaaaaaaaaaaaaagaaaaaaagaaaaaaataggaagagatataatcccaccatacatacatttaggatgacccaggatttcccagattaacaaggtcgattattccttgcacaactccaatatttcaaacaccatctcccactcttactaccgcctgtctgttctccagacacagcaaaaccaccaagaatgcttgacagtctaatttcaaaagacaaagtcaaggtaaaaacagctagtgctactgtagtgccttcaattctggatgaaagaaggtgttttaatcctttcttcctgtcaggaattcccctatgaaagccagagcacataccatccgagctggggcagagttctgcctctgtgtgaagagatctttaccctcctggagtccatgagagtgcaggcagccacgagatacaggtcttactggcttcttaaactcaaaggcttcctgcaagacatagttgagacatytactgtccatgaaaaccaactcaggcctcagcttgggtgaaagaggcaagaaagtgggcactgatcacctttctgcctccaaattaaagtttcacctaattccaacaatagatctgcgtaactaagaatttccaaggctctgtcaacagctaacttctaaagtaacatctttttcttgtcatactgtatttcctaacacaagtatctgccaaatatacaaaacacgatgaataagctaaatcacaaactttctgaaatctaaagcaaaaataaataaaatctaatataattgcctgtgaatagttgtcaaaattttccatctaggtccatctgtttcagggcttcatattttccacctcttcctaccaactggagataattttttctacttataattattctattctatactaaaagcaatgaaaaaaaaaaaagccctactggtttactcaacgtggacgattcttacaagcataatgttttttaaagccagatatgatagaatacayatcgtatgattccactttatggaatgaaaacactcacaggtcccttgccctaaaatattcacttaagaactcataattaagtattaaaagcagtaatggctagcactggcgtgggtggctgagttccccgttgcccttggtctcggggtcgcggtcggcactgaggctgcagctatcatggtgaacttacttcagattgtgcgggaccactgggttcatgttcttgtccctatgggatttgtcactggatgttatttagacagaaagagtgatgaacggctaactaccttccggaacaagagcatgttatttaaaagggtattgcgacccaataaagaagttacctggaagtaaagactggctgaattatagaatgttcacattttaaagttctgagagaaataaaaccatgaagaatcaaaaaaaaaaaaaaagcagtaatggctaatattacagtgatttctatgccaacacagtactaagtactttctgtgcattaactttttaaccatcaaatacaacctgattgtcccgattttacaggtgagaaaactagaccttgcaggttaaggaatgtgcccaaaatattgaagtaaaacaggacaactccagagtgagagctctttaaccaccatctatgctgttttccctttaaaacaaagctccaggcaagcaaccctgagaagctatttcgggggaaaaccaggcatcagtacagctttgccctggtaaaaagcactagaggctgatacactgttccaagcactcaaggctggaactcatttccatattctttctcatgacacttcccaggttgataaagaaatcatcaggagagttcatggaggcagtgggtttcacactaaacctgaagattgtaaggacaaggattatgaactgtggcatttcagcaggaatggaaaaggggagaaagtaaatatatagaaatacagtagagagaaggctgaaaaaattacaactgttttggatgcctactctgtgcaatgtctaaaagaacaaaaaagccaggctcattcagggtagataaccagaaattcaccttccaagccaccatttcagttactctgagattccctagaacttgttgaccccgttcttacaaatactgccaaagagccttttcctaagcttacaattcatttcagggtcagagcaaagaggcaaggacagcctgggcagagccttccagacaaacactatttgtacatgtaattactcctgtgagctacaatctgagcaactcccgcctgtcaggcaccattttcaatacttcatacataatcttacttattgccacaacatccctaaaaggtattactactcctattttacaaaagagcaaagattaaaaagagaagaatttgccaacatcacacagctagtaagcaggatccaaacccagaattctctgactccaaagaccgcacataatggccaagtttagtctcccagaaagcagcccagccacttctaagccactgacagcctgtgggtttcacctctgcctcaggttagtacattgaagtcacactcacattttccttgttctcatctgggtcgatgagctgaaagatgtcatggtcaagagaatcagaatggctcctcttcagagctggactacatcccaacagcttctgctatcaaagtaaaaaaggaaaataattaaggcacacaaataaaatttcagtggaaaattcagttctcaaaagaaaaaaaaggggggttgaatagggggtagactagctcctcacacactgcagtaggtaaccagtaaatgtggccaggaatccaccttgccaggacacagccaggacacagcatagaagtttccattccatgggtttacagctaacctcacaaggtctacagtgcccccctcaacagggattacagtgccaaatcaatccccaaataacatttgcatcaaaagaacccttcctggtttaataaagctctgttagagatggaggacaaattcctccagaccgaacatcttgagtacttatgagactaaggaaaggctgggaatagtggctcttgcctataatcctagcactttgggaggccgaggcaggagtttgaaaccagcctgggcaacagagtgagacccccatgtctacaaaaaatacaaaaatcagccgggtgtgatggtgtgcacctatatatagtcccagctcctctggaagttgaggtgggaggatcacttgagccagggaagcagaggttgcagtgagccaagattttgccactgcactccagcctgggtgacagagcaagaccttgtctcaaaagagactaaagaaaagcagtttttactctctaaattaagtctcctatcaaggtcatgctggtagctaaggaacagataacaggtattagctcaaaataaacaaggaactaacttacaggtagggaatgtattcttctcataggattttcaaggctgtaatgagatcagaaggtaaataatgagaataaaacaagtaaagaggtattcatattagcagagagatagtgtttagcctgtagcttgggggtacagtcacagactcccattttaggcaagagatgggagaataaatttctgaagctgtcctgttctcaggagcacccccaacactagacttctaggtgaaaaaaaacaaacccatgtcttttcttaaaatacacacattcggctgggcgcggtggctcacacatgtaatcccagcactatgggcactatgggaggccgaggagggtatatcacgaggtcaggagtctcgaactcctggcctggccaacacgatgaaacctcgtgtctactaaaaatacaaaaattaaccgggtgtggtggtgcactcctgtagtcccagctactcgggaggctgaggcaggagaatcagttgaacctgggaggtggaggttgcagtgagccactgcactctagcctgggcggcagagtgagactctgcctcagaaacaaacaaacaaacaaacaaaaaaaccccacatgttcttgtaaggctatgatgtcagagcacagagtaagggtttgggtaagacccaaacagaacaccaaaattatagctaaaataaaggagaaaaagttctgaaaattgctgacacaaactattcattcttgagattccagagtgtttctaggcacaggtaaatccagggctccagtccagtgtatgaagaacttcatttaaataaggtatttaagtttagacacgttttttctacatataaacatttgaaagcagtgaatacatacttttctttactgtccaatggcccaggagaatctagacagaaacctatggggaaaaaaaaaacctctcaagaaataatacaaaaaacaccattttgtcattaaaattaaaacactaaacaaagtacctgggtctttatttaagtcaggcaacaaatattcatggcttgtacttttgccagaattgatgttacgtctattagattgtcaaaaatgtcatgtttgtacaagtcttaatattttcatagcgtatttactgttttttctcctatttgcaaataacatcaagggaaataggatttgagaagagggtgaataaaactgattcatatcatgattgtttggttattcagatagaggtgacccagataactttctgtgagttccaaccatagaaacaataggtaccagattttcttggcatagtttttaaacgttttaccttgtcaaatcatatgaggcttgaaaaatacaactactgaccaggcacagtggctcacacctgtgattccaatactttgggaggctgaggcaggctgatggcttgaggccacaagttcaaaacaagcctggggcaacatagtgagacttgactctaccaaagttaaaaaaaaaattagttgggtgtggtggcacgtgtctgtagtcccagctacttggggaggctggagtgggaggttcgcttgagctcggaaagttgaagctacagtgaaccctgattgtgccactgtacaccagcctgagacctggaaaacagagcaagaccctgtctcaaaaaaaaaaaaaaaaaaaggccaggtgcagtagctcacccctgtaatctcagcactttgggaggtcgaagtgggtggatcacctgagatcagaagtttgagacccacacctgtaattccagctactagggaagctgaggcagaagaattctctaaatctgggaggcagagttgcctgggtgacagagttgagaccttgtctcaaaatgaaaaagaaaaatacaactactggtcatgacatgcaaggcaagcacttgctgcctttaacaaaatgacaccaaggtgtccatctcacaaaaggcagcagggtgaaggagacactgttcagcattactaatatgccagctcagatgacgcagacccacccacccatagctcatgtgtctatacagccttatggaaagtgaggtgttacagcccttgctcaccacactgctacaagtgataatcctatccccagttctatattaaattacattctacatacagaagcctacattacattttaagacttgctcttgcagttcctttaacctaaaggatctttgcaccaatggtcttatctgtacaaatacagataaactctgcagtaatatgaattcatgaagaatgaaatgcactggcaatttcctccatagcagcatcactgaaatgatttcatgacactgtacttccaatcatttgatcctgtattttaaccagtaagattgcctgaatgccacttacagtggtatggtgaattatactttactacccatccttcaagggcaagcacacaccacctccttatagacatttgaaacctatttcctttcttcataaacagccacaagggctcctttgtattgttctcaataatgtttatcaccgggcgcggtggctcacgctgtaatcccagcactttgggaggccgaggaaggcggatcacctgaggttgtgaattcgagaccaggctgaccaacatgaagaaaccctgtctctactaaaaaatacaaaattagccgggtgtggtggtgcatgcctgtaatcccagctactcgggaggctgaggcaggagaatcacttgaacccgggaggtggaggttacagtgagctgagatcatgccattgcactccagcctgggcgacaagagcgaaactctgtctcaaaaaaaaaaaaaaaaaagtttatcacccaatgccatgacttcctcaagttctcaccaaaactaacctcctgggtgaaaaggcatgtttcaggaaattcagagtattgctccccacacagcagacttaaatacctgaatctgttgactcggaggagcccattctctgcagattactgttgttcttcacctccagtggttgctcataatcactgaaaccaacagaaataaaccatgaatgatttataggatataattaaaaggtcacatgcaggagataggccatgagattaagaagcagccaggctgccagaaaccatttctaggccacaccacaagtggcaaagatcccactttgccactctgaacacccaattagcacttgggcaaaggagaaaaaaggagtgggtgggcatggccttggaccacattgcaggttatgatggctatggcaaatgttggggtatttcctaaaataaaagcatgtgttctaagtactgagacagagtcgggatgaaagttgaacaggacactttctgcttttcagaagttgggaaacgcacaagacatgtgcttagcaaacgggatgccagagattgaagggaaagtagctcttccgcgggaaacaccgtgggatgcattttttgctatcaggaaaagcccaggaagctttctgaaagttgggtaaaaagacctggccttaggaaagcagcagagtggacatcaggaatgtgcacagggcgagggactgagatgattttacataaacgccaggaaagaaaatgccatggtcctttgttgagaaggaacaaagatcacagcaaacgaagatcctgaggatggtttagcaaagggtgaaagtgagtgcctagaagagcctgattttccccgcgggggtagattccaaagagcttccagggatagagatagaaggagcgtacggagcaatccgaaaggggtgaaggtgggcctggctcgggcttaggcccaaggatctccacctcttcccctggaaggtcccgacggcctctcccgcccaacattccgcccgggcgggggtgcacatggcaggccctagcccggctgtccccgagcggcgaacccggacggacgggtctcgcccttctcccggtccgtttcctggcctgatctctccgaggccgacaccgaggccaggggcccggagcaccgcccgccggtctctccttacctgcccagaccctgcagc

SEQ ID NO: 96692 - DNA, 277432 bp, Homo sapiens
  misc_feature (1)...(277432): n = A,T,C or G
acaagagtaaatctccgtctcacaaaaaaaaaaaaaaaaaaaaaatttcagtttagggatcatgcagcctctggctccaagagtatgaaccttccccagattgctcctggggataacatcactatcgtaaaacctaagatcagtgcttgagatatgttgcagaccctgcactcatggatcagctgacaccacccagacaggtaatctggctcaaccagttctgccatcccacccagggacagaaaacagcaagaaaacctcacttcaaccccctgtgactccatctccagccccaccaatcagccctccccacttcccaagcccccactcgccaaattatctttaaaaactctgattcccaaatattcagggagactgatttgaataataatgaaactctgggctcccgcacagctggctctgtgtaaattactctttctccattgcatttcccctgtcttgatcaattggccctatcttgatcaattggccctgtctaggcagtgggcgtggtgaacctgttgggtggttacatacaagaagccgtacatatttaacacatacaactcggtgagtgtggggatgagcatacacccgtgaaaccatactgaaactgcctttgcaaaattttaacaggagaaatgatggcagtgaaagaaatcagacctaaccgactctatctttcttctaacctttaagttgtccttgttcattcctgaacgtaagtcaaactaactttgggaaggaattcagttcatggcttgactctgaaacaaaattggtaacagccctttcctgaaaagacctccttcttgcctggggaccagactgcctttgcaggactaacaaattagctacaagattagaaatttcagtttaggggtcatgcagcgtctggctccaagagtctgaacctccccaaattgctcctggggataacatcatagtctatgccataaacctttccatctccttcaaaagtttcctcccgccccagttatttgttattacgattgtgtgtgataataacatctccatgcttagcaaatcttaagtatatactgtaatattgttaactatggtcattatgcgtatggtacttctcaagggtttttccatcttgcatacctgaaacttcgttccctttgaccaatacctccccacttccccctcccttcagcccttggcaaccaccattccactttctgtttctatgagtttgattattttagattcctcatagaagtggtattatgcagtatctgtcctcctgtgcctggtttatttcacttagcacacatgccctccagttcctccacgatgctgcaaagagcaggattcccttctttgtaaaggcgtaaaggacaccactttggaatggtgttccattgtgtgtatatatcacattttctttatccattcatctgctgagggacaattgggccgattctgtatcttgacagttgtggacagtcctgcagtgaacatgacagtgcagatctcttctctagatcctgatttcaattcctttggatatgttcccagaagtgcgattgctggatcatatatggtagttctgtttttcattttttgaggaagctccctgctgttttccacagtggctatccaccaatttccattctcaccaacaacgtaccagggttcccctgttctccacacactcaccaacctttgttttcttttgtttttgatgatggccacacctcacaggtgtcaggtggtatctcattgtggttttcatttgcatttccttgacgattagtgactttttttttttttttttttagacagaatctcgctctgtcacacaggctggagtgcagtggcgcgatctcagctcactgcaacctctgcctccccggttcaagcaattctcctggctcagcctcccgagtagctggtattacaggcgttcaccattacgccgagctaattttttgtatttttagtagaggtggtgtttcactatgttggccaggcttgtcttgaactcctgaccttgtgatctgcctgcctcggcctcccaaagtgttgggattactggcatgagccaccgcgcctggcccctttgcccatgtttatttctatcgaattctgacagacctttgcccattttttaattgggttatttggttttttgttattgagctgtaggtcttttgcttcttctcacatgttttctagcactccccctggacctgttggaagcaggtcctcaataatgaattgctgaatgcatgaatggatgaatgaatgaatgaggccaagcccttttccaagattctctgatctcttttttcttattgtgctctgggggagcttctagcaaagtctagctagctttagagcagcctgtcagtcacaaatgacagctcagctcaccaggttctcatgctgcacaactctggggagcgccattcacactgcagtgtaagagaccggaagacagcgcgttctaaggcaggcgctgtaagtggggcaacgtggagatgtgcattgccaggcagccccagagctgtttgtaagaatccaattgttgccctcttggttgagcttcacactgctcccaatgacaggatttgccttaaattttctgaattaggccgggcccggtggctcatgcctgtaatcccagcactttgggaggccgaggcaggcggatcaccaggtcaggagatcgagaccatcctggctaacacggtgaaaccccgtctctaataaaaatacaaaaaattagccgggcgtggtggcggcgcctgtagtcccagctactcgggaggctgaggcgggagaatggcgtgaacccgggaggcggagcttgcagtgagccgagatcgcgccactgccctccagcctgggcgacagagcgagactccgtctcaaaaaaaaaaaaaaaaaaaaaaaaattctgaattaataccgctgtccccagcacggggttagatctctgttggactctcactgggcccatttggggctggcaccaacagttgctggttttacttggaggtgggggatggtcattgaggtaggtcctcgcagagacccctcagagagaagagaattctggagagaaggaaagaagcgctagctatgaagggtgggcggggctccaggctaggtaattagcaagggatgcagaggcacccgggaacccaggaaccagtaaccagtaaccgaggggagctatcaccacccccgggttgaagggcgaggggagtacgtggtgtaactcagtgcagctgggaggaggcacaggccaggtgtgagcatcgcagaggtgcaggcagggttagggacgctgaggcacccaggaaccagcgaggggcagttcccaggctaaggctgaaggggcgagacagggagctgtgttacctcgaaagctggaatcctggtgagcagcccacggagggaggcaactcctgccagcaacgggcacagcgactgggatgccagggaagacaccccctacttcttccagcggggagcctgcattctccagcttcacccagtgggcagaggagcccagctgctgcggggcagagcagggaggagggctgagagtggcccccggctacatcttcccccaacccttggagcaatgaacacctgtggtgagccaggccctacgccggtggagaaggcaacatggagcaggctgaagcgtctggctcgcgcatgcacacgtctataccactagctggtcctctggcctgaggatgggagctcaggcagccaagggctctttggactgttcatttgatgtccttggtgaggcctctcacccccgcagtcaagagccctcctgtcctttttccatagcgcctgctctccgtgtgacctgaggaaggcgccgctgagtgactgacactatttttttttttttttttttgagatgaagtctcactctgtcacccaagctggagtgtaatggcgagatctcgggtcactgcaacctccgcctcccaggttcaagtgattctcatgtctcagcctcctcagtagctgggattacaggtgtgggccactatacccggctaatttttgtatttttagtagagatagggttttactacattggccaggctggtctcgaactcctgacctcaggtgatgtacccgccttgggctcccaaagtgctggggttacaggcatgagccaccgcacccagccttctcacctgtcttaaaaagacctggcagaggcctctggaaggaggccaccagggcatagagagaggtgtggagaggtggggcaggtagcagagggagctggatggtgtggggacggtgggggctggcagggggcaactccagacacagagtctctggagagctggtttcgggccgggcccatggtggagaggcagaggactggctcgtggacatcctggatttctgtcagcatgtggaggcaggacatgcctgggctgaggacaaggatacccctgctgagctgggggaccctgaagggtgactggtttaggaagaggggtgaagataaagcattttttctttacttttttttttttgagacggagtcgtgctctgtcgccaggctagagtgcagaggcgcaatctcggcttgctgcaacctctgcctcccgggtttaagcgattctcctgcctcagcctcccgaatagctgggactacaggcacacgccaccacgcccagctaatttttgtatttttagtagagacagggtttcaccatgttggccaggatggtctcgatctcttgaccttgtgatccacccgcctcggcctcccaaagtattgggattacaggagtgagccaccgtgcctggccaagataaagcatttatttttggacttgtcaagattgcctcttggagacatctagggggaggaggcagctgaagtgtgggtctaggaacctggcattgaccagcagcacagcatcacctggaaactcgtcaggaatgcagattcccaggcaccacctagcgctatggcgtcagtatctgcgttttcacaagaccccctaggtggatggaaggcacattccttggagtagctctgggctacagctttcgtaaggccctgctgaacagcagcactgacctcagtctatgacacggagtctcagctggggagcgaactatccccccacgggacacgtggcaacatctggagacactctggttgtcataaatggggaaggggtgctactgctgggtagaagccaaggatgctgttcaatgtctggcaatgaacacaacagcccccctgcaatgaagacagctccggccccagtggccaacagcagccaggatgctgagccctggtcctcaggaagtgcgcacagaaggtggcgagggcatcccggcactgtcttgagcctcagatttcccgcctgggcttcgccccctccttggaccttctcccgctgggcgccgagaaaccacacaaaggccagacattgatgagtcacttacagtttatttttgcctgaaagtatttcacatctctttgtacacagctacgtgacagtagtattaaccatcaggaaaagcaacagtgcgaggggaaaggtggcatgtcttgtttcttctttttttttttccttttttattttttttatttttatttatttttttatttttattttttttgcttctgcttcttcccgcaccagagtgctgtgaagtatgggaccggaggggggaaagaaaagaaaaccaaacaactgaaaacaacaacaaaaaacaaaacacaaaacagaacacactcacacacacacgaaataaaacctggcacggaaaatgaattaagactggaacccagtttcttttttttttccttttttaaaaaaatgagggcatagtgggggggtaataaagtctacctagcaaagtataaaacgacaaaagcatggtttccattgaataagattaaatatatataaaacaagtacactgactgtggggtaggtttggaggtgccggaggagggaagtatttgtgctaaaccaacagaaaaaagggctggggggagagggggaccccaaataaaccatcaacgggctgttctgtacagtgagggcttattaagaaaaagccgactgtttataaaagaaacggaggttggtttgtcttcggagcaggtggggacagaaggagtgtcttcgttgcagtggtcacatgtggggggtggcgggggtggggtggggagggcagtcggactggcggaggcgacacatctctcttttcccaagagaccatgcagagaggcgggcatgcatggggccacgtgaagcacacgatggcagggggagcccaggggtgacagagtctccgttggggacaggggacagcaaaggctgacagggacaggagctccctgggggtggggaacagctcttttaccggggtggactggagagggcgggttagcagcctcccattcaagtctaaaaggtgccgagagaaagagcttgggccttagtggagcaaggggatcttaatccctcctcctccagcctgagccccacctcgtgagggagttggagacatttggaaatcagaaacgcacagtggtgggtgggggagtgggcagacagacagacagacgagagagcattagcatagagaatccattacgaaaaagcaattaatttttccaaggaggttctttttttttttcttctttttgttgtctgtttgtttcctttaaaaaaataacaataatactaccactaacccgacagctgactggtttatacagtactacacgccaggtgggggcgggagggcggtggggtcgggcgggggggacggtcaaagacttcataaataagaggcgggtcccagacccgcaatttgtcaacatgtcttaaataggtgcattatttaaatcttatgtacaacaagaatcactttgcatagcaatggtgaggacacaggacgggtgcagtgatgtgactgggtcttcttgtcccaagggcggggggcgagttcgcagctcagctcggagcctctaggaagaaagcatccttcgtccggcccgcaatggtggcatcggagttgacttttcccacacgacggcatcaaacacaaaggcaaagaaaatccacaaagggtcccccaccccccagcccacccccaaacccctccccgacccgctgatgctcctcttgttgctacaaagtccactttagatcaggtcaaaggttccaattacgaagctaaaagaattcggcgggggctgggcgtgcttgtgggccccctccccaccccctcccccctccgcccccagaaagactccccatctatctcacagccagggcaccagggtgggaccccaggaccggctgctctgcggctgttagtcaagagttattttgtcgcggttgcaaacgtcttcctgccttgagctgggagcttcaccaggcttcggtgtagcggacgtccacttccttcaaattgggaagcttggcctgggggtggcaataagagtccttgtcacgtgtaggccattcccttgcagaagctgccagtgcctggctccacccgcattgccggctgggggtctctgccaccctctccccaccttggtgctgtgggctacctgggctcttggaggggtgggtggccttaggcagagaacagagcaggtgggatgtgccctggccccggagaaaccaggcagcggggttcccatgcccccgcctcagatggcctttggtctctgtcttcgcaggtggaagcactggggtttgaatccaggccctgccacttgctgctgcgtgaccgtgggcagataacccagcctctaggggcctcagtttcttcctctgtgggcccatctgactctagtccctggctcaaaggatggtgctaggggttaaataccaaatgtagaaagcccagggcaccgtatatgccctatgaaaggaaattgttctcatttttactgttagtgatattctcatcgttatcagagaatggacagggtgagtgacgtggatcccaggaaatcccaggtacccagggtttggcttagattcttcccacttgaggctccccctaggctggatgcattactcgactctgtgattccacctgctatgtctctccattgttttctgctttctgtttctgctacccagacttccacttttctttatgaacagttggctttttttcttaacaagcctccactatacagagaggtagctgcctcctaactggcctcatgcctttacatcctccctcccaactttcctgtacactggccagcacactttttggatacatgtacacgtatgtatgcatgaacacacacacatacacacatgcacatgcaattcctcgctgctgctctcctgtgctcaacaaccctcaatggctccccactgcccaggcagaggttacaggtggggacctgcagccacctgcagtgctataaagcatactaagccagcctttcaaaattaggagacttcacagacgaatctagatttcaaggttctcttgaaaaatgggaaggtctggccagactgggcagtgaacagtggggcgtggcctgcctggcactgagcagaggcccctcctccaaaggacaggcagctgctgtttgctcgagtcccctccacagggaggccggtcacaggctggcagcattaagttggcaccatgtctctctcaaatgtgtgaaaataaaaaaatcgactgaaagtgatttttcttcccaaggggcctttcctgcactccccatgttctctttccagcttggtctcacagtagcatctgactttcagcactttgaactcaagataatccaggcagcatttctcaaacacgagtgtgcccagaaatcccccagggtggggttacctggggtggcctggatcctgcatttctgttggcccccgagtggtgccgagggtgctggtctgcagacgccaccctgagggctgaggtctaaacgctgggatgggtgatctgctggctgtgcccctgccaccttctgtgtcccatacgtcctctcttggacctcgctctctaccgactgtccctcctggccccaccaggccctctgcccgccttggtttgctgagcttgcctgtgcctgccaggagggactatcccccggaaggggactgtggcagccacacctcggtgtccctgtccctgacatgggcctggtacacagcagaggctccagaagcatctggaggatgccccagtgagcacgccctggcggcaggaggcctggctgtaggaggtgggccccggccaagggctgccgggggattccctctaagtagcttccagagcacgaaggtgccagcgtggctcacgggtgccatctgtgccttctcrcctttgagcccagcccttctctcccaggatgctggccctctgccagtcccgcccgctccttctggggcagctggtacaggcccaggaggacggggtgacaggaggcgactgagggcctggctcctccaaccttcccaagatgtgcacgtgtgtttcttaaaacgcccctgccttccacsctccgatcctttttctttcccggatttcacttgctggcctagtgccggtgcagcgcagccctcagtggtgaggcaccagccctgctcaaccctccctgcttctactcctgctccctctcaaaatatttatttcctaacagccagagcatgctttgaaaagcatgactcgctgctctgctgtgacctgtgagggctttttccatccrgccccagcccattccctctctcagttcctggttacatttgctgcaaagccaggcctcgcccatctcttctgtctcaggaccttggcacttgcttttcctctcgcccttggtatttctggcttcttacrttttgggtctcagctcctgcggcctcttcatcaaaggcaccatccctgatcaccccaggccacacaggccttcctatttccaattacttccctgctgcttcctctttgtcactctttttgatctgccattattttatgtattgatctgtagatgtcatcatcctttactggagaacgagctctgtgcaggagatgcaccagcatccagatgctggctagaagaaggaggggaggagagtggggaggaaggagggaattaccttcagatcttcgtaggtgtcagctgagagcttggtgctgttcatgtttaaactgcagagactcttcatggctgcacaagagacagatacagttgttaggagagcgaggccccaaaggtatgaaggtatgggatggccaagctggaggagctcaatgcaggtgccaggccccctgttaggagatggggctggggagggaggtttcgtagacacagccagggtaggtggcccactagacaccraaagtctatttcaggcacgtgctggtctgaacagagccttcgttttcttcccaccctctgagcctccctcccttctggtccctctgtcgtgtgcccccactgcctggacctgatgtccccagagcttgcctgccacaccccaratcaggcccgaggcctccccactaagggaaccccggatggtccccccgtcgtcattgactcggtgctgcttcttgaaagcaagcctcaacctctggtttgtgttggagtcgcacggggggcagacccctccacccactcccagagacgctgagcagggccgcagcagggaccaggaatctgtgctgttgatgaggaccgcgcccccccgggggactccagtggaagcagcgcatctgcatttgcagccaaactggccgagcgctgccgctctgcctccactgacccagtcacctgctcccacctcctcccaagccacccagcatttgccagcggcccggtaggagtcatggcccctgctcagggtgcctcccccttggccaactcccacaaatctgtcttcacacccagactcaacagcacctccccgggaagccttttctgactcttcccactgagccacgggtcttcccrtctaaagcagtgggcctggaaaagggaaagctggtcaaatacaraatcccgggctcaatatccctgaggctagttcagtcacctggggtttggcacacaggaactggcctttctaggttccttgagaattctgtgcctccttctattatgacagggcttctcaaatgtcaacgggcacgggagcctcccaggcatctgcttaccgtacggtgtctgagtcaggaggtctggagtgggcttgggaatgtacatttctgaccagcccccagaagacgctgccaccactggtcaggggaccacagtggcaatgtactacagccccgtccttgaactcgacccctcagtggactgtgagtgtcaagaggctatgggctggccttactcattttttctattgcctctagaatataagctctctgaggttagggrtatttttccctgtgttgttcctggcacwtggaatggtgcctggtccacagcaggtgtgcagtgaacacgtttgtgaatgaacgaatttctctatctgtgcatggtgcaaagtcagtgcttggccagtttggctgaagcaaggaaggaatgaatcaagcggcccctcaccccccagctgccccggaggcactcacagctcagggccagcaggccagcgtctgtgaccggggtctcgcacaggttcagcacctggagcatggtgaggtgttccgacaggagccgaaggccagcgtctccaaactgtagagcacagaaactctcagccctctcccggccactcctggggaagtgactctgaggctggggcagaggtggaggaaagggatggggacagagcctggctctgaggcccatggcccaccaagccctggggtctgggctgcgttcacgtcccctaaacaatcccacgcctctctgaaccgggttagaatccagcttctgctgttgggagtggagccaggccagggcccccttggagtcagttttgcctccatgaaggagggctttgaacttgtctctccctagcttcgagatgctgcctaggtggctttctcctgctgggtggacagtggaaggacagggctgggcygggggcaggctgcagggactgtccccagtttctcctctggaaaattagggtgagggtagaacctgcacttcacaggtgtgcagtgaaggccccttcatctgccctgtgcagagtactgagcagtgcagttcacactgagctgggactcagcagccactggtgtyactataacaaaaagacccagaagcctcctgcgcagccccccgcaggccagcgaagcctggctcacgtctcagctctacctctcagaacctcaggactcggaactgggcacattatttccaaatgggaaatgggctgcagggcttcatgaggtcctcaacctcctctagcctcagggagtgggtgctgagcttgagggaagggtcgtgtggtaagcaatgcctggggtgtaggcagggaagcgggtgaggggcagggaggagggtgagggggcagggaggagggtgaygggggcagggaggaggatgaaggggtagggaggagggtgaacgagttagggaggagggtgaggggacagggaggagggtggggggcagggaggagaatgaaggggtagggaggagggtgaacaagttagggaggagagtgagggggcagggaggagggtgagggggcagggaagaaggtgcgggggcagggaggagggtgagtgggcagggaggcgggtgaaggggcagggaggaaggtgaggggaaagagaggagggtgagggggcagggaggagggtgaggggaaagaggagggtgagggggcagggaggagggtgagggggcagggaggagggtgagggggcagggaggagggtgagggggcagggaggagggtgagggagcagggaggagggtgaggggagcagggaggagggtgaaggggcagggaggaggatgaaggggcagggaggagggtgaggggcagggaggagggtgagggggcagggaggagggtgaggggcagggaggggggtgagggggcagggagaagggtgagggggagggaggagggacgggggagggaggagggggagggtgagggaggagggtgaggggacagggaggagggtgaggggagcagggaggagggttaaggggcagggaggagagtaagggggcagggaggagggtggggggcagggaggagggtgagggggcagggaggagagtaagggggacagggaggagggtgagggggcagggaggagggtgagtgggtgggggggtgagggggcagggaggagggtgagtgggcagggaggagggtgaaggggcagggaggagggtgaggggaaagagaggagggtggggggcagggaggagggtgagggggcagggaggagggtgagggggcagggaggagggtaagtgggtagggggagggggagggggcagggaggagggggagggggcagggaagagggtgaggggagcagggaggagggtgaaggggcagggaggagagtaaggggggcagggaggagggtgagggggcagggaggagagtaagggggacagggaggagggtgagggggcagggaagagggtgaggggagcagggaggagggtgaaggggcagggaggagagtaaggggggcagggaggagggggagggggcaggaaggagggggagggggcagggaggaggctgaggggaaaggaagatggtacgggggaatagggaggagagtgcagaggtgaaggaggagggtgtgggggactgcagcagggcgggaggacgtacctgagtggaccacaggttcagctgcttgagcgaaggcagtttgatgaggtgctcggcgcaggcactggttacattggtgaaggccaaactgaggttctccaggtttccgaaggagccggagctcagcaaacgagccaagtcagcgtcctgcgggcagacgggggagaggcctgagggtgctgctgggagttcccgagaccctgagccctcctatcccctatcctcctcctctcccctcgccctacagagagctgttcctggggggcggtaaatcccaggagctgagatgggggcacagctcggtgggatgggccaagggggtggccagagagggaggggctgccacgcatcccatggacgacagctgccaggcggaggagaaagcctccagtgctgtgactcacaccctgaggcaccagcggggtgttccaaggccacgatcctcccacaggcgtctgtgtgtgtgtgtgtctgtgtgtgtgtgcctgtatgtgtgtatatctgtgtgtgtctgtgtgcacgtttgtgtatgcatgtgtctgtacatgtgtgtgtctgtgcacgtctgtgtatatttgtgtgtgtgtgtgttggtgtgtctctgtgtgtctgtgtctgtgcatcagggtgtgtgactggctgcctcactcctgggcagcagctcatgccaacactgaggccacactcaactctaatgcctgaagacaccagcgcatgcctgagcaccggactgggaggttcctaagacaacctccacactcccctccatccttgagtgtcagcggccctgtggctgcccggaatgaaggctgatttagtgtgtggccccacacactaaatctggaaaatgggatgtaagtagacatgtcaagtagaacttccaggaagtttcttaagaggaaggggcacgttctccttcctgctggctggaatggagacaagaggtctggagcctgagcagcccttttggtccaggaagtagaagccatgtgtcaaatataatgggggcatcagaatagaaggaaataagacccttaaagaccttgtgaaatgcgaatggtaagatacacaagcttccaagggttgctgtgaggataaaacaaactaatagaagagcatctgacacacaaatgctcaaggtatatctgctattattccaagtactattaataactagatatcaacactattatcaccaacaatctgtatcatattttaacttcctttttggttttcatttctcttcctgtaacccagctacctcctggaagagctggcgtgttaagtactagggggtccttgtgccccgccctccatcacctcccatctcagcagcagacaccacctgccgttccccaacagagagraccaacccaccttctccatccagccccaaagagaaccaaaccaactcactgtggacttggagggcagtgttagcctggtgggcccgcctttcctttgctgcaacagaaaccaggctggttacaaccattcttttccccaagtttccattctagacttccacctctgttaacaacactcatggagccatcgttattttcttggtggtacaaggcaacacggtggtcttggtctcaggggcaaacccggagatgaggtttgagcacaggtggtttactggagggtgatcccaagaaacaccagtgggagagtggggaagtgacactgtggctacctataatggaaggggtgttatcaatccagctatcactgggtgggtactggcaccaaatcccaccgggggactctaagaaatggtggagaagccatgtctcaaacatatctcactgaaggggtgagggagctggggtatttctacacactctccccagaagggactggttgagggctgctccaggagatcagaaggcatgaatttcctgccccttccgtccttctgtgtacacatgtgtgagtatatgcatgtggacatacaaagtccttcagcaaagaggtgtgggtgctggcatttggaagttgggtcccccatgtactgaaatggaagggtctaagggacatggaggagggagggtgggcaatgtcctggccaggccccaatgagctgtgtgactctggggattgctttgcttctctttgattacctgaaaagtggcaggtggtaataccaatttctkgggtttggaggagaattcaacgagattgaggtccactcaggtccaagtactagctgccccgcatcccgccctggccccccctggcctgctgggcaggggagtggtccggagcagccggggactcaccagctccttcagctcccgctgccggtcacacagctgctcgtacatgcgcttccccacgtctgtgctctccagggttgagatgatctgcagttgggtgtcgttgttgtcgatgatgttgtattccagcatcaagcacaggatctgtccagaaccgcaggggtgcattacggacccggcctgccaccctagctcagcacactctgtgcaccccaagggccttgttktgaaaaccagcaaccccactatcccctttctgcagccccggctgtgtaagcctgggcaaatcacctgcccaacttcctgcttgtacaatggtagcaccagtgaccacgcactgaggttctccaggttcaaatgtcaatggacatgggagtctcccaggcatctgcttacygtgcggtgtctggacatggggcaggcccccgggggatgtttgcaggcccctgagcactggtggaaaggccagaagttaagacacctctctctccccagttccttccccagtggctgtcatgaagtaggtgctcamactcacggaatggctcagagccctgggcccatctaccacacagcttcctagagggcctcatgactgcacatgtggctcttcggcctgggggtcaacacgcctgacagccctgcctctgacattccctttccaatgacgattttttttttttttgagatgaggtcttgctatgttgcccaggctagtttcaacctcctgggctcaagtgatcctcctacctcagcatcccaagttgctggaactacaggtgcatgccatggtgctcagttctagracttctcactcaccaaggagcaggtcactcagcccacgcttctcacagcgcctcttgcctgtctcctgtctccctgctcagccctcccccatggcctccgaatccctgtcacaggacagccaagattaaatccaaactccttcccagcacctctaggtacccagaaggctcttcatgcccatccagccacatcccagacctcttgccccttggctccctgtgttccagccaccctggcctccagcaagcctccgcccgggatgtccccacagcctgctcagctcccaccttcccgctgcctcttccccagggctcacatctgcccgaactctcatttccacgggagctcccatggctttgctgcgcctgccaactcttcgatgctcttcccactgaggggtgaagtctagctcccacggctttgactgagggccggccgcggtgactcactgccagcaggaggatgtggcagaagtgatgccgcctgccttccaagggaggctaagttaaaaagtgacatggcttctgccttggttcccttgggacagttgctctgggagtctcaggcttctggggactttgggacagttgctctgggagtctcaggcttctggggactttggagcgtgcagggagagagaggagcagcagcaggtgaggggtgacctgtggggctgggtgtgtgtgttcttggcaggtggacaggctacctggaggccacgaggtgaagggtgtggctggggagccccagccgccaaagccctcattgtctgaggcctcttaggccaatgcgagaagccttggggctaacccaacctggccccatctgactgatgaggccccaggtgagaagtgcgtagctgcgcccaggtaccccaatgcccatgtgcaaaagaaatgaacgatcttgttttaaagccctcacttagaggtggtttgttacacagcaataaatgagcagaacagaagcgtccccaaccccactgatcaatggatcagctggatcacaacagaaacaaatacactgcatgatgaaggctcgaggctcccactaagctcaggacggctgggactgcacgcctcacccactgccccccgtgcctgcagcagctcctggctcccagcagatgctctatcggcacggacaagggacggggagccagccaccccaccagggaccccgaccagctccttacctccaccatggtctggttccccctcagtgccaggagcatgcagggacccagcttgttttctgccagggagagcaggaattttttggtcttgtaacaggagcccatgaggatgtgcacctgtgaggcaagaaggcccagrtgaagggacakagacacccagtgccagcctccagcgtgctggcaggaagtgagcccaagagccgttgaacagacctgcctacacgctgtccagacagccaggtgttctaggatcaccaggccccagggggatgcaagaaacccctccctggcacacgatctaacccagatgaaccctgaggacactatgttgagtggaataagccagtcgcgaaagtcacgttcatgatccctcttttcattctgtcttttgccttttagtagtacctgatttaactataagccccagctcagcaagggtatcttttgtataaatctataatactaaatgcaataaaagctgactagaatgcaatttaaggtctcttgatttaaacaaatgtagcccttgctatttttattttttttgagatggagtctcgctctattgtccaggctggagtgtgtagtggtgcgatcttggctcactgcaacctctgccgcttgggttcaagcaatcctcccacctcagcctccctagtaagctaggattacaggcatgcaccaccatacctggctaatttatttctatttttagtagagatggggttcaccatgttggccaggctggtcttgaattcctgaactcaagtggtccacccaactcggcttcccacagtgctgggattacaggcgtgagccactgtgcccggcccttgctagttttttcaagaatctgtaatagaatctctaaatatgtaatctcctgccattataaaagytctgatgtttgaaacacttattacgttgaagttttaagcagaaggagactctgactccacttacatgaggtacctggatagggaaattcagagacagaaaggaaaagtggctgccagggactgaggccgggaggaagggggagtcagtgygtaatggatgctgagtttcagtttcggaagataagaacgttctggagatgaacggtggtgayggttgtgttacaacatgaatgtcttcagtgtgactgaacrgtgtgcttacagatgcacacttttatatgatgtgtattttactgccaaaaacaaaaaagccccctcccctgctcccctcgggagtctgctgacagttgatcctttgaattcctggcaccgctggaaccasgyagaaacttctaggcagccttcgcacatgtatggggtaggggacgtgacgaagcccagccacctctgccaagcccgctgtgagctcggaagggtgttttgggagactgcctgcgccccaggaatccaagaattggcaaatcctgcttcctcttgggttatgtgttgggcggtcttttgttctggtgcatgggcgatgggggcccaagggcaggggtccccggtcaccggggctggggggaggcctcgacaccccaytggctttcctccaacttcacacaatggcaaatgcccttggcrgtggagaaagcagcctcatcaaggggccggcttccaagccatgcatctccatggcaacaacacacttccatccagcggctgcctgcttccttccttgtgtatattttttccgctccatcatgaacagctctggcatacaaatgcaatctctcgggctgggaagccgccagctccctgcgctttcttgcaccgaatcctcacattgtagggtgggggcgggggcgggggggcgcagctgagcgttgctatggtgaagctgtgacatcagaggagaacccgagaggtgaccgagagcgcgagagaggtggtgcaggctggcaggggcaggcatgttcctagatgcgcagggccctgagaggcctggggtggccggcgaggagtggcgagggagtgcatgaggcaaagggcctaaaaataagcccttttcaagaagctcccaggggcagcgcctcaatttgtcatcgctgcacaaacatctctgctgagttcagtgtggacagccaaaccagccacccarcagagaggagaatcaccaccggcgtcatttccgmgcagcgactgtgccggcccgccgggcgccgtgcatctactgttgcatgcgatcgctgcggtaacctcgagaggccaatgcgaggctcccggacgaggggctgaagctggcagaggcaagttaccagcccaaggtcaacaagctagctcccagcagagctgcgactggaagcccagtttgagtgtgggagcaccagtgaccagtaaatggagctggttttctcagcaagtggagtcggcgaggctgctggccactagggtgcagcatctgccctgggggaggaagagtctgtggccctttactcctggaagaagccatgtgtgcctggccaaggaagggcttggaaacagaaggcctgtgggaccccaggcacgccaccgaacctctgtgggcctctgtttcaacagaggtgtaattcagcaacaaggatgcagtacagataaaaaaggatagtgcatatgaagtgcyggatacagtgccgggcacaaagaaagttatcatggatgcagctattggtttggtgacctcagacccctcatgatagtgggaacaatccccctgaccgcgacacctccttgtaaggattaaacaagctggtggacctgcagtgccttccagaatccctggtcccgttgggcactcaatttcttgtaggaacataaccatggcaatgaactgtgtgaccttaggcagtracggcccaggctttagctgccttgggtataaaatggggcaatgacatgtgtcgtcttctcactgtgctgtgagagctgagtgcaactgggaaagccaagtgcttggcttggagcctcagataagaaatgagtaagtgacagtcacggtcaccatcaccaccaccaccaccaccaccttcatgatcagcactgtgttagcctggaaactccggggctggccccaggggatgggggacggctgttttactagtcaggcatggcaagcccagggacccctggaagtcaccccactggggtcccactgcktaccatgctggcgaacagctccccgtcatcgtcgcaggccacccctccggggctgtagagctggaaccagccatctttgccggcccgcacgctcagcaggcatgagtggacctgccagacaagggaagacacaagtgtgagctgcatgcagccccggtgacaagggcgaccatgatctgcacacatgaatgggaaaggctcaggcaagtcctgcagtcaagaaacccgcttaactttgtttcctccagcaacccccagccttccaccaaatgccatgaaaggtctttcgggaaataccgtggcccccacaccccaggggactctggctactggctgtcagctgcacaggagggagggcaggccccggcttgattggctgatctgaatgaagcgggcctgtggctgcagcaggtagagatgcccagagcaaccgcccacaatcagccccttttccctttctcctgccccctttctccttctgctatgccttcctctgggtggggccatctcctgggtctccgttctctgtttggttctctgtcctcctctctctgtgtttctaactcctctcccgtgctctctgccctctttctctagaaacctctccctgctgcctctctggggttctgctgcccccagcactgactctccctcttgggtgtgtgccttctgccctccctttcttgacttgtgcaggcaccatcctcccctccaggtatctgccctgctaayctctctctctctctctctctccccctctttgggactctgccaccctctcttgttaggtctcatccccacttccttccctgagtctttgtccccctccactgaaggatctgtccgtggctgggggcaatttcagtgccaaaagcacagctctcacattccttcccagagctgtgtgtctgtgtggatgggcctgtttgtgcatgtgagcacacgtgtgtgtgtgtatgggaggaattccacatccactctggcccctgctgtgattacacagagagagagggaaggagggagaggatggagagcggggagagtgagggagagagacagagcatgagagcawgggcgtgcaggaaacacaaaggacttttccccacctcctcctgtcctccgaagaaagctgagagaagttcctcatcatttcctttaggaaaggacrattggctgccaagaatctgttacccacagatattaaactgatcacaacccacacacgagcacacagaaaacaaaggcagtggcttttatttttccctctgagctggaagaatatcaasggttccctyatcgacttcaaagcaataaggacttaggagtgttgagatgctattcaacaaatatagcaaataattttaaaggaaacaactttggcttcatttaggaaggagaaggtagaagggaagggagaaagaagagtgaggaggaaamgggagagagaatcagcagagaaaagaaagaggcaaacaggagaacaagggcctgggtgtgggaccttggccaggggagctggctccttccagaccggcaggtcactcggggcctcatgcacatttccctggtttgagaattaccctcccagcagctggccctgcctctctactctgagaagcagctgatgccacttttgttctcccagcgtcaaaggctgggtttgaatwaaggctcagttcccaggagaaytctgagackctgtcttcacaggtggcaaggaaagacttaagtttaagaaaaatggagacactcactggtccctgacatttaaaagcaccatatccaccgtttctcctttttccctccatgcctgaggaacacttagggaaatcggtgtttagaattgcggtgttttggaactasagtcttcaagatccctccagaactcggtttttcagtgtggcctggagaccagcccctcagaaccacttgggatgcttgttcaaaacgcatcaaaacgcatatgcttggctccacccaggccccgtgagctggaaccgggaagggatgcggcggcaggggggtctgccttttgaacaagctcctcaggtaatatagtttgagaacaagtactctagaacttytggaattacagcctgataaactrtgggttctgagtcagagagacctgccatggttggacatggcaagaccttggtgtccatgtgtcctcagattccttctcaaacaccatkctccaccctccagactaaggtccagtttgacccatttagctaagtccagccagttcagtaccaccttctccaggaagcctcctggggatggctctatggagaggaactccccctgtcctctgctcatccttccccctgttctgccgggagcacgagtctaggtctgtcctcaactgkgagttagggcgctaccacacccagaactcatgcacacagagaagcaggctgtgagcatctcagagcacagcacacagtgcagtgagatggttatcagcaccaggctcgaatcttgcctcagtcgtggaccagccgcgcaacactgggaatactatagaagacactcacagggatgctgtgaggcatgagaaaaggaatgtgtgtgacccggggcacagcacctcctaaaagacagctgctggtgctgttactatcagatgatgcgggcccagggctacaggctggcttccttgcctgcctaggtccctgcccatgtgcacaggctcaggggcagaaggtggaaggctgccctctccctggaagcccagctttggtgagggacacagcagcccttcagggaaacccttggccaccatgaccgggaaataaaaacccagctctgaatcccagctcagattccttgctctgcccagtgattcacataatagcagaaccagacaggatcaaaatgctgcctcagagctggttgagagctgccatgccagcccagcccgaaatcaaggcctcggctgcgggcagaaaccaccagccagtggaaaaccacccccggtgagccggcgtttacagtaaaacactgacatcacaggctgggctctgcaccaggcggggatgtgtttatacacaggcaatgggtctctgaaagctgttctgaatgcctgttggtgacaagcttcagaaggcctctaaggggccctcgtgcatcctgccatccccagacagccggcctgagatgcagaaacaaaggcctcacctcttgcctggggtcttcggcgaacctctgaatcacgtacttcagttccctggaagagacgaggyggccggagttactgccggggtctggaactgagtgggaggtgtgggaaggggaggggatggtgtcaaggaagaacgggccagggagctgggcaaggcggtggatcagggacacgtgtctcaagagaactgccaagaggagccaccactgcctcccagaatgcatgsgccacggagggaagacctcaggacagaggccgtgcgtgccagaatggaatgagggcggtgcccagacactcacttggtgaacttctcatgtgcgagagctctgcaacaaaaacaggggaaaacacggcggttaacagaagcgtcggaaacagcacaatgttcccaagattaacctctggggacgtctagactttatgtctgattcaaagaatgaagaggaatgtgagtgaaatgccaacattttgtccccactcaaagctccaaaacaaaggccttctktgaggaggcggcagatcagagcaacatgaacacactgggccccccattcccgaaagttccctgtgcccacacctgtgaataagaggggctaagctgctgcctgagcatgtgtgggtgcatgtgggctccggagacccaggtgtgttcattaattgttccacgattaaggcgggcggcactcattactgcacacatcagcggccatgggggaccattcttctaagacagttgccacagccaagagcgcccaggcctatggggacggggactgaggccaatgacgtcacgactctgctgagactgagcgcctcttaggaggtggatttctccggcctcaagtactggggaccctcggggactggccaggccagcacatggggcaattactgcgtgtaatgtgcccttacagaggcagcatttcctaaacacgcttggtaatcggctccttcgagagccccagctgcctcccgaggctkgctccttccaacctcttgaaagagacctggaggcatttcagggcctggttattttgacaaagccttctcttcaggccattatccaccagacagcgttctctctagtttccagtgatcaattcaatatggtgctaggggccggcaagagagaggcagagggtctgtttctggccaggtttgctgcagagcctgagctgagcgttgtaccgggcgtaattagagcgcttccagcatctcagtacggcacagcgagcaatgctacgcgcattatcttttgattcttactatcgccctcggaagaggagcggcaggtattacggttcccatctggtgcataataaaagacgataactgcacggcctgccaggagccatggggagggctctgtttgcattcttagctcatgaatccttgtgacaatgcagtcaagcagctcctacaatgtccctgttctcctgagttccccatttttctgagggaagatgtgcctccccaggggtcccacagctgaggacgtggctgagctggtaccgacgtctccagggtcttcccgctgtgacttcgctyccccataacatgactggccccccactaaggccttggtggacaactgaggtttgtctcacaggtgggagggctccggggatgcacacgggacttactctttggggaatggaatgggttgaagcaaactggccagagacggtctccagtcatcatagtctgacctasaatgagagagggtgacagtcagctttggttgggacaaggaaggtttatggcactgtttttggtcccagatgggccaaaagatggggtgagagcctggcaggtagtcagtggcactgacttctccacccacttccacctccaggatgagcaagtcaatgttctcagcgtggcctcaaggactcacaactgggcctgtgcagagacttcctcatggcacccgagggggtgagctgtctattccccagacttcacaatgccctttgaaccaaggctacgtgatcattgttcatgccctctttgggaccattagggggtgttttaggctgaactttgccccccattcatatactgaagctctgcaccccagtacttcagaatgtgactgtactgggagacacaacctttaaagaggtgattaggttacaatgaggctgtagacggatgtccttagaagaagaggaaacacggacacgcagagcaaagaccagccaggactcagcgagaaggcagccatctgcaagccaggagagaggcctccagagaaaccagccctgcccacaccttgatttcagggttgtgccttcccgaactgagagaaatacatgtttgttgagtaagctatgaggttgatggtactttatagcagtcctagcaaactaatgtagggggcttaggctgggaccctggggccattctcacctttctgtgatcagaactgagggaaaattctatagacagaatcataaacaacaaacattctaagctgtttgtttgtagtttgggtcaaacctcctgatttgttggatcccttttttttctttttytaaaatttattattattatttgagacacagtcctactctgttgcccaggctggagtgcaatggcacgatctcagctcactgcaacctccwcctcctgggttcaagtgattctcgtgcctcagccttccgagcagctgggattataggcgtgcgccactatgcccagctaattttttgtatttctagtagggatggggttttgccatgttggccatgctggtcttgaactcctggcctcaggtgatctgcctgcctcagcctcccaaagtgctgggataggccaggtgtggtggctcacgcctgtaatcccagctgctcaggaggctgaggcaggataattgctagaacctgggaggcggaggccgcagtgagctgagatcaccccactgcactctagcctggacaacagagcgagactcagactcaaaaaaataaataactcaaagtgctaggattacaggtgtgaggcaccatgcctggccttggtggatacttctatttttgctttcagacaacagcttttcttcttttctaagagttgatgctaaatacccaggaatccaacttacaagggaagtgaaggacctcttcaaggagaactacaaaccactgctcaatgaaataaaagaggacacaaagaaatggaagaacattccatgctcatggataggaagaatcaatatcgtgaaaatggccatactgcccraggtaatttatagattcaatgccatccccatcaacctaccaatgactttcttcacagaattggaaaaaactactttaaagttcatatggaaccaaaaaagagcccacattgccaagacaatcctaagccaaaagaacaaagctagaggcatcaygctacctgacttcaaactctactacaaggctacagtaaccaaaacagcatggtactggtaccaaaacagagatacagaccaatggaacagaacagggccctcagaaataataccacacatctacaaccacctgatctttgacaaacctgataaaaacaagaaatggggaaaggattccctatttgataaatggtgctgggaaaactggctagccatatgtagaaagctgaaactggatcccttccttacaccttatgcaaaaattaattcaagatggattaaagacttaaatgttagacctaaaaccataatagccctagaagaaaacctaggcaatacctttcaggacataaacatgggcaaggacttcatgactaaaataccaaaagcaatggcaacaaaagccaaaattgacaaatgggatctaattaaactaaagagcttctgcacagcaaaagaaaccaccatcagagtgaaaaggaaacctacagaatgggagaaaatttttacaatctacccatctgacaaagggctaatatccagaatctacaaagaacttaaacaaatttacaagaaaaaatcaaccccatcaaaaagtgggcgaaggatatgaacagacacttctcaaaagaagacatttatgcagccaacagacacatgaaaaaatgctcatcatcactggccatcagagaaatgcaaatgaaaaccacaatgagataccatctcacaccagttagaatggcgatcattaaaaagtcaggaaacaacaggtgctggagaggatgtggagaaataggaacacttttacactgttggtgggactgtaaactagttcaaccattgtggaagacagtgtggagatgccttgaggatctagaactagaaataccatttgacccagccatcccattactgggtatatacccaaaggattataaatcacgctgctataaagacacatgcacatgtatattgattgcagcactattcacaatagcaaagacttggaaccaaccaaaatgtccatcaatgacagactggattaagaagatgtggcacatatacaccatggaatactatgcagccataaaaaaggatgagttcatgtcctctgtagggacatggatgaagctggaaaccatcattctgagcaaactatygcaaggacagaaaacgaacaccgcatgttctcactcataggtgggaactgaaaaatgagaacacttggccacggggtggggaacatcacacaccggggcctgttgtggggttgggggargagggagggatagcattaggagatatatctaatgtaaatgatgagttaatgggtgcagcacatcaacatggtacatgtatacatatgtaacaaacctgcacattgtgcacatgtaccctagaacttaaagtatattaaaaaaaaacagagttgatgctaatgacggtaataacaatgacaataacaacagcagctccgatgtcacggagactttccacacacactgcaggatgctaagggctataccttagttcatttactctttacaagagcacaataaagtcagtgtgactaaccccacttaacagatgacgaactggaggctcagaggtttaaggtcacacagctgtggcatatgaggagtcaaatccaggcttctgtgacagcagagccttggctctcaccagccctgaaaggccacggctgtgatcttagcaaaagccaacgcctgcctgggtaaggaaggagggctaaacctcagtgagagcagstgcgggaagcaccgtgctgttcacctgacttcacttaaccctttcatgaaagagcctccttcctgtgtgcagagacagcgggagaggtcagttacccactccgagtcatctacacagcctaggaaggggtaaagctggactcagaaccaggtatttcaggctctatcacaccatggtgtgtggtgaagccaggcaccagggtgtcacccccatccgaccctgggaagaccactgtcccacaaccgaacagtattagcactgctgataacgcagatgcaattcgctctgcgctgcctgcgcaccggggcttgaagtaagggcactgcttgtgttcgctcatgggatctacccagaggaccctgtgtgctgagtccaaattacggacaaggagcagtatggcaattcactgaccgtgaccacagggctgtgatacagccaggccacagcagggaagcaatagcttcgggagtttcctgaggcccaacaggctgcttcccgaccacytaccagcacagcttcataaagagggagttttttggccaactcttgcccccaaaagctgggagcgtccagagaactcgccggcgtctcagtctgagtacagatgggcttgtatcacacagcagagcactcacacacggcccccagagactgcagtcatgacaacccccattttacagacgaggaaaatgaggctcagagctgtttgtgatttcccacaagtcaccagcaagtggctgagatctgacctcaggtgcttcaaagaccatgacccgtcctctcggccccagcacctgcactgtgtttataaccagttcccccacctgggttccggatctctctggctatagggactccgcggaaaaacaaacccagaggtagtcagttctcgcctaagccaggcctgggcacctctgagggcccagagcttaaaaccgtgacacataaagtgaggggtggccactggagcagtccccatccgaatcacagagctgtccctggtgttccccagcttctgaccatcttgcctcggaccaccccaggaggggcccaggtctcatctctgcatcccccatgctgggccccgggctgggtggatggctggtgcttgggaggggactgctgaacacaaggcccagtgcacactgggaccgggccaatgacagagcctggggcctgtgaccggcttcagagcagaagggatgttgagtctccatctgggggactagcaagtgccaccaggtgccaagatcgagtgggatgctgacttcgatcctggcttgcactggggcaggaggtgggatctgaacccttgtccagtggtctgtgttggggaggcgctgcagagagatgccccgctgacacctgggcaccacccacgggagaggccagggggtgctcagacccgggctgggcagaggggtggtcccgggacccctacccacatacgactcaccacagatacactgtgtatcggtttgcgtgctgtgtgtctaactgtgccttacatagaaacgggaggagatgtttttttcaccaagtacaaatgttcactcccatcgacaacaggcggtttagataacccctgagtgagggcttttcctgccccaccttcctccaaataagcccacgatagagtggcagccttcagaaccccaatcataccctggaagcttctgaggaaaggctccgatgccagacgcggagaaaagaatgaccaggaaagcctgttgcctgagataagtcctgacagtgatgccagcgaccgcttactcactgcctacccgacttgctcacttaatctccagagcggtatgtgagggcagagggtgccggtgaggaagctgaactccacgcctgggaggcagatgaggactgacagcaggtcctctggactgcagtgcttgagtgcggaaggcccaggtgcggcctggggttctcagagctgcaggagcctgaggcctgtcgtgtgcatgtcaggacatggagacccctttatgcccccgtattcacatgctcccttctgaggggtcatctgtttttgcagctagcttgtcttccctccagaagaatcaccttcctcctttcctcccacctgtccctgactcatggtttccagaaaatggaaatgcagttgacagcaaacctcgtctgcagcgcctgctgcgtgccaggtgctctccaagggctcccatgcgtcagcccatgcaactctcccagcaacttggctgggcgggtgctcttggcacccccattttataggcaggaaaatggagacacagtgatgggctgccctggccccaggccacacagctggtgagagctgggatctgaacctgtgagcctggccccagtgtctgtgctccaccctctcaataaccatgtctcacaaggagggtggcccggctcacacctgagaaggaagacgatctccctatatcacaaggacactggtgggcacatggtggctcacgcctgtaatcccagcactttgggaggctgaggcgggaggattgcttgaggccaggagttcgagactggcttgggcaacataaagagatcccatctctaaaaagaaaaaaaaagttaaaaaaaaaaaaaaaaagtaagccaggcaggtggtgtgcacctgtagtcccagctacttgggagtctgaggtgggaggattctttgagcctggcagttcgaggctgcagtgacctgtaactgcggcactatactccagcstcggtgacagagtatctcaaaaaatgaaagggaggggagcacttaggtttttttttactttaaaaataaagcatattcyatgcagaaatgtcatgaaatgcagaactctaaggagatttgaaatcacccacaatcagaggaatcagggtccccacgggggactatgagccccagcagcaggcccatggtcacttgttactcctgagcctgttctgtgaaccgtgagcgtggcctgtactcccaggtgctcagtccagtgggagactgtggcctgtctgaggcggggtctggacagaagcctcctcctctcggtctcccagcctggggctccgcttcctggcagctcccacaagaccragaggggtgcatgggaaggagggagagggcaagtggacttccttgcctcggcccagaccagcttggaagtctgtgaccccagtcggaccaggttggtggatgaatggggggcgctggacagaggttgtgggggaggtgaggctgggtgtccccagactggcaggcccacgaagaagggaatgaggaaccctcttgtgcatgggcctctctgtgacgggcctcggcacaggacccagtggccagcagagtccccgcctcgggactgccctggctctgggcgggcctgttatcctaggatgggatgcctctggccactggggcagtctcccatttggccaaggctggcctgggrtgggaggacaggcaccaggcagggtgtgagcgacctgactgcccacctaggaaggagaaaagaaggctgggcccttcccagcttggacggaggggacggacaagcaggcaggtgcctgatgcatcctgctgaccccaacatgcctcaggcattaggcacctgcacatttaaccctcccatgaagagggccttagaacccccatttcacagatgagaaacggaggtccagagaggttcagacacttgtcaaaggtcacagagctaatgggggacatgttgggactgaacaaggctttgtgagtgcaaagcccgggtctcccacctcacgcagctcagctgggattttaacccagttcagaagatgccacctcaaccagagccctgtgctgccctgtggacaggacgcttcctgccagcctcgctgctttccctgactcacagaatctcctgcaagtcacgggcagaacgtggcggcctcacggtggcctgatgcttgggaaggcacggggcatgagaaggcccctgtgggggcacattcagaccactttgctcctgctatgcaacatccagaaayatctgctcccttgaaaggcaaaccagctagctcggggatttgaacccaggctgagaaacagtggctgttacccgcgaggccggaggacctcaggaaaattccctttctctccacctgtgcggtcatyccatcagggaccttcccaggccccacagcacatctgctggccttaaatgctccagggacctttgagtttctagagttatcatgtgctccaggaatgagcagtttaaagtttccaaacaggctgggcgtggtggctcacgcctgtaatcctagcactttgggaggctgaggtgggcagatcacttgaggtcaagagttcgagaccagcctggtcaacatggcgaaaccccatctctactaaaaatacaaaaattagccgggctaggcggtagatgcctgtatcccagctactggggaggctgaggcaggagaatggcttgaacccgcgaggcagaggttgcagtgagctgagatcgcgtcactgcactgcagcctgggtgagagagcgtgactccatcgcaaaaaaaaaaaaaaaaaaaaaagaaaaagaaaaaataaacacatataagaaagaactacctagaagaatcaaagactttttaaaaattacaaaacaggctgggcacagtggctcatgcctgtaatctttgggaggctgaggtgggcagatcacttgaggtcaggagttcgagaccagcctggccaacatggcaaaaacccgtctctactaaaaatacaaaaattagccagacttggtggcaggcgcctgtaatcctagctactggggaggctgaggcaggagaatggcttgaacctggggggcagaggttgcagtgagcggaactactgcaggtaatacaggatgtcccctggccctgcctcccagtcattaggacaaccccaaattcatctgcatttccctgaagttccccgagggaggggcctcttccagctgagctgcagcccaccaaggcctcttaaaatctaatgtttgcaaagagtcccaagcggtcgacgggagccaatcagaagcgcgtcctacccctgtggccccagtgggccacggcttccacactctccccatctgagctttacagcagccgcactgagcgcttgatgtcactgctcttagcacttggcaatactcaggttcagagggactgagtacagggaccagtatggcatttggcatagagtctggcctggcgtaggtatacaacaaaagctggatgaaagaatgaatcaacaggtggataaatgaaggtgtgaatcatacataggtgcccagcaggaaaagagctggactccaaatgactacaaatcccaaagctcttcttcgcctcccgaatccacgttyktttcatcacctcacccctcctgcgcctcatgcggtgatttttttcaccatcaacctcgacccgcatttggaatagttttccttttcaaggacctccaggaaatttttgcaacttaggttacttttcaaaagtgtcaaattctaatgatgcaggggccttcctatgggaacacgcagcaactgatcagggcctgcgccccactacccctgctccctggcagtggagcgggaaacactgacctgtgcaccctgcgacctgcactgccctctccgatggatgtggttcgctctaagcgtgccttcctgagccccgcctggcaacgtcctctttaagacccttcaattccacataaagtcatcttttttttttttttggagatgggagtctcgctcttgttgcccaggatggaacgcaatggcgtgatctcagctcactgcaacctccgcctcccgggttcaagtgattctcctgcctcagcctcccaagtagctgggattatgggcatgtgccaccacgccaggctaatttttgtatttttagtagagacgaggtttctccatgttggtaaggctggtctcgaactcccgacctcaggtgatccgcatgccttggcctcccaaagtgctgggattacaggtgtgagccaccgagcctggctgcttctttttttctttatgtgtaactcccatttgggcagcacttcaatactgataactgcagttcacgcttttattattgagatggagtcttgctctgtcacccagcttggagtgcagcagtgcaatcgtggatcactgcaacctccgccccccggggttcaaatgattctcgtgcttcagcctcccgagtagctgggactacaggcgcccgccaccacacccggctaatatttgtatttttagtagaaacaggatttcgtcacgttggccaggctggtcttgaggcctcaagtaattcccccgcctcggcctcctaaagtgctgggattacaggcgtgagccaccgcaccaggctgacaacagcagtttactcttatcaagaaccagaggctaggccagcaccaaaaatctccaacatccctgaattctcatgcagtcctccgagaagacatgcattttacagacaagaaaactgaggcccagaggagccaagaacactggccacagttccacagcagctcaggcccacggctgcatttcctcaatgctaggaggcaagtttcctgcaatccaggtgtgcaataaatgccatgtggcttttctctctcaaagcactcttactgaatcaatgacgcatctcgccctcaatagtatggtcaagcggcgggaacatggctgcatcataaacggcggctactcccattggccaggtgttcacctcgcagaggtgtctgctctgcgccaggcactcagggctggcccctcccatctctttgccaatgccagatgcagccatacttgcgccacctcccagcctgggaccggaggctcagagaggatgaccaaccgtccaaggtcacaactagtatgtggcacgggtgagacttgaacctagcatggtctgactctgagtctgtgcctttcctgacgtatctcactttggagccctttgagcggctggggttgtttgggtccaaccagtttgaagcctccaatgagccagcaacttaagcagcctgctgggtgtggggaggaaagttgttgggaaaatacagttatcaggcccaaattgtgttgagctccccgaagatggaagaggctgccaggagcataatcccattttgtggagggcttggggataggcgtgacctgctcctctgcgtagccccatcgggaacccgtcctggcttgccctgactgtcctgggcccttggcgatggccctgacccccacctgcaccctggcagctgggtgatgcgggcaggcagggggtctggacgcagatgggggagaacagagcccccattcatgagcatgtttatgaagaaggaaaaaatgtgtgtcaactgcgtgctgaaactcaaacccttagtgcttaatgagaaataggagtcaggccccaaataccagaaggcccaggagctcacggtgtttgcaaaaaccagctggaactggggagttggagtggacagcggggccactctctggcctggaggcttctacctccatcagagcagggagccccctccaaaatccagggaggcgccctaacccggctgccgctgggagagctggcacccttctctgccttgaagacactcagggctgtgacgtattcttggagtggctctcttagtgggatctggaattccgcttggctgggggtggcggtcactgaatgtggttatgccctcacctgacctctgctgctgggaccacgaggcggggctggtcctgaacccctgggcacaccccaccctttcctctccggggccaaagccagggcagaggaggctatgtggggacgctgcctccacgatctccttcaaaccagcagcagccaccttgtgaacgtgtgtgcgcatgttcaccttcacagacaccacaggccttgctagcagagcacagggggcaccccagggtgcctcccagccatttctccagctcaccaggccctcagaagctgccctctgtccctcgaaaccctgagcaggctccaggagcaacacaacacatacatgacagaatgaccaaacgctgcccagcgcgtgacgacacaggggctcagggaaaccccacccacccacacagacaacaccccaggcaccgggcttccgagtggcctccctgcaggctgagggccccgggagccctggctctagacaggcaccatgcattggttaaatatgacaacacagccataccccgaacccctccgaaaggtccagcaaccacatgcagctgcatctgaaaatgcctgtctctggattcaaaactcctgagagtggggcagagcttgttccgaaggaaggagtttgtggagcgagaaagggggaggtgtctgctgagtgtctgcagacctgagctggtctgtggaaccacatggctctgtggggggcagaagggaacagtcaatgagatccctcaaactggggctcccagaaccaggtgctcacgggtttgagatgtgtcaggtggagcgtgtggatggcaaggctggagagacccttaggggtcaaggattaagaactgtactcccctccaccctagagtcacagagttgaggttcagggacggggagggacaggcacagaaggagccagctcagaagccacaccacccagagcagccccgggtccacgggtctcctacacccacacccaggcacacacaacaccaatgtgcacacatagacacccaggcacacggcacaaatacgcacagccacatacccaagacagactcacacactcctgcacatgacccgtcactcactcagacacatgcatatgcacagatactcacaccccaaagacacacggcatgcatggctcacacaacacacacatacatgggctcatgcacatacctgcaaacatacagagaaacacacatgctctctaaccctacagcacaaatggttacacccacatgcatgcagccacagccactagtgcacaaaactagcccaagtgcctagacacacccactgctgtgcatttaacacacacacacacacacacacacatccctacagagaaatccacaggcatgcccacaccyatctctcctataaacacacacactcggcagaccacgtgtgctgtcgcacccacatccacccatggccgttcaggcacacaaagacactcacaagctctaaggatcccacacacccaacacagtagagatgtccacacactcaaagacacacttgggcacccctgtgctcctgcacaccctggcagatgtatccagatcctcacacacacacacaaactcatgtagacatatgtacacatgtatgcttgggcatgcaccttgcacatgtgcccaggcactcaagcatacaggtacaaagccatgcatgcaccccacgtgtgtatatacacacaccatatgctcacagatacacaaccagagccacatgtgcctcacccacttgtacatakgcaccctgtatgcctgtactcacagccacacttgtgcttatgcacactcttgcacacaccagctcgtgtgcactcacacacaagccactctaccatgcccrgccctgcgtagctcgaaccaacaaacacagcygcacccagcagcaaagcccagtctcctcccaccggccccgggggcgggcacgcggggggggcactcacagcagcttgaggatttccacrtagcagccgagcgtgcggtcggcctgggggcccagctcgatgctcatggtgctgcaggcggggctgaccatgaggcagtcgatgaggttgggctcgctgtcgttgcctgcgctggccgtcagcgcyggcttggcagtgctggtgcgttccacctccacgtggatctcactggaggccacgaccaccgacttgagccgggcctcagacagcgtggcttcctgagacaccaggtccgggctggggtgcagaaggcgcagaggtaaagtgggcttccggtcgcacggctgctggcagccgttccggatttccttcaggcttggggaattgtcgcggctgggggaagaggcrggagagggcacatgagtacaggcaccgttcatgatgcaccatgacccatcagactaaaggcctccctgaatcccaggatgaggccaaaatgtaatactatcatcattcctgtgctacaaatgaggaaactgaggctcagcctgggtgcacggcttgcccaaggtctagacaggaagaggtggggatggcagcccaacccaggttgcctgtctctacagcccatgctatcaccccagcacataacaggtgctcaaaaaatatttgctgaccgactgagtggatgctgatcttcacgtgacagccataaggctcttggcattctcctccaccaaaatgccactggccactttcttgataagccaatgggatctactgttttgcttttagtagcttcctgcagtctaactgccctccaatccctgacctcatgccacaatgtcctccaggactctgctctcctgcccccaaacccagccaagtgagcaagctcagtatctgcccttctgtctgcggaacccccactcctcctgggtaaccctccaggcacagcatctttaactgcccagaggaacagaagcctgcacaaggtgttaacacatgttaacccagaaaggggctcyatggcattattaatctcacatttgttaggcaaacactgggcaaacaagatgaaattaggcctcttaatggcaggacttgtcagagccttgacctggttaaagcccctcctctgactgcttcccaacgtgcccagttgcctgggaggtgcattataagggacagtagtaccatcaacgggttcctctgctggtgcccatgggccggcaaggtgctaagtgcagtcacacagatgctcaaacacatcactgaacagtgattccgaccgtctctgtgccacaggtgaggaaagacggtctcagaagttaaatgatctacccctaattaaacagcccatgagtcgacggagatgggatttgaagccagatctcctggaccccaaagcccaggatcctcctaactaggttggcttccaaggtcccctaagagctgtgcaggtcccctcctccaggaagtcttccttgatttcttcctgctactcttgcccttcctaccctcgaactcctcctaaaccaaagctctccacccctggcgggacaccaggatcccctgggtacacttccaaacatcccaaagcccagttagacaggaatctccaggatgcgacctggacatgagtaatttttaaggctcctcgtgtgtggtcaaggttgagatccactaatccaagacttcgagcacaacggcacgattgaaaacagctgcttgtctagtccttccccacatgtgtcacatgcatgggtcctgtgcctctaaaggggctcccaggcttgaggacagggccacacagctggcattgtgtttggggaattgttgcagctgggggaaggggtgggagggggcacgtgaatagcccctccaagggctgtgtgcagaacttgaaccccatgcacagcaagggtctgaatgtatccagcacatgccaggaaccaggcctgagctgagcccaccaagggtgtttaataaatacactttcagctttgctgggggaaataaacaatccatcggctaaagtccgagaattctatcgttgataacaacttgtgtgtggtctgtgatggggggagacctaaattctctggtccagatctgatttgctccccaagtactcaacactgcatttctctttgtttgccgttgctgggttttaaaagtggattttcaaggctgtttggctcagattggtgattttcaagagagccacgctaacctgggtcaagttgtctgttcttttcagtgtgagtacattgtgtacatttgcccaccgagagcactgkggacggcctggaggacatgacggactttatcttgaagggactggctgaggggggcgtcatggacctgagcccacgaaacgtgttggcagcatcgtgcttctctgggtgatatccaggaaatgtatggcatcagctggaacccaggctactgtgggctccgagggggctcaacacagctgagccagggctggcacgaggcagcaggcaccatctcaccctcgccacgcctccaacctggcatctccttgccacagccacctaaccgttccccagggtcacgcctgccccctactccatcctcctcacagcagcagccagaggggaatggaactgaaatcccatcacgtcccttctccacttacaacccactgtggactctccaatgttcccaggataaaagttctgccactgaaacccaggacaaccctgctacttacagagtgatccccagcctgcagcttcgcctgggagcttgttagacaagcagagtctcaggccccgccccagacctgctgaatccaaatctgcattttaactccaaccctagagagtcccaggcaccaggaggtttgagaagctggctattcatggcccagcactctctcctctccaactccatcttttgcttccctttcctctctctgctctagtcacactggatttccttcagctcttcccctgcagggacctccatattcagtgtgcagcagaatgacttgtggagtttgtttagaatgcagactcctgggccataccccagaaatgttgcagccaggaatctattttaaagcagtccaggtgattctgaagtagtggttcaaggacccgtagatacaaaaacattgtacacgggcatggtggctcacccctgtaatcccagcacttctggaggctaaggggggcatttcacttgaggccaggagtttgagaccagcctggccaacatggcgaaaccccatctctactaaaaatacaaaaaaaaaaaaaaaaaaaattagccaggtgtggcagtgcacacctgtaatcccagctacttgggtggctgaggcatgagaattgcttgaagacaggaggcagaggttgcagtgagcagagattgcgccaccgcactccagcttgggtgacagagtgagactgtttccaaaaaaacccaaaaaccaaaaacaaaaacactgtgacgaatggcaccttcacccatcactgccaggcctttccatgtggttctytccctgggtcaccctcttcctgcttcttgcctggagaacagccaggaggtattaacgtaaatatcacctccccaacgctccttccaaaaacagatgccagggccatcctaattaaatcagaatggcactgggagggtcctgggcacccttttctttctttctttctttctttctttttttaaattgacatataacccaaagtacgctggtaaatgtctaacaaccaactctccaaagaaagaagccctgatctggctggatgtggtggctcacgcctgtaatcccagtactttgggaagccraggcgggcagatcacctgaggtcaggagttcgagaccagcctggccaacaaagtaaaaccccatctctactaaaaatacaaagattagccaggtgtggtggcccacacctataatctcagctactcaggaagctgaggcaggagaatcgcttgaacccaggaggtggaggctgtagtgagccaagattgtgccactgcactccagcctgggcgacaacagctaagctgtctcaaaaaaaaaagaagccctgatctgcagtgtttaccaatttctttggtgtaaatactcaccacagctacttcaagctatcaatatgatatcattacagaactgggaagggatgtgttcccaaatgtaacgtgtgagctggctcctgcacactctgggtataacttaaatactgtaagccaggcgcggtggctcacgcctgtaatcccagcactttgggaggccaaggtgggtggatcacgaggtcaggagatcaagaccatcctggctaacatggtgaaaccccatttctactaaaaatacaaaagggcaggcctgatactaccctctggcttccgttttctcctctttttgcctcaccgtgctgtcagctccagaacatgcccttgggaatgagcagcctcccatctccacattctggccyctggagtccctgcacttccttctgatcagggaagtgattcaaggtgggacatgatcccctttgaacatcgggacctgaggctgagggcattaaaagagtcaccctctctcatgccctgctgcaagaaaacagcccctgatttatcaaatgccttttcctgcccctccgaagaactcagcagtacggcatttgtttgagaaatcccccctgtacaggttttcagcgactcagaatgctctactgccttcattttgagaaaagactgaaataccctcctgctgtatccccagctctggtggggtctggactcatgttggtctccttggagttgtgtagtgtaccacctgaacaactgggtggctgcagcagagaccactgtgttctgcatgtcacatcctctccaatgacaccagaggtcactgcagaaagttccccataaactaatggcatctgcattagtctgcatccygggagcagttctcagccagcgagggatgggagctggtgagtgactatcccagcaccgccagcctcggyggagcaactctcagcagagcaactctcagtgtgttacgcacggcctcctggggcacagtgggagtgcatgccagctgcctgaagtggtcacctgcttgcttgctttcttatttatttatttatttatttttgagaaggagtctcactctgttgcacaggctggagtgcagtggtgtgatcttggctcactgcaacctctgcctcccaggttcaagctattctcccgcctcagcctcctgagtagctgagtacagtcatgtaccaccatgcccggctaatttttatatttttttagtagagacggggtttcactatgttggccaggctggtctccaactcctaacctcaagtgatctgcccgccttggccttccaaactgctgggattacaggtgtgagctactgcgcccagcctcacctgcttattaattcatacttcactgatgtcctcccttccctgtcccccagtgtttcctgggaccaccttcctaggaagccacttccacccaaatcctggtcttggagtttccttttggaggctccaaagccaggtcgtggccctgccctgccacctcttccggtcacttgctaccccaccactcggttttattgctctcacggtttttcttaccctctgacatgatcttgcacatttacttgtacatgatctcttcctggtagaatggaagccccaagagagcagggaatttgtgatcttgctygctctccagcactgaaattgtgtcaagcacacagcaggcgctcaagaaaaacagatgcaatggctcatgcctgtaacctcagcattctgggaggtccaaatgggaagactgcttaagcccaggagtttgagactagcctgggtaacacagcaagatcctgtctttacaaaaaaattttaaatattagccatgagtggtggcatgtgcctgtggtcctagctactcgggaggctgaggtgggaggacggcttgagcccaggagtttgaggctgcagtgagctatgactgcaccactgtattgccgcacaacctaagtgacagggtgagaccctgtctcaaaaaaataaaataaaaccatgcaaatcatgggcaaaagcctgtgttctcaaagccaagactagacaggataaaccttactgtcaacccttgtccccaacacacgggcacatattcacacctccatgtgcacacacgtacacacagtcacatgtatgtgtacagtgcacacatgcatttgcatacccatgtgcacacattcacacacacacaccagtgtgtcatacctctccagtggtgagaaatcttcagcataaaacatctgtccctaaagccaagcagctctaacagccttgcagttgcggtgctgattcagtgcttgctttttcagcagcatccctggcttctgggcccatgaatcaatgtgcccaggggaactggcaaacacaccatgaggtctgcccagtaaacagccactccacctctctggcctggtcagttcttggtgactttgcccatgatgggggtggcagtttgcccctcccaagcyctctgggtggcggtggttcagcaactgacctgttgatgaactcttcatagcaggagtagatggcagccaggcacacggccaccaggttgggcaggacccgggggtgggggcagtgccctgtggggccgtgcatgctggaaaaaagcagagggctggggtgagaagcctgcaggagtggggcccatggacagggtaaggggggaaagggagggcgttgctcaggcacggggctgcccgctctgccagcgccacttggggggctctgagagccttcactgtgcaattggtggcaccaggatttgggccccggctgtgccacgtgcaggcagcagaaggcaaagctcctggctgtggactccggatccagggttcccgggttcaaacccctgagtggccttggaaacctcctaaactctccaccctgtttctgcagcgataaaatgaggatagcagccccctcctcagttggggtacagttaggaccaaattttctaattcacagagagacctagcaaatggtggccatacgtcctgggacagtcatgctcacacctggtggttcaggaataattaattattcctaacacctcattttactttcaaacatatcctgctttggaagaaaaatgatgagggtcattttggcttagcatagagtcaccaacatagttactaagtcctcaataagtgccactaattattacttgtcttggctattttggtggtcctgaggataacacctgtaccatttctgggaagctgtcatcgaggctgctgtcactaagaatgccctaacctgacaagattttgcaaaccacaactgggtggtgtcaccacggttctggcatgagggcatgtcacaaagccaacctcaaacgacttcgtgagttccaagtgggcatatttaggaaatacgtagcttcagaacttgtttaaatgggttactgtgattttcttaaaacatgagaagagtctgggggcagcagttcacgcctataatcccagcactttgggaggccgaagcaggtggatcacctgaggtcaggagttcaagactagcctggccaacatgttgaaaccccatctctactaaaaatacaaaaattagccaggagtcgtaacgtgtgcctgtaatcccagctacttgggaggctgaggcaggagaattgcttgaacccgggagccggaggttgcagtaagccgagactgagccactgcactccagcctgggtgacagagcgagactccatctcaaaacaaacaaacaaacaaaagagatgagaagaacaagaatgatgacacctcggcctgacacgagacttccgcagcattctccatgtgttgtgtctcctactcactggagcatcacactaactgggcgagggatactatggttcttgtgtgacagatgaggaaactggagcaccgagagaaaatttaaaattaaacaaagcaaaacgcacccaccccccccccccccaaaaaaaacccaaaacaccaaccccaagaaccaaaagtgagtaagagcaagaacatttggcttcctcttggttatgtttatggggtgattgttcaagcacccgacgatgacgctctgggaccaccaggggtgggacagagtcctaaacatgtggcacctacagcctgaggggtcgtgggacctgaggaaacagcagtgttgctgaggtccagtgtgtccgagttcctatcgggcaccgtgcagtaggctaggggcttcctcatagagggagtcttcatttaattacacgacagccccccgtggatatctgagtaaacaggatccgagaggaaagtggctcctaggccacagagggacgtcgcgctggagacccacctctgaatgaacttcttcaccacttccatccccgcgttgagctcgttcaaggcaaggatgtactcctgagtaaacagcctcagtcgcgggcacttcccaaagtcctgtggagacagcagaggacaggagtcgggacggtgctaggcagggcaggagcccagggcagccaggacaccagaaagaagggcgggaccgagctctgcctggagctgttgatgtggaaggcaatggggagacaccaaccctctggaaagcacaggtggcgtctacttcaaagaatagcactgcgacacccgcgcttccactctgaaggaccatctgatgagcaggtgcttctggctgtagagaaagccaccctcaaaaggcacttgtgagacaaatgagacgagaaagagaaaagagagccagaaaggctggggggacaagagagggtgcttccgaggggaatgtggagtgtggaaggaggtgtgtgagaggtgggtgtggaaggagaagagaggtgggtgtggaaggaggtgagtgtgaggtgggtatgggaggaggtgaatgtgaggtgggtgtggaaggaggtgagtgtgaggtgggtgtggaaggtgtgaggtgggtgtggaaggaggtgagaggttggtgcggaaggaggtgagaggtgggtgtggaaggaggtgagaggtgggtgtggaaggaagtatcaagtgggtgtggaaggaggtgagtgtgagaggtgggtgtggaggtgtgaggtggatgtggaaggaggtgagtgagaggtgggtgtggaggtgtgaggtggatgtggaaggtgagtgtgagagatgggtgtgcaaggtgacacgtgggtgtggaaggaggtgagaggggtgtggaaggaggtatgaagtgggtgtggaaggaggtgtgagannnnnnnnnnnnnnnnnnnnnnnnnnnnnnnnnnnnnnnnnnnnnnnnnnnnnnnnnnnnnnnnnnnnnnnnnnnnnnnnnnnnnnnnnnnnnnnnnnnnnnnnnnnnnnnnnnnnnnnnnnnnnnnnnnnnnnnnnnnnnnnnnnnnnnnnnnnnnnnnnnnnnnnnnnnnnnnnnnnnnnnnnnnnnnnnnnnnnnnnnnnnnnnnnnnnnnnnnnnnnnnnnnnnnnnnnnnnnnnnnnnnnnnnnnnnnnnnnnnnnnnnnnnnnnnnnnnnnnnnnnnnnnnnnnnnnnnnnnnnnnnnnnnnnnnnnnnnnnnnnnnnnnnnnnnnnnnnnnnnnnnnnnnnnnnnnnnnnnnnnnnnnnnnnnnnnnnnnnnnnnnnnnnnnnnnnnnnnnnnnnnnnnnnnnnnnnnnnnnnnnnnnnnnnnnnnnnnnnnnnnnnnnnnnnnnnnnnnnnnnnnnnnnnnnnnnnnnnnnnnnnnnnnnnnnnnnnnnnnnnnnnnnnnnnnnnnnnnnnnnnnnnnnnnnnnnnnnnnnnnnnnnggtacggaagcaatgagtgtgaggtgggtgtggaaggcagtgtgaggtgggtgtggaaggcagtgagtgtgaggtgggtgtggaaggcagtgagtgtgaggtgggtgtgaatggatgtgtgtttgtgacaggctgctgtggacagaagcatacatgtgcaatgaggagttgggcaccaggcattagtggcaggggaggcactggcacgtgtcactatgatgaggggacagggacaccaccctggttggaggccccatctgtgccacgctagggaaagcagcgcctgcaccaggcccccggaactaaagtgyccactgcggggctctgtcaaggggccaggtcaaggacacagggacactgcctgtgccggctgagggccatatgtggtggctgccgtgctcggcctcttccaggtgtcaggaagacaggggccacggcacagagagctctgccaggaggcaggaagtcggcgcccagcccagtggggggcttggggcttgccaggagcagaacagaggtgcaggagagaggcacgggccggacaggggcctgtgaatctggccgccgcattcattcccagggtcgtggccagggctgcggaggtgctgggactgccagcccctcgggctgtgtctggccacccaggagcggcaccgtcctgcccccgaccctccataaacgtgatgtggctgaccacggaggggagcctggagtctccagacctgtccctccgtacccatctcagtggaacccattttttaaggagagcagcctgcatcaggacttcaagctgtagaacagaaatagagacccccctcaggtctaactgaccccgaagctggcatgaaagctctgagtggaacccgttcctaccactccctcccgcaggctcccaggagagagtttctagagccgctgggggcttcttcatgtggagtcaaaggggtcctttgtgagagacagtgcagggggagctttcactcgtctgcctgctaggactgtcctgctacataaagagggaggcagagcccccggagcaagttcagaaaaatgcacgcactggcatgagcacaaacacacacacacacacacacacacacacacacacacacacacwctctctctctctctctctctctctctctttctctccctccctccctccctcctgggttagaaaatgaggcctctgcctcacaagtatttaatctggctttgggctgccacgtctgtctctgggcctcactgaccccactatggaatgagggtccacagaagtgatctctagcccccttccaccacgagggttttatgattttgtaaactgcttcaacagagacttaaggtaactgtcatcttagctattagatttttgaataatcaaggtcatttccatggaaataaacatttacagagggatccagcagcctctgaaaaatacgctccccttggaaaactggaggttaggttacttgacggtccactggggaccacagccgtgtcttctcgcctcctttgccacaagaacactccgagtggcgtgggggcacagagatacatggtcattcttcagaacgcagtttggcgaattatttggactgaatctccagaggaacatactaaagaaccgcttccttttgtttctagtttttatttcagtctagtaaagaacattctttgagactctcaaagcttcagtttgctcatcygtgaaagggagcacataacatatttgcaagagatgcacccagaatgggggagcccccaaatcccagaacagcaccgtggctacgttccccccgtttcctaaatgtctgagtgcctccttaaggagaaacactgcatttggggtgaagagcagtcactgttcatgccaccccaacaggctcatggcttaggcaggctaggtacgctccttagccagagacatgaccccccccccacaccagctgagagccccagctccacaacggtgctgctgacccgtgccactcattaagcatcagggcgcattcagtgagtaaatgtcaaagctctctctcgcccaccgcctgtgttgttaggattccatgaggtcaggtcttcctgtgcctggcatggccataatcactgtttaatacagtctgttcttctacacgagaggcggatcctcctcggtcctcccagcagttctcctctgccgccgccgctcatggtgtgtaattaggaggcrccaagagcaaggtgggatctgggtgcgttaaagcatccccagacacctgggatcacttagggggtactcgttacaagtgaggcgaggactcatggctgagggtccctactctctgccagactgccacagatactataaattctgggtctgcccagagcggttctgatttttatagagaaaattaatacatggtcaacactccaggcccataaaactaaccaaatacaagaaaggcgttgtatggtgaagccccgagagcctgtctgaattatgaattttttccctttgaagtcagatgtcctcaaagaacccttatgaaacggtttattgactaacatggartatgcaaaaatgtttatgtgcctgaagaggcattcctctgccaagtatgtcccgggggtgtggctctgccattgacaagttaaggtccttcgcaagaaaacctgaagaacctttgctctgaactccagcatggcacagcccactccatacactacacccgtagtgattttaaagttaacaaacagggcacctttccttctagctggccaaagccagaaagagctcctccttgaaactatgagcgcccaaattaaggcagaaaccccgccccatcccccagtggggagtctccttgtcctggagaaagaactgcacagggtgtccctatcccctgtgttctgaaaacaagaaatgaatttaccccaaatctaggaggggctcagaaatcagcaacaattcatttacagtttgcaatcgcttagggtagagaatggtacatagcattcattatggtactaacacgatttcagttggtagtggtggcctggaatgcaggaggggaaagagtgtgatgctgtctctggctctacagaaagagtgctataattgattaatgatgtctgccatgagcatggaaggggtagaggagcacatgtgtcatgcacttccattcctgactggggaaggggctgtaggtgatatactattcttcaggggcatggtgtggagacaggcaagctacatcacaagtgaaatgatgtgtggttaccctttttcagttgttttcacgtgctccaggagactctaaaatctaasgtggtggctggctcagtacaacatgtgattgggaatgggccctggcctcaggctgcctgctccttagctcccaccaggaccacccacagctgctcatcagaccctgcctatcccgtcccrcctctctgggtcccagattcctcctatgcacaggtgtcatgggaatggcatgagggttaataacacaatacactcaaagagcaccacactcttgactccaagaaagtgttcaataagcatctgcaaaaagatgttattcttattcctacctgtggtccctgtggccacttagtggacctagctaagcctcagtttcctcgtgacatacagggcaaataatggcatttgctgctgtccctggaatgatgagggaacaccaaggggccacacagattacaagcgccccacccgctctaagtgtgcaattaaatcctgcttttgtatttaaaaaaaaaaattaaaggccaagctttattcagatttcctcagttttcccttcatgtcccttttctgttctgggatcccatggagagccccaaatgacatttagtcgttacgcccccgtagactcctctgagctgtgacagtttcttagaatctccttgtttttgatgaccttgaccgtggggagtactggccaggtactttgtagactgtccccttgttgggatttgtctgatgtttttctyatgattggaatggggtgatgggttactgggaggaagaccatagaggtcaagtgtcgtttttatacgtcctatgaagggaatattctgtctaactggcttgttgttgtcgatgttgaccttgatcacctggctgaggctgagtgtgtctggyttctccactgcaaggctactcctgcccccttccatacagtgctctctggaaggacctcgctgtgcgcagcacacactaaaggagtgcaaagtcgcgctctgggtccttgagggcagggcatctacagacattatttgggcctattcttcccgggaggctttcctcttctcctccagctgcggtatttttgtaattcttaggaactgcaaaaagattcttcctgttgccgtaatggaggacaagctgtacaaaacccccaaaagtccttaaccagaatctcaaccccagttcctggctgtcacgctgggccaaccacattccccaaatctgtgccaacgcaaaaggccagggaggcgcgcggggcctcatgttctgggcgctggggtctgggtgttggggcagggtgactcaccatgttatgcttgaggattcgctgcaccacgggggtgaacacctcgatgaccaccatggaccggggccgctctctgcagtgctggggacagagtggggtacagttactgcggccctaagaatgttctgaacacagcccrtggctgctagcagggctggggacagtcagcccagctgtgggtgcctgggttcccttgatgaacacggctgcactgctttctaaaaatgagtttattttggaggggggccagttctaggttcagagcagaacggagaggaaggtagagacctttmccagataccccctgcccccggcacgcacagcctccccaacgatcactgcacatgctcctwttaaggatggggtgggggcgttccaggcggccctgaaatgtaccctgggcacgcaggccagcaggcatgtggggcactggaaaaggaatcctggtggagagacagggcccaagaggacaacacaatcttgtttccctttcctgtcccctgatgcacacacagaggactccctgggcagggggtaaagtgcaccacggtcccctttcctcccaggtgcctgcatttctaccccacaagctggtctcattggtggacacagcccttgcctccccaaaggaccgtgcggtgtaacaaatgtagcacgtataccctgtgggatatttgttacaatggagaaccccacactgacacatcattgttacccagagtccacagttgactttagggttcactcttggtgctgtgcgctctgggtgtttagacaaatgtctaatgtcctggagccaccaatgtaatatcataggaagtcgtttcacgccctaaaaatcctctgtgctcagccaattcgtccctccctctccccaacccctggcaaccaccgatcattttactttctccatagttttgcttttttcagaatgtcctgtagttggaatcgtgcagtgtgcagccttttcagatgggctcctctcacttactaatatgcatttaaagctccccctttctcttcgtggtctgctagctcgtttttttttttagtgctgaataacactgcattgttacacagtttatttatccattcacccactggaaggcattttgggtgcttccacgttctggtagtcatgaatacagctgctgtaacgtcggcatgtagatgtttgtgtggacaggtgtgttgaactcatttggggaaatacctacgagtgccatagccttaaaattttttttttttttttggagttaaaaaagtagacgagatgagagcttttgtttgctttttgtttggttttgaccttaaagcttgagactatttcagatggtacacataggcgttctgacagggtccttatttaatatataatgagacttctgtaaagctaagattctgcatgtttggtctgaaagaccttggaaattgggtatgatagtacgagggctttggcatttgaccaccagggtgttgaaaattctgtgactcttcaaytggtggctttagcactcgggtggcagtctgcagacccaattcatcaccagcgcggtgttttgtttttcatactggaaaggaagcccttcacaggctgtgaggacaaggcccagcccctccctcgtgtcctgcacacrtgtatcacccacccggcccccagatgaggatgctagacctgggataagagaaatcagggctcccctgagaaagcaagatgaataaactttcctcagatcttggaatttggcaggagtttggcagagcggacgcagcgcgggaggctttggtcccctcaagctctcctctctgggctccaactcccagaggcaaaatagccaaagaagcatcccacatggctgggacccccctccctccaaaaggcagacggccctctttgaaacacccacacaggattacagcaaagaatgccaaaaagggtagctttttctacctcatccctttccaaactgtgctactaggaacgctgaggtaagaaacacagtgaggcaagtgaagcctcaggtaggaaacacagtgaggcaagtgtatcttgttctacaacaaatatccagtgttctagaaccagactttgagaatcatgagatctgggtgaaatcctaagcttgagaggcaagcatggggcaggtttgggttaaattggacaggagatggaggaggtgatctgttgtgacaggcagaggagcagctggccgttctctcaggatactgggttatttaattccactcttctgggggcatgatacccatgagtccsggaggcagacaaggcccttgtgtgtcctgaggagcccggggcctgtgtgtatccacacctgtatacacacacacacactcatgggtgttcactccctgggccagggggcacacattgcacatgcccacattaaggatgggggtgggggtcattccaggccctgacaggtaccctgggcactcagaccagaaggtgtgtggattggtagaaaaggaatcctgatagggaggcagactccaggaggacaactgaatcttgtctccctttcaaagctcccgtcccctgacacatacacagaggactccctggggtgaggggtggggggccgggaaggggcggcaagggaaatcaagcgcaccacagccccctttcctcccaggggcctgcygttccaccccacaggctggtcccactgctggacacagcccacgcctctccaaaggacagcgggtgaccgtggcaggaggcaggtaatgggagcggggagggatgaggaccagctgagcggggcagcaggggtatgacaggggagtgctgagaacatgtctctccaaggacataaaattattacactaaaaaaaccacacagcaaagaacaaaacaggtttgtgtgatggttcggcctgagccacaaagatgtgccctggacatgtcctatgtgaatcccactgcaaggctggcgccgggtgcccggcagcggatgccctgctccacagctcctctaagctaacctggagcaccgtgctgcctcccgtgttcagggaaagccccacagccgcaccccaccgtgggccagccactgcgcagaggaaccttggctaataataacycagctctgacgtcakgagcccaggaaatctgcagcaacctgtctcctaagacagccgggaagtgattccaaggaaaagcaagatgttccccttgtgactctttgtcacctgtctggcagagacgtgggtgtagccctaagaatgggtgccgggcatgccctctccgcctgtgtctgggaccgtgacccaagacggtggggcccaggtttttggcctttctgtgcaaacccaatccctggtatgcgcacagagggaggttacttcctgcagccacagccccagctcagcaatcccgtaccttgcaaaagaattcacagagatctggtggtgggtggttgttttccagcaaaggagcgattgcctgaaacacaacaaacaagcatcaggaaccgtggggtagatagccacggaaagacttcgaacaatctccaggccatattgtgaagtgaaaaaaataaatgcagagcaacacatcctgcatcacatcattcatattaaaagcagaaaaaaaaagaaaagaaaaaatcccccaaaaatccacaaccgtatctgtctgtgtgggtttgtcaccacctgaaaacaaggtgtttctaaagagggcactgggatgggatgaaatactcttttcctgatgaaaacatactcatactcatgaaatacttgcaaaattggctgggcgcagyggctcatgcctgtaatcccagcactttgggaggccaaggcaggtagatcacttgaggtcaggagttggagaccagcctggccaacatagggaaactccgtctctaccaaaaatacaaaaattaactgggtgtggtggtgtgcgcccctgtaatcccagctactcrggaggctgaggcaggagaatcacttgaacttaggaggcrgagttgcagtgagccgagttcctgccactgcactctagcctgggtgacagagtgagactctgccttaaaaaaaaaaaagaaaaaagaaaaaagaaatacttgcaaaatgakattttaagtaaaattaaaagttctgtcacagctagtatggctggggtctgggtctgaactcgattctgaacttgaacctagattcagctcatgttcttcaccaccatggtgagcgccttccatagtgagccggaccacagctggggtttggactcctggtccatgaccaacaacggttactactgcctggccaatggaatgaataaaaccaactcaagctatggtagaaaaattagcgcataaaaaactaccaagcatgtccaaagaagactaattgccaatagggcaaataagaggatgtaactgttggaatgaaaggaggctccagaaggcatcataataatgacaacagcaatagtaataaaagaatgctggaaggggaggctgtaaaatgcaggggtgagggtcagaccctcagatcaaattctttcctgttctcaggcattcctgctgagccgggaagctcaacctgacccaattaagggttcagttcagccacattagctggataaatgcagcctggatttctcagatcaaaatttctttcccaggcttgtcctgaatgcaagcccttgtcctccatccagggcttccaggcactcagtgggacccacaggtgttgctggcagggagaggaaggcagtacctccttccagctctcatgcttgctcctggttctgcagcagcccgtcttaccactttgcctttgcacatgtaagtccccctgcctgaactgccttccccagcttgctccgtttacctgacattctcctatctatcctttaagattcaccttggtcacctcctcctggaagtcctccatcatcatcctcccaggaccctccctgacagaggttaagtacctatcctctgcaccccctctaacacccagaasaaacctcagcccttggccatgttatttttgtattatctgttgatctgccaggttctctcagcacacattcagtcctcaatggcaggcctcaagtcttgtccagctctctatctgtgtctggcacatagtcagactcacatgctcagcaaagttcgttaaatgaattgatgaattaatactatgccagaaaaaggtggtggtgagtgattgggggtgcccaggttgacttgtcctcctgttctggcaagagaaggcaatggacagtccgggtgaaagcatggagaaaacctctatactgttagcgttagcaaacacccactgagagcccactacgtgccagacactggagctgacagcaaaggcagaagctgctgccttgactctccacaatcaaaggcctggggctcacctcattttgtgcatacagtacccagctaggcttgccagggccgactgagtgggtcccccaaggccctgattcggctagaggagcgtgaggggcctagtgactgatgctgctcttgttctgtaccttgcagccaggagacatcccaggcaggttagttccaaggtcccctcctgggcacaaaaggctctgcctcttgcttctatttcatctcccatccgcctgcttctcatttccttatgctttatgctccagcaatgctgaagcttccagaacacactacgttgctttaaatctttgtgctcttgcacattttgtttcttctctctgggatgcttttatcccgttttgccacctggaaaactcctattgatccttcaaaacccagctcagatagcactacctctaggaagctttctggctcctttcccaggggagtttatcactctacttactctctgcactcaatgtctctattttttgcggtgatcacttttgtcttcctacaatagatgatgaactccttagggactaggttatctgtgaattcaaatacatagcatggtgcttaccatctagcaggtgcaatttcatttctttcttctctcaagtgagagttaggtttcgtagctaaaagtcattcaggaagatattttaccccaaaaatgcttacatcatggtagagtcccagaaaatagcatctcactttatgtatcacagggaattaaatccaagttctatttgtggattaattgggagacatgtcctggggcaagaaagagaacgtttacctttcagctaatggggtgatgcctctgaataaattatacgggctctgccatctcctgccttcaactccctaggcagagacgcaggaaggaggaggcgattatgatacatttgctacaaacctcaaagacaracaattacactcccgctcctatcaactggggctctgaaatatgcaaaggcagagggaggtgcgtccggcttgctagaaaagacaaaacggagcaaggccagatgctggtggattacgcaggcgccagaattaccccaaaccaggaaaagggttgtaggctccaggaggcggaggtgggtggagggagcgtgttcgagaggaacttaccacaatgatgttttcatgctcctgggtggtcaagtttgtgttctaaaggattgaatggagacagcaggaggaaaacraaacaaaagaaaattaagaaaacgagcatttggatttcaagatccacagttttgaaacatcttcagcgtcacagaccaactgtcactgtcattttttcttaattaaacagatcagaacaccctcaggggcaaggtcgggaagggggagaaggtatggttttggggcagggagaactgagttcttgtccctgtttcggggcttgagttatgtgaccttgagtgagtcgagtctaggggagactcagttcctgcttcggtcaacagggcttccagtaacctcaataggctattgggagaggatctggccctcgtcaaagtgaaactgcttagaagccagaaggcaggttcataataagtatgtaaagaaacagacctttcaagagtcctaatctgtgccaggcagccttttagragtaacacgtatatgatttcagtgcttctcaaactaagttcccaaggaacatgaagttccgtgagtgggcccgagatgttttagctgaattcaaattctagcaactgacttgcaaaaacataattaggttgaatggattacatttgctgaaattttaggggtcctgtttccttcccaatctggacttttcttaaataattggtaactgttacaggttgaacatcccttactgaaaatgcttgggaacatgtgttttggatttccattttttttttttaattttggaatatctgcattatacttaaccagttgagcaacctagtctgagaatgcaaaacctgaaactctccaatgaacgtttcctttgagtgtcatgttgatgctcagaaagtttcggacttttggccaggcatggtggctcccatgcctgtaatcccagcactttgggaggctgaggagtgtggattgcttgaggccaggggttcaagatcagcctggccaacatggtgamaccccgtctctacaaaaaatacaaaaattatctgggcatggtactcgctactcgggaggctgaggcaggagaagcatttgaatccaaaaggcggaggctgcagtgagctgagattgtgccaccacactccagcctgggcgacagagcgagactgtctctaaaaaagaaagttttggactttggagcatttcaggtttcacgattagagatgctcgacctgtgccgccatctgtgagtacttgaacaaggaaagagacggctgtgccataaacaaggaatcacaggaaaactcagaagtgcccgcccttctttcttgctagtttcgtggtrtgttctgctttgcttgtctgttttggtggacacacagtggtgccaattcgtatttcctaaaagagccacattggctgcttgtaaagagacctctcatttgaacagtgttggcaagatcgattgttctggttctagacagagccccatggctcccaccacctggacaggcttaaggcatatgggggtatctaatgtgtttacagaagccaaggcaaaagaaaagcttgcgagctatgaatttgcttttgcccaataagctggctcccgagggctgcgggaggccgtgaagccaggtcagcatctgaatgaacaacatgagtctctaccggtccccatgagacgtcctgacctaggtgaggttggacccaagatacctagaatgcaggcatgtgaaaggatgttttttggatctgaacacgctttttttctttagtggatatgagtggagtttgagcagcctgtttatggtagattattaactatcagtcatttttcagcttcggggagaagcctggccttggtctctccttatgactgctgagctctctatgcctcaggcactgtgtaagagctttgttttgctcatgccaccaatttcttttgattatgacaggttctctactatcccattgactgatcagctgcctaagactgacgggatgcagtgactagcaggcgcagggtaataggggctgcagtgaggatatgaacccgtctgtccttactctaaagtctatatttcctgccactgagctacagtgctccaccacccatccaagaagcagttccttattttgggctgccaagggcagctcgacacatccatccctcgccgccacccacgcacctttccaggaaggctttggcgaccacggacatcatttcctttgtcccagtcacaggacagcccatgcattctacagggagccttctctcccccagggccattttccacccctggtagagcatgtccaccaatagccactgcattagagggaacacctgactctcgagctaagcggccactttacacgcaactcaacaaaggcctgggagggtggggacagccagctttgctttgctggtggacggacagttctttctcggaactgttttgcgtccttarcagctccctccacgatgcccctctgcctgctccctccagatccttccaccttctggttggtctggtgatgcctggaacctctccagaggaggccttgcaaacaacttgggcaaacagaacagagaaacaacccagccccaaaacagggcacggaggtcgaaggcagatgtttgtttttccagctactagctccagacccctggctgaaggtgcttacggggttcagaccacagacatctcctatgacaatgaaaatgtggccatgtatcaaaggcccttgcaagttaggcacagtgccaagcactttatgcatatgagaggatcgcatcttcaattctrtgaaataggtactcgtctcagacccaatttacagaaaacaactgggcacagaaaggcctagcaacttgtccaaggccacccagctactgagggcaggacaaggtccttccgaccctacaacacggtttctcactcttcatctccatagttacatacttgccagaaagtctctaccaacccgggtttatctcacatctatgtgcaggggcataagcttcatcactgggcagacccgggcgagggtcctggcccaacacttaatctgactggccctgtgtaagctacttaacctctcagcacccctggttactcctctatacattttaatacttaccttgcagggtccttgggagaaactggggaggtctaagggccatcaaactgaccactgcagagcatgcatgagtggatgccgggtcaggcagcctgggctggagtcccagctctgtccctaaatgtcagctctcttcagtaaagtagggtgagtaatgctgactccttgcctgacacagtagcttcaaagcacatggaaacttcttccattttcctactttaaatatctttattcctccatcctagcacttaagggtcagctgcctttgagatttttactttaaagcccaagaagcaccctcagccaggtgtctggtcctaggtgtggtggctcatgcctataatcccagcactttgggaggccaaggtgggaggatcacttgagcccaggagtttgagaccaacctgggcaacacagtgagaccccaktgttaataataataataataataataaagcccaaggagggatgtgaaggccaacagtcatgcggtcacctgaagcacatctgagaggggaaaaaaaatcttgcccgaggccggcaatggggcacgtctgctgccctcagcactgccctgatttaataagggtgtggtggtggttgagcctggtggcgctgaagtggtggccaagttggtctcaaaagcacttggcaactctaaggtggaacttctagctccattacaaacttgccacgtgagttgggcaggtcactcagtatcactgggcctcaatttcctcatctgtgargtgaagacagaaaggcccatctttcagagagaatgtgagttttaaaagagaggctgtctcactttgggaggccaaggcagatggaccatttgaagtcaggagttcaagaccagcctggccaacacggtgaaaccttgtctctactaaaaatacaaaaattagctgggcatggtggcgcacgcctgtaatctcagctacttgggaggctgtggcaggagaacggcttgaacccaggaggcggaggttgcagtgagccgtcacgccactgcactccagattgggtggcacctggcacctgcctggcttactacaggtgagcagggaccccttctccagatgagaagtctgcacctggagctggacatccagcacccaggctcagaattccagccactctgtgattcatttcccagcctgggtttttactcctcttggaacgatgctggtctcccaactgaggacaacacctctgacctctgtccctctgcctgagactgtcactgccacctactttctacctcccacctcgcctcctcctggagtgagggaccttctctactccacagacacggagggccggtgccaggccccgtcccacgggcagcggccagtgtgggcctgcagagaaaggggagggctccaggcagccaggcacttgcatgggagcttgacgggggagactcaggaccgggggtatcactgtcaggggagggggacagaagcatcagtctggtggctgtgcacagtttaaatcaggagtcatcaactccagtgttcccagagggccaggtgagcaaataaacgagagcagtattaatatttgtaaagcgcctagaatagcacctgaaacagaaaacagaaagaagcacatttccgaagcgccttctgcctaaccaacagcgggacagactcgctgatgagtttcattgttcactgcctgtctcccctgccgggacacaagctccaggggggtagggggcttgtctttgcttgaattcccagatggtgcctggcacaaagcacacattcaatatgcgaggaggccagcaaagcagatggcacaggaggcccagccgacgggtggcatcaggtagcaccagctgcaaaccgcggctggattttctgattgtttttaaagagaacctggaaattcccactgtactgtgaaatctcctgatttttaaaatggtgtttaaattaaacagagcacatctacaggctttgtggggtgacgagggcagaaagctgaatccccctggacccctggagctcatgtgggccactgctaggggaagacagagatggggatgggactactggctctcactgcacggggcaacacctcctcttcggtgcctacaatccccagacagcacagctgcaagcagctggggcaagcctccctctcccaactcccacacacggctgggtgggcaactgctcacctycttcggcagcagggcaacaacacagcccacacggagctctgcctgcgcctgctgcttggcatggagccggtgatcggtggagggaaaggcaaacaatgtaaaggggtccaggggaggggttttacctctgagagcagtttcgagacgatttccagtggggcctggttgatggagtcatcctgcaggggggatgtcagggccatgtccaccagggtccggatctctttcaagacaacttcccagcggcttgggttactcagcactttcttatatttgtaaatctttttctggttgaaagagataaagagacagcaacatgttactcacgtaaggaaggcagaagatggaagacaatcaaagaatcagatgggttagggtgtaaagggccctgagaaactgacaacttggcccagtccccgtttataaggaaactgacaccccgagagaggaagggtctcatccaaagtcacggggtgcatttgcagccaggcctcctgacactagactcatttcccacacaggctcacttcaccctgatgataatccttgatagattacctttttcttttttcctgtttttttgtttttgtttttgctaaaaggatgaagaaaccgaggtacacaagaggttagaaaatctgcccagggctctagagttggcagagctgagacagaaacatgtgctcgggctctcaagccagtgccctcaccaccatactatactgtctccacacagtttccaatgacttcaaaaagaaaagggggagacttctcttttagatcgtatcttctgccaaactcacttcccaaggattcaagcgcagtaagagtgggaatggtcagtccacaaaggggctttctctgagttgaaggcactgtttccgcctatgtcaatcccaagaggtcgcttgaagacaggtagtcagctagggaacatgacagacaggattaaggccaggaattagactccggccaggtagggactaaacctggaatgctcccccgggaaatccagcgctgccctccgcatccacctggtgaggaagacaagagtgctctcacctttgcttgggcgctgtgtcgaagccagagagcggttgggacaggggctgctgcctccctggatttgaggcagagttagttccgcctctctgacatcatggaaacggaggccctcggaaggcggaggtctgggccaagcactccctccacccccgcccgggctcccgcctttgcagctgcctgccccatgcacccggcctgcttgagagactttctaactggatgaactccttcattaagtgctctgctccttagggagagcctaattttagtgttaccatgccagcagccagctggggtgacatgtcacaatctctgagccaaagtcagaaagaggaggggggagaggagggtcccttgctgaactgctaaggctcaaacagaaacttagaagctgccagagcctccctgaccgctgagtttctgagctaggaattatcaagtggtcaagggacccaccgctatcaaggaagtatctgagggacacattccatgccaagtggaacggttacttctgtcggtgaggcacactggtgggacgggaggtggacctgagtcggaaagatctggttcttcctagaaaactttcaccttctgagccttagggtcctgttctgtaagtcaggatggaaaataccggcacctctttcaatctgtaaccctgacccatcctggacccatgtggtccactctatggagccgcattcaaaagtcaagtccagataaatcagccaagagtcacaaaaaggaacgctgagactgaatctgtctcttgaaaaactgaaggagatgaaaygtaaaacctaggccaatacggcatcccatcttcctcctctccattattttcccgcaccccatgattttctggggcctctgatatactcattgccactggtgtcgcccccatgaactcacaccaaagacggttttcattccccccgcccatcaccccaagtctttcccgtcatctctcccttctcctctctctgctccttctttctccttctctctagttctttcatctacccacctgcccacctttctttcctccttccagcacctggtcttactattctttgcccattcacccattgcacatcaagaattagaaagagatcagctcttctcataggcccagcagagcagaggaggccagggcagcccagcatgccccagggagcgggaggggaaagaccaggaacattcacttgccagccattggagaccctacgaggacaggaagaaacgcgtgacaagttgtcgggggtgagtgtacagtgaagagtaaacatgcagttgatgttgacgatggtgacagtgactactggctgaacttcattaacgatgagacgcacccagtccactgaggcgtctctggaaccataaccagcctccttcctagttactgtcaaccaaagccgccctgtcctagtgctgtgagcaggacacgctgcctgaatagcacgatgaaatatctgtgcaaaacccaacatgtctgaagcaagaaccctacccgctccagaggatgaatgctcctttgagcctcagagtctgtggtttyagtttgtacccagagaattgtttaatttttaaaagaccatgaaatgatctcacaaaatccaccctatatcaagccccaaagcaaaccacagcgatccacacccgtgtcttacatttgcatggagtctgggctctaagtggactcttctgatcagctgcacattatttacttttgaaagattaatgacttcattcttttgcgaaagatgatgcatgctcattgcaaaaaatctaaactgtactgaaaagcacaaagaagaggataagttttaaaaggcctcaaaaatcccacaacccagaaatagccaccattaatatttggtgaacatcattccagcgaagtctcatttaaacttgcaaaatacaaccagccctgaggtgggtggccatgagtacaatctcctgttctccacacacagatgccactcaagatgcagaggcaaccagtctgaggcatagcagggcccagtgggcaacgctggcaccaacgcagtttcagacacgagccctcggggtcggtacacccagcctcagctcatccacagctcccctccttggagcggggaggacaacagctttcccgggagggcccaagcccttgcctcacaggcatccatgggagagtctgcagaggctgtattcagagccagaagatcccagggcttgtaccaagggctaaaatttcatgaggacataccatgtgccagcacagtgctagctcttatgagctttatcccactcaatcctcacagtatcccatgagttgggggcttgtcatagggaggaccctgagacaagggactgagtgcaaatggcttactgatctgagagggaacagcaggaaatactggtggggagagtggggaagtgagacgggcaagagaagacagtcaataaacagggcactgtcaagcacatgatataggcaatgagggctcactcctgctgggggctctaggggacagtgcagatcacactcagagttgacgttcctaaagagtgagggagctggccatttgtccattagctccctaaactcttcagggctttttttttttttttttctgagacagagtcttgctctgtcactcaagctggagtgtagtggtgagatctcagctcactataatctccacctcccaggttcaagtgattctcctgcctcagcctcccaagaagctgggattacaggtgtgcaccaccatgcccagctaatttttgtatttttagtagagatgggcttcaccatgttggccaggctggtcttgaactcctgatctcacgtgatccacccgcctcggcctcccaaagtgctgggattacaggcggcagccactgcgcctggccaactcttcagggcttctgactgccrtgtgcccaggccaaagtgatcccacagccagaaaaaagcatgcgctctgcagggtcacaggtgttcayggtgcacagctggcagccctcacgcgatgctgagggggtggccagctgcagcttctgccagaggattgttggtgttctctgtgcacasaagcctatcatggccccragaggtcaagagacttgcccagagtcaagcagctagaaagggacaattcaggaatgaaaactggctctggccactgcaaagctctttccatcacatcagtgagggccacgatggtcgggtgatatcagatttgccaagagatcctgaagaagtgtcaagaatgcttggtgacacaaggacaagatccagaaacaagatccacaaggctctgagagtggaggccaggtaaccagaaggcggtggaagcagcagggggagggtgggctacggctctgcgggtgcggggggagggtgggctacggctctgcgggtgyggggggagggtgggctacggctctgcgggtgcggggggagggtgggctacggctctgcgggtgcggggggagggtgggctacggcgttgtgggtgcgggctgcaggcaggcccctgttcccagaagaggctctgagccccaggtcagggtggccacagggatgagggaggcctgtccaggatcaacagggccctgtccctcctccctaggtgacaaattagcatgcctcatcccaggaactctgatgagctcatcaggtgatgaatcatggtggagctgggatagggacgcctccggaatccctgctccaggctccctggaggctggccctcagctttgcaatatggtcttcctgctgagtgcgctttgccaggtggggtgggtggcctggtggtttgtctagcatggaccccacaggccactggattcttctgaagtggggagtacacaggggccttggaactgttctgtggctgggcacacgacctggtgttttcacagaaaggggctgacttagagcagggttggtgaactatagcatgcggtgaaacccagccccctgcctgtttttgttcgatgagaccaagaatggtctcacaaactgtaggagttgtgacggaaaataaacacagaatatgcaacagaaatccaatgtggcccacaaagccccaaatatttgctatctggccctttgyagaaaacagtttgccaaggtctggctttaaaagtcaaattccagcctaggagtaagcatgcaaagaagatgctcaacgtcattagccctcgggaaaacgcaagctaaaaccataaagagatacgacttcgtcctacgaggatggctgtaatagaaaatgacagacaacgccaagtgttggcaaaggtgtggagaaactgggaatcttgtgtgttgctggtgggaaggtaaactggtacagccaccttggaaaattgtttgaaagtttcttaaaacattatacataaatttatcatatgacccagcaattctgttcctagaaatctacccaagagaaagagaaacaaactccaaagacatgcccaagaatgtccatagcagcattcttcacagaaacaacttaaattcatcaactgatgaatggataaacaagatgtggtatagccattcaaccaaacagtatttggcaataaaaaggattgaattacccacatgctacaagacggatgcaactcataaccactacactaagggaaagaagccagataagaaagacatagtgtatgatttctcttatgtgaaatgtctagaaaggcaatttcacagagacagaaagtggaacattcattgcctggggcacagaacaggaatgagactgcaaacaagcatgagggcatctttcaagatggtggaaatgctctaaaactgaattgtggtgatgactgtacaactttataaatttactaagatcactgaattgtgtactcacagtgggtgaattttatggtatgtggattccatttcaataatgctattttttaaaaatgctatcctagggaggtagtcatcagacaaaaccaaaggtagtatggctcagtggcgaagcgtataggcttcacgagcagactccagatcaaatctaagctctacttcatccatccacccatccatcatctactcacccacctaccattcacccacacatccatccatctgcccaaccacccacccatccatccatccatccatccatccatccacccacccgcccacccatccatccattaatccatccactcattcattcatccatctacttatccatccaaccattcacctaccctctcaactatccacccacccaactatccacccacccacccatccatccttcacccacctcatcatccattcatcacccatctaccatccatacttccatcactcactcatcgatctattcacccttccatccaatcatcccatgaagatctactatgacgtgccaagcactatgttaagtactaaggataaccatggtgaacaaagcagacaagccccggtgctcatgaaacttacagtctattacttgcaccagtttccttgtctgcaaatcaggataagaataactactgtcaaaggcttgctgtgactatttcatgagataatatataaaacacttagctcagttcctggctaaacagcagctctgattgttttcacctaccaagttctgtaaaggagtagtccagggaggtagaactcaggagggctccccacatccgagcccaagccccaccagccagcggcaagcagagacagcaggcagagcctcctgcttcccgtctggcagagtcagccactccagcgctgtcctcaccctctctgcttgtcaaggaagggacgttacctgggcaacacttgccatcgctctggcaactgtcagcagaggcaagcacataygccagggttctcaggccagggaaagcagagcctgttgctcctccacgggagacaagtcgtcagcaggaatgtgccccttgccaggagaggagtgactcagaatgcactggaagcacgtcgcgccaggcaggggctgctgctctgctgctctgctgctgccgcagcctctggggctcgcgcgcgtacacacccaagcacgcatgctccccaccacctgtcgtgaagagaggacgctgcacgggcgcgcccatggcactgcagagtggaggaggaccccacagggaaatatgagccagggaggacccagcccggctttgaaaactttttccagtgcaggtcctacagcggagctgcctagtccagaagctaccagccccaggtggctacgcacactgaacttcattaaaatgaaatacaactacaaatccagcatcttgatcacatcgtaacattacagttactcggtagccagctgtgtctagtggtgactatagtggtgcagacagagaacattttcatcatcgcagaatgctccgtcgggcagtgctatccgaaagtcttggtgtccctgtcatcacgtccccacgggcccaggagcatgcatgtttgcctctacccatcgatgctgaggtctagtatgtgtgtggcactgcgttcggcccgaggaaagggcccttgcctacctcctcccatgggagacccccctctccaagcccccatctcactgggaccctgccttggaattttcttaaaaggtctaccaaggtgcaatgtccccacttgtgccttgcacacccggggacaatggctggctggttatcttccctggcttccctgattcaagactcactatggctgcagatgctaagtgtgtaggaaataatttgctatctccagcaagccatggcttccgggaggactggacacttgggaggcagcatttttggccttcttgagtcctccagaatagcttcccttcaatccggtgagcatcagagactgtcacattaccttcagatataatgcaggcctcataactgtcccatgggtgttacccccaaactgcccttttggccgccaagtcttcaacatcaacctaaamcccgctcataacctctcagctccctgctggtgcactccccacagagacaccctgggtcamacacagccccctggccttattccccatgcctgctagcccacacaatccatgtcacaaaatcagcctcggtgctttggctacaattttccagggaaggaggcaacactgtcccgattatctgtgcacatttccagtgaaatacatgggcaccagcaccaccatgactggagggcatctgtgatctaattgtggagtataaaataacgagaagacactcaacttaactagaaagtgagacccccaaaatctcatttttaaagaaatattgtaaatgcatgtttcgttcgttttcattacaggtcagggctatagggtcaacggtgcttctgggattagactgaacactattttttttctctctgactgggattcctttcttgccccaggcttggtagggacaaccctagtgcctccgggaatcacacaggggctttaccagtcacagcccatcactctggcctgagaaactaggctgtctgaggcaccagggggctgccatcactatatacacatacatatagatttacttcattgaggtaaratccacacaccataaaattaaccattaaccttatttatttatttatttacttacttattgagacagagtctcgctctgtcacccaggcagtggcatgacctcggctcactgcaacctttgccttctgggttcaagtgattctcctgcctcagccttcccagcagctgggattataggcgcccaccaccacacccggctaatttttgtatttttagtagagatggggtttcacaccatgttggccaggctggtctcgaactcctgacctcagatgatctgcccgccttggcctcctaaagtgctaggattacaggtgtgagccactgcgcccggccaccatgtacccatttacagtgaacacttcagcggcgtttagcacagtgttgtgtaaccaccaccactatttccaacacttctccatcacttccaaggaaacccttttaagctgttacttcctattgtactctcccccagcccctgggcaactaccaatccactttctgttcctggattcccctattctgaacattgcatataaatggaatcatacactatgtgtccttttgtgaccacagtgaggcctgggaatctgcattcagcagcttccaggtgagacagatgtccttgagccctctaagcagcaaggttctcacccacatgcctcacttcctctcctccacgaggtggacgtgttacagaggagaggagaggttcataccttgcgcaggtcacayagcttgtgttgtgggtggaactgtgtctgccaaaactgttgtgggttaacatgtgtcttccactgcatataaatcatacacaatgtggccttctgtccacttagcataccgtcctcaaggttcatccggctgtggcagctttgcttcacccccttccatgactaacagtccactgcatggatacgctgcaatttctttctttcttttttttgcgagatggagtctcactctgttacccaggctggagtgcagtggtgcgatctcaactcattgcaaactccgcctcccgggttcaagcgattctcctgcctccgcctcccgagtagctgggactacaggcgcccgccaccacgcctggctaagttttatatttttagtagagacagggtttcgccatgttgaccaggctggtctcgaactcctgacctcaggagagccaccgcgcccggcagatacactgcaatttctttgttaatccgctgatgaactcttgggttgtctccaccgtaggctatcatgaatagtgctgctatgcacatatattgttgctttttgccctgtccccgtgcctcaactgcactgaatcagtttaaattttgccacaggacagcacagggtgtaaggggtcttttaggggaccccaatttaccccacacaattactgaactctgttacctgctggtccaactaattcattgatgaattaatcaatgcttacccttcaggactcatgttttcaaggtgggtggagggacgcctactctgagtggggcactgtctctatggaggggcagggagtgggggaaatgatacagagatgagacaaaccagcccctgcacactcccagtctggctgaagggtgagacagggcacagaacattctaaccaaactactcattacagtcataatggctactacatatcaagggctgacattttccaagaacagcaagcacgcacactgggttctgatgaatgacgagtgacaagacagcggaaaagccatcgcttctgaagggcactccataggccaggtcctgtgcgaagcactttgtataaatacattttaaatcatcccatccactaaatgaggtgagtggtataatgtaagtcccattttacagatgagaacatcgaggctgagtgaggtaagtcatgcagctactaagagctaggcagaattgggatccaggtctagctctggatcctgagcacctgaccatcatgccactccgagaggcaaacctgagcacctctatgccttgatcaatgattctgctgccttcaaatcggagagttgagcctcgcctcctcggtttcccaaaggcagttgcaggctggtgcagctgggtgcccagtggacacctgcctgaaaagccagctcctggggagatgggcaatttgtttgcaagaggggaaaacgcctaaatgcccaccggtggtggcctcctgtgctcaatgccgcttccagggaaacagcgggaactcaggcgggtgtcctgctccactgtctctgcggcatcggctggttgcctaggtaaccacgtgcctggctggcaaggagataagctggccttggtgtcaggctcccagctgagtaccacatcctacctggctcttcaggccagctgcaccgtgggcaaaatccaatcatcacgcagatgctgtttgagcacattaaaaaaaaaattgtatgtagctgttttcctcgctgagctaggagctgcttgggagcagggatgacatctcatctgttcctccgatgtgttggatggtgactgcagccacccagggaaggtgctctcggtgtttgttgcaggtagaacaggcagtggggagaatgaaaatggcactgaaggctaacatgcgttaggtgctgctttaggccaggccctgcaccaaatcctttcacctaccctgcaactctcattcgtgtgcacaggaattgcctgggggtctggttaccatgcagattccagctcagcagagctgggcgaggcctgggaatctgcattaagcagcttccaggtgacacagatgttcctgagccctctaagaagcaaggttctcacccacaagcctcatttcatggtggacgtgctgcagaggagaggaggggctcacaccttgcccaggtcacacagctggtgttgtgggttggactgtgtctgcccaaaacatatgtccaagtcctaagcccggtatctgtgactatgaccttctttggaaatggggtcttcgcagatataattaagatgaggtcatactggattagagttggccctaaatccagtgactggcgtcgttataaaaaggccatgtggrgagagagagagacacacacacacacacacacacacacacacacatgctccagagagacctccacgtatggaggcagagcctggatgccaaggcgcatcaaggatagccggacaccatcagaagctgggtgaggcaaggaaaaggccctcccctagagtctcagaagcaatgtggccctgctgacaccttgattttggacatctggccccagaattgtgtgagaacaaatttctgttgttttaagcaacacagtttacggaaatttgtcatagcagctgttggaagcccagacagctgtaaggagcaagcaaggactgaccccaggacgcctggtcccagtcagtctgccatcttactgcggtgactcgagctgagccgtccagccccatcatttcacagaaggcagcagggccctctgcaactgtggttgagaaagtgggagctgggtttggaattggttgggttttctttccctggggaattggggggggggggcctgatgtcctatcctgctcttgctgcagcaggggacagaaacactgacttccaccctaaggcccgcctccagcccattacccgattgcataagccctggccctgccctgcgtcagaaacggcacacctgggcacctgcatcatcagtgaggtcagagggagccacctggggacccaggaggctacaggaggaacttccaggagaattcgggyagggacgtcagcatggggctcgcacagggtccctggcaaagaggagccatgggggaggattccggccccaagctgtcctctcacacaaagctgtacatcagccgacaccagcagccaccatcacaccagctaacatccccgggcttcctatgtactgggccctgtgctgaggtgtgccccaaatgactctatcaggcagggttcttgaccctggctacacattaaaaccacccaaggggcttagaattccaataacggagtccaacctcaggacaatcccatcagactggtgttgggggcaggcagaacctatgcatcaggacttttttgagcgccggtatatttaaaagtgcatttgcacacccatgttcacagcagcgtcattcgtaacagccaaaaggcagaagcaacccaggtccaccaatggataaagagagacataaggtgtggtctacccattcactgcagcattattctgtcttaaaaaggaaggaaatcctgacgcaggccacactatgaatgaaccttggggacattaggctgagataaggcagccacaaaaggccaaatcttgtgtgattccacgcatatgaggtccctagagtagacaaattcttagagaccgaaagcagaatggtggatgccaggggctgggggagggggtaatggggacagagtttccatttgggaagaggagaaagttctggagacggatggtggtgacagcagcacggcaacgtgaatgaaccactgaactgccacctaaacctggttcaaatgatgcctcatgcatatttcaccgaactaaacaagagaatatttaagatctccaggtgatctgaatgtggtgcagccggggttaacaggtgcgacccccattctacagacttgaagaccacaacacacagaggaaaaggtaacccactccaggtcacagccggccctgtaggaaccaggattctggctcagggtcaccccctggtcctgagctccggtccttgaagggactgagccacacacacaggaacaatcctggactctccctcggcattctggaaaggctctctgatcttcacacggtcctaatcccggcgggggctgtttctccaggaaaactgagtgcagtggaaaaacagcctgcacgggtgggccgggtgtggggtgggcctggagaagtgcatttcctcatggactagaacaggcgcccctctttcagaattctaaaactcaacacagcctgcccgcccctcctgtcctcctggattccctgctctcaggctgaccagaggctgtgcggacaggaggcacctccctcattcccacaggaggctgaactggggcaggaacacccagttcagcaggttttaagttaagattttgaacaggctatagaaagagggaaagaggggaaaacattctcaggtgcaggcagaagctgccgggttcttctccaaggagaagggagaggggggagaggaaagggacaaggggagggatgagaggtgacagaagggacaataaggagcgtcgcctcgggcgtgttatgctctggccttgataaggatacgaccagtttctcagggttccttaatcaaatcccaggcaccatcccctcagagagtcccgtgcaggtgggggtgggccaagagctgtgggattttcttctgctcattcctgtgtcaagatgctctggggggagggctgtgcccggagacacattcactaagagaggcaaactcctgcctgggtcatgaggtgactggtggccccaaagaaggtatgtccacatcaacccctgccatctgtgaatgcaacatcccacgtttgggatcttgagatggggagatcacgctggattatctggtgggtcctgaatccagtgacgagtatccccaggaagtatacaaaggagagacagaggaggcgcaggccatgtgaccatggaggcagacaccggagtgagggggccacaagccaagtgctaagctctgaatgtttgtatcttcaaaaaattcattattgaaacctaatccccagtggggggggtgttaggaggtggggcctcgtgggggtgattagttcatgagggtggagccctcaccaatgggatcagtgcccttagaaaagaggcttgggggagctccctcaccccttcccatgtgagacacagcgagaaggcaccctctgtgacgcagggagcgagccctcaccaatctaccttgatggtggacttcctggcctctagaaccatgagaaatgaatttctgttgcgccagggaggctggcaggtcccagccccatgctcagcatgccaacttactaccctcatcactctttgctcactctacgacctatgggccagctgcctcccccaccagcctgcacactcctgggagctcagaggctcaagcaagccatgtttttgctcgcagatgtgtgcatcatcacaaacggagagtcgggcagatctacacttgaatttcttttccgcttcttatgagctgtgcagccttaggcaaactacatcacctctctgaaccttagtttcctcatctgtaaaatggggataatagtagcatttgcatcctggagctattgggagaattaaatgtcacatttcaggcttgataaatgacacctattgagttcagtaggacactgactaaagacagttaatgtcttagaaaaaataaaggtgaccagctgggcaccgtggctcacacctgtaatcccagcacttcaggtggccgaggcaggtgtatcacctgaggtcagcagttcaagaccagcctggccaacatgatgaaaccccgtctctactaaaaatacaaaaaaattagctgggcatggtggcacgcacctgtaatcccagctacttgggaggctggggcaggagaaatgcttgaacccaggaggcagaggttgcagtgagccaagattgtgccactgcactccagcatgggcaacaagagcgaaactctgtctcaaaaaaaataaaaaaggtgaccagaaaccccctaaatgtccatcaatagagaagtgcttacactgtggcccccacagtgcaacagcaaacagcagttaaaaagaaggaaggagggttacaagatctgccgtggattccacctgcacaacatgctgttaagtacagtagcaaatacatgcataatctatgttgacatacacatatatatgatctaattcacggggcttcagggggtggggggtggggaccaagtccggctggtgacagctgtcttctttggagacggaagtggctcgggggaggaccaacgggtagggctcagctttatctgcaatgtttcaaattattgcaggaagccgttcatgcattgtgcatttaattaaagagaaataaaggaaaaaactctccaaagatttcagaaattggaatcatgacggtgatattgtatctttccccaggattcttaaattagtcagaatgccatactttttttttttttttttttttgagacgaagtttcactctgtaacccaggctggaatgcagtggcgcaatcttggctcactgcaacctctgccccctgggttcaagcgattctcatgcctcagcctccctagtagctgggattacgggcgcctgccaccacgcctagctaatttgtattattagtagagatggggcttcaccacattgaccaggctggtcttgaactcctgacctcaggtgagccacctgcctcagcctcccaaagtgctgggattacaggcacgagccaccacaccgggccagaatcccatattcttaaagagaactggaaggcatctgagatcttactacttttgacttttcagtggtctagtagatggataatccgatttttcaagtgcatgttctttgaaaaattcatacagaggacaagaactccagcatggaaggctcatggcccgcacacctgtatcatggtgcacacacacacccacaacccagttacacacacactcacacacacaaacacacamccagcccaatttaaaactgcacctaagtttcagctgcatcatacatgctggctttcttctttttaaccttaccactgccctccctcccgccaccccctgaatccatgctaactccatgctcaccatgtaaaccccgaaaatttgagactatgttatatatcggggtccacaaaccattttcctaagagccaaataataatagtccaggctttgtgggtcatgccacctctgttgtcaccagcttaatgccacagcaggaatgggcagagctgtcccyccctcccccaaatgggcagagctgtccccgccaccctgaaaactccttatttataaaaacaggtgctgggccagatcgtttgcagacgcttgacgtctatcatttcatctctttctccatggtcacggataatcaaatacaaatatatatttgtctggcagcagactttcaacggcaaaaactgcaattacttttgcaccaacacgatacagacaggttttgtggggtcctcatttcattttacacaaatggcactgcataatacttatgtctgcatctggcttttccctcctaacacctggtgggtgtcactccagatcaattcgtatcgattttcccagtctgtgtgcttttctaagccacttcaagggtcattaagcagaggtaggatatacctttaaaaaattaaaatgaagccgaccaaatccttccccctgactctgtcctgtgtgccaaccctcctgagggtctttctgacagggccaccagcttggccttctgaacctcagtaattggccctcccctcttgaccaaggccacccagagcgaaaaagcaatttgcactcaacattaaagactacggggtgggggtggggaacacctcttattaatcattaatataaggtggcattttcagggcatttcaggaaacaacgctgcttaattgcaacccaccaaataaataaaaaaatgcaaatactgtaccagagcctgctcttcctctgtggtgtgggaggcgggcagccccaggcgagtttcctagcccttccgaaatacagtgagggacaccacaggctctgtttcctttgggcctgataaagggaactctctctatcccaaataaggatttcccttgccaggcctcaagacggtagcatctcaacaggggcctctgttgtttatttcactaagaactttatctagtgcttgcagcacttcaaaggacatctgatctgttcatggctttgtttggaagcctccatccttcccagctgcatcctctgggtgggagtcaccggcgcctactacaaagggctttaacttatgagaatcctggagaaggatcctgttctttaataaattaatgttcagtaagtctctaatgtgagtttcaagccaggtaatgctgtcatgcttgaatataggagaaggcgcactcctgccctccctggggaggcggctcctcagacactcgtgcrgcagactctactcacccagagaagctcagcgtcctaggagtgagttcaatggtgttcaccacagtgaattctaagtgacctgcacaaacagaggggattctggcagagtaacccgaaagctatggacacgtttagtcatccatgcttgatctcaggctatgagaaacccagtaagaaggtgaaatggttacagaaggaggcagcagactctgggtttgaattccagcttggatgcatgagaaggttaatctgagagtcagactcgtgttcatacaatggagatataaaacccagggacactgtgcagcctaaagaaaataatgaaaataaagtagatggaaaacagtaggcactcaatagatgtttattgttctttcccctttcttcacactactgcagtggttctcaaacgctggggtgcatcacagtcacccggagggtatgttaaaatagtttgctgctctcatcctgccacctcagagtttgtgaaactgaagactggcatttctagagagttcccaggtgatgcagatactgctagtcttgggacttcactctgaaaaccactgagctaccggttcaaaatccctgggtctgcagtgccaggaggcctgggatgataaggaccctcttggatggaagattggttgcagactttaacaaaagtctcaaaagtcaacagacatgatgaatggtctgcctgagtctgttcctgcctccagccggtgtcaggctggccccgacctctggggtgtgctttctaaggtccttgtactcctggacagaggtcaggttcagcccagttttccaaagggaatggtccaagcatgtgccagcccccgctggaaacaaaccaccctggccttctgctgccacgtgccagcaagctccattaggagtggcctcagtttctctgaaagggggtctctgtccctctcaaggctttctgcaaaacagtctgttggttctgaaagtgcaccagggtgctccggggagcagaatgtgggcaacagccctcagggccctagtcgttctgcatcatctcccggtcaattatcctctctcccaaacaccttcccttccagagttagccggctgtcccgctgggtattttctgatgatccctcggtgaagcaagggcctaattcctctgtggggacaagcactgctctttttaaagtctctgtttggcctcatctccgagccaacaggccagcaggtgggagccctggaggccaacaaaagaatggcaggccacctccctcttccaggctggacacctggccaaggtgtgccccaagtgcagatcagcaacccagctcaggggcctccactgcccaccactggctgtgaaagagacacactgcagacgcctgcagaacaaaagatcttgctcatcaagacgctgcctctcatttacgttttaaaaacttgtctttaaagggcgagaaaaagaaaaacaaaattctgccttaaagggcaaaaaacaagttcacccacaaaccgtttacatgaaaaacttccttgtatggctccatgactcatcagcctcatcaaagcctgcgctggatgacacacgaacgctcgggtccccccttccttgcccaaagaaacgatgacaacccacaaacgccacttcttccttcgcagtttgggaagccrctgtaatgcgtcatttctgaggctcaggaaagacctttacccagaaggtgggggtgggggtgtcttgaatgtcccaaagcccaaggctggcccttatgtagagttgaggaagccctggccagggacaggggagtgcaagggaaggctcggtgacccaggcacatggtgcaaacctaggacctccacctcccagctctgtagccaggggcagctcactccaccctggtccctggagtgtgcttacaggcttccgtgttggggggctgcgaggcctgggcagcaaaccgccttgtactgcctctggcctgtggatagtagatgctcaataaacctctccttcctgtcagaaactcagtctccctatgtggatgacagcattttcctaaaggatctaaagttccatccaccttaaactctgcctgaagggaagactatgaaactagaaaagaaaatggtgtggatttgtgtgctactgcagacactgctgcgacatatattaaggagcatggaacggaaccgcgtggatgataaagtctgcgtggtgtttacaaaggaatattcataagcactttctgagaagccccgtgcagctgctaacagtgactgcctaggggaaaatggacttgaaggagtagaggccaacttttcattttatacctttctatactttttaggactaccacctatgtacgtgcattttatttttgttaaatgttcgcaggggatatctggcaggacaaggaactggctggaaaggggcgcgaggagatcttctgggtgacggagatccaggtggtggttactcaggtgagtacagcagtcagaactccctcacactcaacagttagggcatgcacattttgtcacatgtaggtaatagcttgatttttttacaatttaaaagaagttaagagagatttagggatagtgggaattttcttagttctctttgtccttttcggtattttaaaaagcttcgtaagtgccagtttttaaatgctctgtgtcttagggctcttgcacactgctggtgcaagtatacactggtgcaaccactttgcaaaactgcagggcagcatcaacgaatgataattcagctcccaggcatatacgcaacaggactgtggacacacrttcaccaaaagaygtacactagagtgtttacaatggtctattcgtaacagccccaaactggaaagacctatccacagaatgaacaagttaacagagtctaaccagacaacagaacaccacccagcaaagtgaatagacaaactgctgctacacacaacacagacaaatcataagaagccagtctcaaaagagttcagggtgtctgagtccatttagataaagttcaagtatatgcaaagctcacctgtgctgctagaagtcaggatagcagtggctgcccatggtggggaggaggggcccaggtgaatggtaactctttttgatttgtacccttttctagatgtattttmtccttcaatgagaagtttatttcgaaaacgtcctgtgtctcttccaaagatagctccagctgggcaaagtggcagctctgtgggctccaacggaagaggccaaaaggcccatcctcctcctgtcccctgggttcaattcacagccctgcctgtctctagctgtgtgatcctggacgtgcctctctgcttcctcagctcctgcttcaagacaggcctaaccaaattttgagaagtccccagcagagctcccgaccctagtaggtgcctagtaattgtttttctctccctctactgtaacgaaagcctgcgagacatgagctctctttcccaatgctcccggccctctgccacttgttagtttcaatccctgaagcagccctggttactagttatggggtccctgatgacccactgtggggcttgggctgtggctgggagatgctggagactgtggccctcgcgggggactggcagcctggccccaaaaggtttcccatttggattgaacacgtgcacaaagaggctgccaggctggactcaccagctgcacctcccactgagggcccctcctgcagtcttggagtgggctgggccccctgcctctggggaaagcccctcctttcacagttctccactgaatccctttgatcccctcttaagaggtcacaaagccctctttgactgagtgccagaaattaatctggatagaattcctgccttttcaacctggatgaagcaggcaggtggctgggcctggaaggggatcaaggccgactcccgcccatccttgcctccccaccattctgccttccttctcggagggtaggaccctccaagaatggacccacggtgcctgcctggaagttccacagaagcttctgtgagaaaaccccacggaggcacagccagagccagtggcactgacccggcctccaggagcactcgccccatrggcctgggcggtcactcaagcaggacgggggacactgtcactgcctctgtcaactgggtggccaggcaggggctatgttgagaagagctctgcctcagggcaaagcatgcggtggctgatgggtgatgcccgccctgggctcatgagtcggtggcctgcgtgccacacatgtgcctccgtcttctgcagccccgtctcctagcatcctccgacaccaagagcctgttttcctctgtgtccttgtagatcagagaagaagaatgaatgttctgagtgggtaccacatggcaggtgctattctaaataytgaacagctgtgaacccatttaatccccgtaagaaactggtgagcttggtttcatttgactcaagaggcccagagacgaaagcaactggtccagggtcacacagccagcaggaagtggatcagggttggaacctgggcagtctggccctgaagcgctgcagaaagtattattttgggagcaaataggtaataggtggtgagagccacctaaaaatacccctcctctctggcccagtaaccacttctagaaatctgccctaaacaagtaactcaaataaagcgaaagctgagatacacgacggtcatggctgcgttatctataaytgaggaaagctgggaacgacccgaagggcaaccacagcagaggcctttggtaaatggccccagcctcttcacggacgattctgcagccattaggaagcctcccttgggcgctgtggcacggcactgggatgtctgagctgccatgccttggcgaggctcacaggactgtccatgtgcctggccacagctgctaaaatggctgcgtgaagatggacgcagcctcggaggagaactgcaaggtcataactggcaggagctgggggtgctgaccttgaagtgatcgtaaaaaggtcgaaaaggagacagagagggaggaaggtggccaagacggggttagacgggcaaacggaggtggggtggggttcaagggcaacgtcttccctcaagaccaagggatgagctgggctagaggggacaggcccagccaggagccacctcggagggtcactgtatagagtgagggagtcaggtgcaaggccagatctgggcttccaaacctcaagtttaaagtcaggggacacagcgaccagtgtgtttggggaagatgtggaagcgggtcagtcctgagtgtgacaccgggcctgggagaggtggtctgacagcggctgtgctgatgacgtgcaagacaggatgaggcaatcagcccttctgcgtgagaaacaggggcctgcctagtcagacgtcaattcacattatcttttttttttttttttttttttttttttttttaagcacagtttcactctgtcacccaggcyggagtatagtggcaccatctcggctcactgcaacctccgcctcccgggttcaagcgattctcatgcttcagcctcctgagtagctgggactataggcctgagccaccacgcccagctaatttttgtatttttagtagagacagggtttccccatgttggccaggctggtctcgaactcctgacctcaagtgatcctcccgcctcggcctccgaaagtgctgggattacaggtatgagccatcacgcgcagccaattcacataamcctagtggtgatgggagacttagggaaaagtggaaagctctcacgcaagcctcaggcaccagcaacacccaggctctacccagatgtgccacgagaacaggtgggagccggggcactgctcccaagtgcacatcaggtgtgagaagtgtctgggtagcgtgtgtctgtgtacatgcatgcatgtacagttgggagccacactcccggtggctgaagtcccaggttctggactcactcagacttctgttcaaatcccatctaagccattgaacagctgtgtgaccttgagtgagtgatttaacctcagcctcagtttccacatcagtaaaaagggagaagasgaggaacaggcacctcctcagggctgtaaggattcaccaaggtgagtaagtgaggcactggcacatgcatgggacaggagttaagtgtccatcatggctcgaggaccagctgcagccttgtgctaaggccttggggtgcaactgggggctcggcttgggctggatgacgacttgggggatgtgagcttgggaagggatttgcagcctggtggagaaagcgcctggggccacatctctaggacactaggagtggctcttccccagggaggctcccatgaccaggaggcgacccaggggaggtgggctccgggagcaaggtcagagccaggggtgacagcccctactggaggcccggtccagagcctcaggatttccccttttgtagggatccccccttctagcatggccctcagtgaggggtcaggggaggcatcagctcaagggctctgtgtcattctgacctggtcccctgggcctttcccctgcatggggatgagggtgatggatcccgccctcctgagggtgcagccagtggggasatgacccaggccctgccctcagcttcccgtcaggtgggcttcccctctctgagccccaggcactttgccttggtgctggggactttgagggttgtggtcccccagygccagctcccaacacagaacatggaacagactcattcccgaggcgccgcagccactcatgaggtggaagcgagattgtgaccctcgctgggaggcatctggctttggcacggtcctttatcctcatcctttatccacttggacgctcagtcccctctgctatgagatgggggagggatgtggaccccacagaactgtttccggactcagaggagcacaggggcacatagtgctggacayaggggacactccgtggccagagccgggcagagacagtctcgagggcrggcttcccacccaccctagccctcccaggccatgagtcagccgggaccacctgtggaggctggaaggggctgccagggagacaggccgagccagctgctcccaccatgtcggacccacttggagacactgatgatggcgcatgagaggctcccacgcgtgggctcctaccaggatcccttctgcctgctgcacaaacaacacagccttcgatcctcacacggcccagtgacgagacgccatgatcatccccattccacagaggagaaaactgaggcccaaagaaacacactccaaaccagcatactcatagtatccccacaggccacacacacactcacacacacayaaaacagtcatcccacatgccacacacacacactcataaaatagtcaccctacaggccacacacacacacattcataaaatagttggcccatatgccacacacacaccacacacacactctcacagtcacccccacacaccacacatacacaaacacacacataaaacagtcacctcacatgccatgcacacatactcataaaacagtcaccctacaggccacacacacacacattcataaaatagtcgccccatatgccacacacacactcagtcacccccacacaccacacatacacaaacacacacataaaatagtcaccccacaggccacacacacacacataaaatagttaccccacaggacacacacacacactcataaaatagtcaccccatatgcaccccacacacacacacacacacacacacacacwctctctctctctgtcactccacacaccacacacacacccacacccactgtcataaaataatctccccacaccacacaccctcatacaaatgaccccacatgccacatatacacacaaatagtcaccccacacaccacacacacacactcataagccacccacacaccacacacacacgcacaccgtcaccccacacaccactcacacactcataagccacccacacaccacacacacatgcacacccatagtcaccccacacaccacacacacacatgctcagtcaccccacacattcataaaagtcaccccacatgccacacatacacacacacactcataagatagtcatcccacaccccacacacactcatagtcaccccacacgccacacacactcataaaatagtcaccacacatactcaaaacagtcacctcacacaccacacacagacacaccagtcacctcaccacactcataaaatagtcaccccacacaacacacagtcacactcagtcactctcgctctcacacacactcacacattcactcttacacacattctcacgcgcacacacactcactctcacactcacacaccccacattcttttccacctttctccacagaggagggacagaggcctgggcctggatgcggtgatcgaggggctgtggccaccctagggggctgggaaacctgcccagcaagaagaaggcagcgtggccagggcaggcagccagaaaggatccaaagctgggctgggattttcccagagccaagggcactcctctggccctggcagccctgggacaggaatacaggccagcttcttgtgacacacagtctgctcattggtccccggctctggggcttggcccctggggctgttctgagtgacctcacttcccctggggaaaaaccatcttggtttccaggactagtgtgcctcggcctgaggaacccctctcaggaagcgagaaggtggagaggcaccaggagctccagctcccatagcaggtgcatcctggcttctcggggctcctctaggagcctggtgtgtgtctcctcacagcccagtarcctggacctgtcacctgggcctgttcacatggacagacttgyccctcacagctgtgcatacctgggtctctcaccttgaaaccctggacacagaaacaggccaatcttctcaatgctttgtaaacacacacggtcccctcacagcctgaacacgctcttggccttgccccacagactgggccttcatggcctcgtgtgcacacaggcctgtgccctcacagcctcatgtgcagacaggcctgtcaccacagggcttggcctctgagggccagggcatgagccaggaggtacatctgagtcagaaatgaagcctcattaacccagaataactatttaatgcttccacacccctgggaattagcctcaagggctgaaccacccaaaccaaacagggctggcctccccaggggccctcaggactgcagcttctgctctagcgaatgctgggaggtggagcagccatgggctgggagatcctggccctcctcctgcaggctccaggcctcctcagatctcccagaccaacatggcagaggccaggccgggagggctgggaggaagagcagagctgctcagagaaagaggcaaagatgttcagggtctaatcccgcttgccttcttggtggccttggaaccttgtgcgamtgacttatcctctctacactcaggtttccccatctgcaaatgttgataagaacagaacctattcagtgagaggaagtaattcacaaaatgcagtgtccattgccgagcaaactcctccaacatgggagctacaaccgtgtgtgaacagctcaaagttctgagctgatgccacaaaaacaacactgttacccagacggaaaagcgtgaccaagatgacctggatatttgccttcttccacaaaacaatttgaggtcaattccatagcagcggttgtcaatcgaccctgttatcatgactgtccccataaggaaccctagtgtctccctcatctgtcctccctttggaagaaatactcaagaataagatttcattgaatagggtcgagctttggagggccacagactattgtaatcattaagatttgtttaagtgtcaaggaaccaattttggtcccattaggggtgatgctgcccctgttgggaatggcctagagatgcaagtccaacttgatcaaaactaagcaatggggacacagtatttaggaggtggcattttttttttttttttttgagacggagtctcrcactttcgcccaggctggaagtggcattctttacatacaggagaacgtattctgacagtatgtgcaccgcagccacaggagacaaatgtatattggtgtaggagagaaaatgacaaaaacaagatagcattaggagatatacctaacgttaaatgacaagttaatgggtgcagcacaccaacatggcacatatatacatatgtaacaaacctgcacgttgtgcacacgtaccctaaaacttaaagtataataataaaaacaaaagagagttaaaaaattcaagctgaggtggtggaatttctaaaggtcctcaattttgatgttccactgattttttttttttttcagttaaagacagagaaaagagaaaagaaacaaggaaggaaaagaaaaagaaaaacctcaaataggtggttgtaaataaagaggggagagagagtggctgtatcagcagaagcagaggggttatgtcctgggagggctgtggagtcccaatctcagagaaaagcacggtgtgatcaaggaggaggtaggacagccccacagatctsgattgaaatctgctgggcaactgtaggcaagtcacttgatctctctgagccttggttctattacctgcttaacgacaatgaaccagaaatgacctagccagccctggcatctcacatgtactcagtaactgcatctgtattaggtgaacactttctggaatctgcccacagaaccaggatccaaattcacgtttcccagctaatttggctagctggcggtacctccaaaacaccttacgtttctttgccattttaaaaggaaggagagcatgccttctcaaatatcaccaaaactgggtacaaagagccacaggaattgagatcaagttgccaacactgaaatatcactgccacctggtggcagcatacctaaattattggggggcaattgtccaaggagaaacactgtgtctgaagcatgctgtagacacagccaaagcttacaccctgagagcaaagactaccattgatcacctggcaagtgggccagcacacacccaggcatctgccagttccttgacatcctgatttaggttttctgaaaattttttaaactgcttgattaaatttagcaaccataaataaaccggatgccaccataattgaatgcaaacatccaggtcttcatgagagctgctagaaacacagtgatcccagttctggacttgctcaatcaactgtctgaatcccacatgcaaaccttaacatttttggggtggggcatgggggtctcactctatcactcaggttggagtgcagtggaccaatcttggctcactacaacctccatctcctgggctcaagtgatcctcccacctcagcctcccaagtagctgggaccacatgggcgcaccactacgcccggctaattttttgtatttttggtacagatggcattttgccatgctgcccaggctggtcttgaactcctgagttagactacccgcctgctttggcctcccaaagtgttgggattacaggcatgagccaccacacctggccaatccttgacatttgaatgtttcaaggccgagcttttaaatcatctttctagccaaagcctcctgaagtccatttctatgcccatcatgttggttgccccttgcagctgtgcaatactcacagatttcacaaatgctgccttccaggtgcacgtgtaagtcactgttgaaaatgtggaccagggaaaggcagaaaacagagccttgtgggataccgcacctgacagccttcattgatactcatcttggcctccttttaaataaggcatttttcccccaacctgtcgggtaggcagtgtgtctccaagtacattctgccgtgtcctgagctaagagaaaatgcaaggctgtcactttctgaggccccacaagtaaaacaccatggggaagggaagaggtggtacccccgtgaccaacaccgctcagtcctccctctcaactgctttggcatctgacccccagacggtccccagtaggtgctgacgaatgtcccgcctgtcttcagacacactcgtacccgggcacaaagagagacccaggcatcagagatgttctcccagtggatacagagctctcagtagcacctgctgatcacacgagcaggtgtgcaccaccttacctgcttggctgacatctatgccttcccactctactacattcagaaatttccagtacatacaggtactggaaaggtcgagctgagccctgcctcagccccttcctaacgatgggagcttggactccagtctgagcctcatctttcccgtatggaaaatggcaacaacgataatcatcaaccttatgcggttgtggtgagggtgaaatggacatgatgagactagcagagctcctggcacacagtaggagctcaaaacacgccagtcctggcacacagtagaagctcagtaaacactagttctcttcccctttgcaacccaacgtggagactcagctcagcttctgagacttggccccacagcacaaagcaagaggaccagtagctgacagaggaaaggaggggagtggccctctctgggaccaggaaagtaattatctggggttgcctttctgcccccaaccctggccgttgggggagcccctctggagccatgagaggaatcctgagtgttccctgggtcctcccaacacgtgacatggcacccagctctgcatggggccagctgttcatcccctgtggctccccagcttactgtaaggatgacagcttatgacacactggtcattccagccatacccgctgtggggccaggggcctgtcaaagcttgttctaaaccagaagatcagaagacaaggagagacagggaggcagggcaggaatgagaagctgactgtacgtgcttcacgccctggtcctgacgtcaaggtttccatcgcctgagccatggggcacaactcaggctcctcgggtggctgggggacccctcttagaagatctgcccctgggtctccaagaagatgaagttccctttatgtgccagaaagctctgaaccatcctatgtagagccagaatcagaaaattaggccacagaatccgacaactgaaaatcagtgaagactacagaaatagggctcaggattttgaatctctgttaagtttacacttggcacagcctttggaagttactttcaactaagcatcttgagcccctgaagtccagcctccccggctggactcccctcagggtcgccctcactctgagagcaagcagttctatgatccttttgaagcaggaaaacagctatagggtttgagaacaccagggcgagaatgctatttcagcactgcaggggacaggaattgaacagcagaggacgaagggccaggggctcttaggtaggggaacaaagttcctcagctgagccatctggaaggcatgagttctccactttcatgcctctgggtgacagattggctttaagccatcgcaccactgcctgagtcgctttaaacaagcaaccgagtcagtacttaccttccattgcagagaatggaaccactggtctcgcaggtagctattggcagcctgtaacgacaagaacaggacagcaaggtccggtcatcagcttgcggcatctcagggcatttcaaggccagcatgtgagcccccaagcctgctctgtagacagcgtctgccctgtgaccctaacaagcctgctgaaagatatgctaagctgagcctgttgtgtgcaaaaccaaaacagaagggctggtcagggaggatttcctaaaaacaagacatcactagcaccgtgtgcttcctttgctgtatatgagtgacttcagacactgctgacttgagagctttaactgcacacacagctggacttaggggcatgggagggaatgggatgaactggttggaggcctgggagtgaggatggtgggggctggctgggggcctgtgtatgaggactgttctaggaacttggcttttgttatccacgtagtctctccttggtcctcacagcagccctatgaggtggcacctatcattatgcccatttcacagagggaaaaatcgagaccctgagatctcacaatgaagtgcattcagacccagggtagcctggcttccaagtctgggcatttaaccatgaccttctcctgccaatggcagaagatcatggtaaacggcacccagcagacctaggctaaacatcrcagcgggtgaaacaaaaccttctcagctccaccccacactagctgtgagtctttggacatctcagcctcaattttcccatctgtaaaatggggacaataaccctgattttccagggatgttttaaagaccagaaattattcttgtagagcatctagaaccaggcttggcacatggcaggtggtcaaaaatgcagccatcgttattattattgttatcattaccattgccatcatccagtcctttccaataaaatgcagcccaaggcagccctcccatccctcatgagtatcactgcggctctcacctcctttctcggtctgctaacagaacagtaatgctatggtgtttcatggacgccagacacagctctgagtcctgtgtgtggactggctcattcagtccttacaagacagccctgtgaagtcggtactgtcatctcatggtacaaatgaggaaactgagactttggaagttaaaaactttcctgagtgttcacagacatgtggtgcggggccaggaattgaacccaggtaatctgacccctgctgtaaaccacaacaccggaccattctgagttccccattggctacccctccaccccaggctgggccgaagtgcagcgtgcgttccccaccagaacccacaaccctctctccaaagtgaccctgcctctgacggttcagggggtctgacgaaggctagagtctctctccaagcacgaacatccaccttctgcctcgaggcacacaaacgcgcacacacacactcaagcatgtaaccgctttgtttcacccttgttcgaggagatccggatcacgctacaggtgaccacctcccgctccccaagtcatctacgaaacatcagctgctctccgaggtcagggtctggagcaatctctggccttgcataaatgatccattccagtagcaagtgtggtgaggactcaggctctggtgagtgagctcagggactcagagttttgaaccctggactgcacgaatccacaccagccaccctgatgctggtggagcttgagtctacccaagtgcaaagcaggcaggaggcaagccctccgtgtgacacaggaactccgacaagggctgagcctcttacaggtgcaggttcaagtctcggctctgtcgtgtctagtggtgtgactgcagcaagttgcttgacgacccaagcctgtgccccctgcccagagttgcggaggccaaggaggagaaacagccccctggagagactgttgctgagctccctcccatcagcactgcccaagctctactggtcttgtgacaattcctattcattaggatgacaaaatacaccctgctcggggagagctgtgcgaagatcccaaacaatgagctaatccatgaaaagtgcttcctcagcacggtgcctggcacgtgcaaacactccacaaacaggggccagcagcgtcagcagccacggccaggtctgtgctgataaatgcttaacatcaggctctctggaacaacaagccctgatcccggcrtgtgcggatttctgtgttgtgaacaatcccattttggctgattccacaccttcaaggggatgcccctgggccagagctggggagagacgggcacgatcagctctggtgggcaggtgcaagctgggatgagctggctccagggcatgcctggtccacatccattcctgtgcttcctcacacaccaagggggccagagagagaaggaggtggtaaggaaaataaagccccctaaacatgttccatcctaaatcccttgtgattaagttatcctgcgtggcaacgggactctggatgtgaccaagttcaaggtcttgagatggggatgatctaggtagcccaatgaaatcacaagggtactcacaagagggaggcaggagggcagagtcagactaaagcagaggtcagagtgatgtggccatgagccaaggaatgcggacagcctttagaagctggaaacgaattctccccgagagcctccagaaggaacatagtcctgacaccttcrttttagccccatgggacctgtgttggacttcggacctccagaaccataagagactaaatctgtgttcttttaaccacaaagttaggggcaakcagtcacagcagcaataggaaataaaagcaggaggtacaaccaggttggtataacgcggatgtgagttgttccactggctctgagggtccacagtggacccaggcagtgcctgtaagctgccaccggctggacggaacggccaagcraagacaaaaagaaggtggaggaggacaaccacatccctccctcttctgtgtccrctggccccgccaaagtgccctgtatatatgtgtgaccctaagagggaaggggccacgcatgctctacctaccactgtatcctgtggcctggagcaccaggagaccaacaggtgttttctgaatgaatgaacaaaggaatgaatggactaggagttccttgagggcagggtcttatttctgattccacagctaggtgagcagtgcctggctgggccagrgctggttacactggaacgaatgaacacagaaacaaaggaagaaagaggaaagtgacccaggtgtcacaggtggtagagaatgaccagaggagactcccttccccagcctctgtagcgaaacccaacacagaccgtcctccacgatggctagcccagcccttcccatctggggtctccctggctcatgagtcttagggggccttccagccctcctcaacagtgtgtgagccagtcctctggcttggccaggcagaggttcttgcccaggactctggatcttgggcaagtgctatggagatggggcaggsagaattcacctgggaggagctgggtcctgccctgcaycttcctgcactggtggtgatgggactaccacctgcatgccccgaccccagctccaggccattctccaggctgccaccgttcttctagtacattcctttcctgcttgggatggccagatcccatttcggctgccggcacatgagagccctgagggacctgcagggcctactggctcttggccccttcttccttttcaaagtggacattctgatgtgtttgccccgtaggcatttttacagaaggaaccagcatttccacaactgtggcttctcctggtcacaccgttggtgctcctggcgtctcctctgccccgagctcacatccagatggttctggccctgccagactgggtccggcccactgctgagttgttggcagggatggctgacagatctctcctcctgggccccagctgcctggcctggccacgccccctgtgacttcctgctgagctgcaggagcctccagtcttagctgggtcctcgtagcctgcctctcacagcagcacttgatgtctaaaggcctgggacggatttcttcagagccactgaccacagacactgctacacatcagtctcttctcagccccatccttccaggcagagccatctgggtttccaagcctttcctcccataggagggtgtgacccccttccccagccacacttggctttctggccacttctgttccactctgggatcctctcaactcttggaggtcggtgtggcagtccaggaagaaggcaggtttcggttcaagaaggcaggtttagtttgcagatcccagctaaacaggtatgacacaggctggcgaactaagtgcgatgacgcatgtcactaccaaccacagaccacgggtgcttactcggtaccaggcaccacgagaaatgctcacacacacctcctctcctcctcaacgcacccatcttacagatgaggaagctgaggctcggagcaggcagtggggtgcctctgcacactccggcgcctgcccctgccctccccacacctcggccaggaccccatccctcctccgctctcctgaagcttctggcggccacttcttcaagccctcggcccacaccctgaggctggctgggtatttatgtcccacccacaggattgggagaggaggcaggatccacgtaggattaactgcgactgctccagtgagcctggtgttaaaaaaaaaaaaaaaaaaatacagctgaatgaattaatgacatgtaaggcaaggcacagagatgccgggctgaggacagtctcgatgcggaactctcctgcgcctccttccagggaggcagagacagccaagatctcccacccaccgcgcccggctccttctgccccagtgcgacgagaaggaaagctggccgtggtcccctccccacccccgtttaggctggctgcactttggaagaaggcagaggcttcagccatgtttgtccacggtaacaatgagcatctttccatcagaagccaaagggagtttaaagatcacctgatccaggggggtttatggacccctttgagaacctaaaacaagctatggactcacacccatgtaatgtcaacatttatgcacacacacaaagacacatacaccacacacacaccatacacacataccatacacacctcatacacacaaagacataccacacagacacacacctcacacagacacacagatacacatgcacgtacaccatatacacacagagacatcacatatagacacatacaccacacacacacgtcacatatcacacaacacaccacacacatgcacacaccacacacagagatacacactatgcacaccacatatagacacaggacacacacacatgcacataccacacacacatgcacacacagagatacatgtgcatacacaccgtatacacatatacataccacatataaacacacatatcaggcacacacatgcacacataccacacacaccacagacatagacacatacacactcacagagacacacatgtgtacgcacacacatgcagacataccatacacacacacacacacataaaccatacagacatacatacacacacaccacagtcccacacgcaggactgtgcaggtagttttggaatctaccatggaccacggcttaaggacccaggtctaacccaacctttcctccactgccacatttccactggggaaaccaatgcatataccacacacacacccagacttgctggggtcatcatttgtgtcatttccaggtctcttccctccgggctcctggcaagcacacaggccaatgcaacgagctgatgtcatgctgaagtgacccgtggcccgcgcgtgggagcccctgagaacccgtgcaccgcttggcacactcccttcccccactggcccatggtggacacacagcacaagttagaaacaatgccgtgccgcttccagccacctagaatgcgtggtcgctggtgactgtggcagcacctggcctgccctgctctcagactggcttccatgcagcgtgtactcccccaccaggaacattctgctgtcacccccttctctccgctgcccgctggactcctacttacacttcaggtccctcctgaaatgccacttctccagaatgactgtcttgatggtgccttcccctccccatccccaaccaaaccaggccagaatgcctcgcctaacgcatcacactgtcctggaatcgcctgtctagttgtccttcttctgcaggctatgggctctgggaggtcaggaaccacgtctgacttaggcaccactgtgtccatgaaacccggagaaatgtttgttaagtgaaagattggttgaagtgttgaatgaatgaatgaattggatagatggagacatggatggatggaaaaacagataagacagatggacagtctgatggataaatggatgggtgggcggatagatggatggatgaatggggcattcatatacccattctgctcagcgaagaaagtccacacacaacagaccttcaaaagaactcttcagctctgattccctctcttccccaaactgtatttgactaagactctaaaaatgatcatggcagtgttttcttgaacacctactaagtaccaggcacagtgctaagtattttacatgtaatatctacgagcctcacaatatgcaaggagacaagtattagagtgcgtttcacagataaattaaatgagccccagagaggttcttcctgctgtttagggttccacagctagaatgtggtaaaacctagggttccatggctagttagagtctaaggatccagagctagtgcccagggaagttgggcaggaactcaggtctgtctgaccccacagtcttccctccctgcaatccagccctggaacatgaagcaatgcatctgagctcctctggattcccaggacttgggttgggacatccrtgagcattatttctccatggtagctgccctactgatgaagcaggaggaggaaggatgtggcacgcaggagacctcaccttgaaactaagggaagsgccagaacttgcctctaggagagcaggtggaggctgatggagccaaaaaggttgggacaaggccggactgtaaactgctcgttcctttggcttgtctacttttgaaggaggacatacgctgctaggcaatgtcttgagtcccagcacaggcatctctaaggggcttccaagcaaagggaaagctgaccaggctgcgttccagctgggggaagggtcacgcttctgtgcagagtccccatactgtcctgctggtggctgagccaagagaactcagcccagtgggaacataaggcatggctggaaccccgagggtcactctgaggagaatccattcagacctgggaaaggtcccccagcccaaccctgagggtcactcagaggagaatccattcagacatgggagaggtccccagccagaccccaagtcccccggaagcctgcgggcagctggttccaggcttccgacttctggtgttaaatctttggaatgctgaaagggcctggttccaggcaaacgctgcccaatttcctctcccaaacttgccaagttctttctcattgttgcattgtcttgagaggtgagaaaaacagcccagggtgcgctgtgagcgaccttttccaagctccccttccccggcccagtttcttagggaaaaggagcttcctttcttactggaagctagagagtgagacctttctggtgctttccagaccggaaaagtcctgcttgctaccttccagtaagaaaggaacccaccccgtccctgccctgctgccaatgtttggggtaaacagttgccccgcctcctgcaggactttccagaacattggtgagaagagccgagtcccggaacccatccccgaaagaagcagacactcttgggaggagggtctccctgctcttatcttgcctgaagccttgtttgtggagcagcggctctgtctaatttttgctgatgggcagccactcaatttttaggcagaatcccccagaagatgatctgcgccgcgctgctctttaatgcctgctaccccatcccaggggccagtgacagcaccttcaggacgttttcatgacactgtctatgtacttacatgcttggcctccccacaatgaaatgctagcagaaagggcatcaatggaggaaatgggataaacaggccctttctgcaacsagggattctaataacatggcagtgagggagctcacgctgaaaacacaaagcatccaaaacacaccaactggacccacgctggaaggctgggcgcctctgtctgccaactcaacctgctggtagattgctctgtctctgagctggggatgaggggcatgggcctgaatgtcctctctgccttccttgaaggatcaggtcagctccccgaggtctgcaagaggcattgattcaaattctaacaaagtaagagttttacaaagagctccttagaagacagagagagcggaggaggaggaagagaagaggggagagacacacagagaggactgggggacaggctcagaggtggtgagaggcctggaggaaggacctgcaagagaagcccagagtgagccacagcaaggactaaagagagagaaagaggagaggcaggaggggacagaaggggaaggaggggagagagatggagaaaaggcatgagagagaggaaaacagacacacatggatgcaaagaacctgaaagagacagagatggagagagatcaggcaggctggggtagggaaggggcactagccctctttgggccccgccattccccttgtctgtagagagaatggctgtgctgtaatgcagcagggtgcagactgcattacagcacagccagactgcaagatcgaagagccccctgtgatctgacgtgattcgccccaggaggggctcaggtgcctgcagtatgaggtcaaaatgaaaaggcctcgaggtcagcactgctccacagaacttcgtgtgtcaatggaaatgttctttatgtgcgctgtccaacacagcagcctttggccatgtgtggcccctggccactggaggtgtagctaacgggactgaggaactgtgttattaatttgatgagtaaattaaatccatctgtgggctgccatgcgtggctgstggtggctgtgccgggcggcaccatttaaggcactttcactcatctgctgactaggagcactaaggtaatgccgttcagatgggcacctggctgtttcttggtcccctctcccaccctggagcagggaagatctgtccccagggccaaaggggttgttctctgtgacaccacggctctgggatctaatacagtatgttgtatgtgaatcaagacaaagtacagcctctcaaagcagagggtcctgccacccgtcacaaaaggcacgtgaatacaaccaggactgaagaaagccctgagtaccacaccgggggccaagtgcaccccgccccagcctccctagaaccacacagactcgctagccctgtttatagaatgagccagctacayaccacccatgcatcacggtgggcagagtgtgggggtgaggatgagagggaagcaagggagaagccgatccaggtctacctcccctgacggaaatggcagccagggagagaaccacagccgccaggggcaggggctgcacccacctgggttccccttgggggaagggttgggaggccgtgtctgctgctccctcattagctcrgagtccggctctggatctgaggagttgcaagccgcctcctcctcctccttttcctctgcttcctcctctcctgctcctgcctctgactgcgctgtccacgggatcagggggcagtgagcaagtgggatgctggagcagctagaggctccccgcccgctcggctcctcagcaccacggcggcagctctgtcctgaagccctgccagacacggcggccaggcgagtcatcacagctgggcccgcggccacagccgggttaaagggacattccaggcactgcttctctgcttttcagcctcactgcccctccatccctgtggcgagtgatgctctggcctcctytggaggccagggctgcccctccagccccagaaggaatgaggcccctttgctggtggagcaggaaagtggaggctcagggcctcctctcctccaactggaatgtttcaaggggctccctcctgcctctctgtcatgcacagatctaggcccctctgccctgccaccacactgattcctctagtgtccctctaccccttcagagctttcagtggctgcctattgcctttggaagagggtctgaggcttcttcacttggctggcaaggcctgggtgatctggccatcgcccaacagatctagacatatccacagccccaaactccatctctccatctcctccagctgcagcaagtacccaggtcccccatattcaggctttgcacacacatcccctctgcccggggagtgtgcccccaccccaccattctggcacacttctactcatccctctacacccagttcaaatgccccctgtctggggagcctgctttggccccccaggccaaataagttcctccttctctgggctcccagtcctccrcggttgcctctaatttagccattatttccgtaatcatttgtttatggctctgtctccccaggggctgaggggctcttcacgcatggggcctccccgagcacaggggagaggctgcctcaaagctctgtgactacagcaaagtcattggggtaggacaatctctggctaccctacctctccgttggccactgaaccctgtgattgcccgccccatctcccccgccgaggggggctggcactgaccacccccttcatggactctgtgctgcagccatcggatgggcaagaaggagcgagtgaagaggcagaggagctggcagaagtgtctggcaggagggtgacactgacctctatcataaagatgagaggagagaaagaaagaagaggaaggctttgctggctgtggtggggagggggggagggacagtgtgggggtgtggggacagggttaaaagaaaagcgtagagggcagagtgtgagagattcactaagaagaaagcagactggggcaggcgtggtttccagagtcctctgagagatgacagtaagaaacaggacatttctaacaatgctaagttgttacgctccgctactgagctcagcattccttggagcccagactgggtgactctcagcccaatgctgttacacaatccagtggctgctagatctaaaataggtttttagaaagcatctctttgggctaagagaaggtttccctggaaaaacaagttaggaataaaatgatcccaaaagaaaaagcaaggcaggtcttcttcccactgataagagagtaaaytttctctagatgaggggtttcagactcggggttccttctgaaaattggctggctcccctgacatgatgtaacatgtcttatgtatgtgtgaccgtggtcgtggtttttgtcagtcacttctccattcttggtggacgcacctcaccgcctctgtgtggtcctggtggggctaccaatccgagacctgggccttgcctgaggtcaagggtgggcgggtaatccgggggagtgaattcctgggggctgaatgggaacacggcagagccaatcaggatcttccatgagattttgtaaaaggtactggaaagaaaaagggcgctcactcttaaggattacagcctctaaggatgtggctttgggctgcaggtgggtcatctttcctaccacatggtgagattctgccaatgaagccagcacacagaagcacagccaggagatggagagagagatgcccaatattaatgatgtcatctgacccccggatccagcaatgcctgaagtcccctctaaggcttcccagttactttaatagttaatttaatagttaacagcattaaactctctttttgtctcactagttggaataatgtttgtgccatttccaaccaaacgtcctgaccagtacatacagaatgcactttttttcccaaaaagatagcttatacttctatcagcctcaaaagacttagatcaacaagatatcagaaactccctcactcaaagtaatgcaaaaagtcagtatctattgctcatctgcttttcacggccttcttgggcctaacaactcacctgtgtgcctcagtttcctcatctgtaaaatggggatcataaaacttatttatcaggtttattaagggaaactaaatgagcaacctgaaaagttcctagactgcagcaggtgtgcaggagacgctcaggccatgcacagtccttttcgttttctccagtcagaccyggtttacagctttcttatacttggggaataaaatcacccaaagttaaacaacctttcctcttgatagctgctggctccctccaagggaaacgaggggcacaagtgcatgaagatgagggagaagaaactgcttgttcatgtttatttctcctacctgcagtaagacagttcccccaggaatcgtgagctgtaaacagtacttcggggcattctcccaggacagcagctgaacgtcttcaattgcgctgtaggagactgagttttccatgtacccagttggctgcagcaaaaaaagaaaaagaagagatatgcattggttacagtagcaggcatgacgtccgcatctcagacggttttggaaacatcgcccctctggcgacaggcaaatggagctggtgcaggagctcagcacctctggtgaccaaagcaagcctccctgtttctggctggccatatccagctgcaagggggttcactgtaaaactccacccacacgtttggaggtgcagagttaggaacagagtgggagcagctggagggcaagaactgagggactgctgctcttggtatccgcggggccagcgcagggagtggctggaagcccgccatccctcaccagcaataagccaccaccttctcctgcccagaaagcaccgatttctcttctccctctccccacggatatgcatcctccactcggcctccagagccacgttccaagatggaaaactccatagccccaccctcctcctcaacattcttcaatggctcccaatggcccggccacaaaatccacactcccatccacaatcgacagacccagcggggtctgctctccctatgcgcccagtcccgcctctcggcggcatctctccctttccacactcctcacactgccctgataacagtgcctcaaactcagccggctccttgtcccagaaagagcacagccccacccctggcatctgcgcttctactctccaggtctcatctcaactgcacttttcggggaactcccaccctctagactcatgacccaacctgcttgcacccttccctgtgccctccttttccggtgctcaccacaccctatttatttgtggctttattctgtgtcattatctgttggatgtctgcctcctggccaggctgctagctccatgaagtcagggcctaggtctgtcttggttcccactctttccccagtgcctggctcatggcaagtgctcaatagcatgtgttgaaaagaatgagaaasgctattagtatyggtcattgttgggagtaggggcggggcaagagaaatccacagccacccaccactctctgagtgagtcttgctgtcccgagaaggcaccaggtgaccgagggatacaatggccaccaggagccaaagcgggtgtccttgtcactttggctccaggaagccagacttcaggagaatcaggtgagtgcagcacagctgagaagaataacagcgaacacctccctggctctcccatgcaccctgggcacatggcaatcatttaatcctcacacaggtcttgtggaacaggtatcaaggtcatcccatcatatagacaaggaagctgaggctcaggaggtcacgtgatttgcccaaggtcatctagctaggagtggcatggccaggactgaactcggccatctgactccggaatcagaagcctgacctctatcctgtgttccaagaaagaggcaaaggcaattcaaagtctaaggcccaacaggttaattctaccataaagatggaggacttctgttaggtttgttaatttcagtatctgtctgccaaacgagagttatggtgatgggggtggaggtagagagggttgatggctgaagctgcctcaatttccctgatgtgatcaattgctaggctcaaaaagtacaaaagattgatcaattcatttttcattcattccttcattcatctgacagacatttactgaacttccgttatgctgcaggygccatgctaggtgctggagattcagcagtgaataagacaggagcttagtgggcaaacagacaacaaacaaaatatctaaataaataaactattggagagtggcaagggccgcataaagaatcacaatggggtgtcatgacaggtggccgagagcaggagtaaagagtgtcacagaccccacggccagtgcaaaggctcagaggtgggaacagctgggagtgttcaaggaggagcagaaggtgaaacggagggagggctgggtaagcgatgcrttggagagaagggtgggtcactcctggagaggctggtaggtccacctaggggctcagggattcctcccaggggtttgcaggagctttagccaaggttcacagggattgctgcatagaaaacagacttgaaaggagacagtggtggcagggggacagcctgcaggctgctgcacaggtccaggtgagcgacaaggctgcctggaccccayaatctaggggaggaggcagctgcgttcatcctgtcctttccaccactgcatcgctcacccctcagaggaccycctggcccccaatcccggcggctgccatgtgtcacccaagaaggttctctttatgcagcgtgcctcaaagtcacactcgtgggcctgcccttcactgttctggcctgttccagcatcccgtgcactgttctgttctccctattctgcagtaaatgactcagccctaacagtatgtcttgtcctgagcactgccggagaagccagggcttggtggttggttctgtacttcttttcctcacccatattcaaatatttattgtgttggtcactgattgtctgtgtcccctgctactgtttatatactgtgggaacaggagggttcacctgctgtttcatatgcctaaatggcgtctgacatttaggaggtgattactaatttcctgacaaattaatgactatcttacaaaaataaaggcaactttcatccgtgttttaactgtaagcaccacccacaacacactggacagaggctttctgagtctacctttcacatgccctgccttagctgtcttaacgtggctttgatctgaagttgcaaccaaggctttttagggaaaggttgggtataaataaatacatactgtttttttgttttgttttgtttgagacggagtcttgctctgtcgcccaggctggactgcagtggcgcgatctcggctcactgcaacttctgcctcccgtgttcaagcaattctctgcctcagcctcccgagaagctgagattacaggcgcctgccaccatgcctggctaattttttttgtatttttagtagagatggggtttcaccatcttggccaggctggtcttgaactcctgaccttgtgatccacctgcttcggtctcccaaagtgctgggattacaggcataagccaccgcagccggtccttttttttttttttttttttgagacagagttttgctcttgtcaccccgactggagtacaatggtgcattctcagctcactgcaacttccgccactcgggttcaagcgattctcctgcctcagcctcctgagtagctgggattacaggcgtgcgccaccacgcccagctaatttttcagtatttttagtagagatggggtttcaccatgttggccaggctggtctcgaactcctgacctcaggtgatcctcctgcctcggcctcccaaagtgctgggattacaggcgtgagccaccacacccaacccatactgtttttaaaaagcagacaagctgcatgcctactgcctgaagcagcatttggccaaaagcagactttttaggaccaaggagacttgtgtttgggccgcttactgtgtgtccttaggcaagttactccccctctctgagttcatttcctctactggttaagatgagaatttatttaataggtagaattcctgggagcattaccagagatccagtttatcaaggactcagcacagtacctggaacaaactaaagaacgcaatcaaacgaactattttgagaaagaccaatctttgcctctggggtcttcctccccaaacccataacccaagtctaaccatcagaaaaatatcagacaaaccataactgagggactttcctcaaaactcctgaccagtgctcattaaacatgaggaaagcctgagcagctatcccagccaagggaagttttgggagacgtgactacaggtactgtggggatcctggatgggatcccgggacagaaaaaggacatcacggaaaacctaaagaaacctaataaaatgtggacttcggcaatcatgtatcaatattggttcacaagttgtgacaaacgcagcccacagactaagatactagcagctggggaagcagactgcggatgtgtgagaactctggggtatcctcgtcgctttcctatacatctcaaactgtcctaaaagaaaatgtttatttaaaaacaaaaacaaggccgggcgcggtggctcacgcctgtaatcccagcactttgggaggccaaggtgggcggatcatgacgtcaccttgatcgagaccatcctggctaacatggtgaaaccccgtctctactaaaaatactaaaaaaacgagccaggcgtggtggcgggtgcctgtagtcccagctactcgagaggctgaggaaggagaatggcgtgaacccgggaggtgaagcttgcagtgagccgagatcgcgccactgcactgtagcctgggcaacagagcaagactccttctcaaaaacaaaasaaaaccaaacaaaaaaaactgctgctgctgtagtgctatcactgggcaggaacacgggaggcttgcaggggacatgggctggattgggatggaaagcctctgaacgctgctgttccttgggctcagatatgagctaacactgcccaggyacctctgccgttctgggtactttcctatcgctgggattattttacagataactgataattccctggtaagctgaacatgacgaccggagctccaggggaggagattcctgtctggggtaggaggctgaattggataagaaagaacattaaaattctcctccattgagggatggtagggaatcctgctctaagatgtacagctaagagaacaataagcagacgaaaaatttttttcctaaacgttaagagcagtgtaaggcatactgtatgattccatttatatgacatcctgaaataaacaaaactacaggggctgaaatcacacccatggttgccagccgctggggcgggcgaggggcagggggactcttgggggtgatgggaatattctctgtattgactgtgggggcgatgtcacttggctgtatacatttgtcagaactcacagatctgcacgctaaaagcgtgactcttactgtatgtaaattacaacgcaaacctgactgaaaaaggcaatgcgtgaagacaaggtaatttggaagatgacgaataaaatctttcccataaaaatccaatcaagaccactcattagcactctggtgtgtgactttcctgattattttaatatataattttttataaagccgaaatcatacagtacaaagaattttgtaacgccttttttttccccacattatcgcacatagatgtccctgctctgaatggcaagctccagaactctcactgtagcagctataaaatattccgccaccatcaatktcatccctgctctcaccccctccctcagggacagtgccactgtttcattttatgctgccatgcacaactccgcagtgaacatccttgtgaaacatgtttttctaccctatatttaggattatttccttaggccagattcccagaaatggaattactgggacaaagggcaagagcacgttttacgttgttgccaaattgctctcattaaatggatattaaagggaaccggagagccctggccaaggctaaggggcttttgtcctgggccaccagcttgacagggccatgtgagaagcaaggagcgaacccaggtagstttggtgggaccgctcgctaactgagtgcccgcaaggtgacggtgcccagagggtattggagatgcggcagcccacaagctggggttctggccccgggggacgctgccttccatgggagctggagaatgggtcggtgaactctgcctttgtctttttgctctcggggacagatatggagctagttttgggggatcctgcatttgccagaccaggaagagatacttcacctctgcctgtttccaggtgagccccctgtccagtggcacacaatgctggatctgggctggaaaaaatagggcctagaaggacctcatgagggtcccatgtgaacccccagagatcttcagaactggcattccaaaccagatatggcctcagacctgcttccagagtgggtggggaatggggtgagctgacccccscagaaagagcccccattgggcccccgatgctggcagaagacacctagccttcgccttcccttgcctttgtggtgagccagctccctcctgcccaaacctgcctgctggtttccatggggattcctctcaaagtgaatacgaatcatgacgtccaggctgastcaaaacatgtgccagggaagggaggagctcccggaccccaaaagaagccagtctggaaaatcctcccatgagcttattcccgaggccagagaaaccttgcccagtcggggatggggttgaaaacagcagctgtttgtcatggggcatgtgtggccctgacagctgggtggatgtgctgggctggagtcaagtcccctctctccctacgtggaagcggcttgaattatcacacaggggacacccatgctgcacagtcgggttccacgtggcaccaccccactgtaaggaaggatttgctggacctgcacasacaccctggggccccaaaggagaaacgagaagttggatggcagccctgcttagacagtcaacagcaacaacaccaacaacactaatgatgaggctgccatcacagtgtcatacgcagtggtgctcaaagtggcttgcgctgggagaatgggcttcagtccccacctcccctggctgcatttctaaaattcaaagtaaaattcacagaacgtaaaactaaccattaatcacttaagatgtacaattcacgggcattgagtccattcctgatgctgtgtcaccatcatctctatcgagttctgagatgtttttactcccaaaggaagccccataccattaagtcgtcactccctgctaccccatccccaggcgccaggcagccactagcctggtatctatcaatgggacttgcctgttctggacatgtcacataaatgacatcacatactttgtggctgtttgtgcctggctcctttcacttactgtttttgaggtttatctgtgctatggcatgagtcggaaccgcattcctttcatggctgactgacattccattgtatgggcaggccacatgtttatacattcatctgctgatggacacatggattgtctctatcttttgactatagtgaagagccagctttatatatcttttttttttttttttttttcagatggagtctcactctgtcgcctaggctggagtgcagtggtgcgatcttggctcactgcaacctccgcctcccgtcaagtgattctcctgcctcagcctcctgagtagctgggattacagtcacccaccaccactcctggctaatttttgtaattttagtagagacagggtttcaccatgttggtcaggatgctcttgaactcctgaccttgtgatccacccacctctgcctcccaaagtgctgggattacaggcgtgagccaccactgctgccatatatctttttttaatgatgacagaaggaaggacacctgctatgcagacgctagcctcactacrccccacccatatggacattcacaggtgcccgtggttaacattcatcaagcagttaccatgtggccagcaccatgctaagagctttatatataatccctcatttaacttgacaacaatgctaaggcggggaggctgtttttatccctgttatccacatgctacagaggaagaaactgaggcacagagcaggggatgtctcacacaggcctcctgctcttataagacaggcccaggattcaatttcgtaaccccccaagacagcaacttccatccctctgttatgccaaattcctctggccagaggcaaactccaatttgtgtacctttgtgctcacacacctcaagtacatattatgagaaaggagctgggaccacagccaaagccacagctggaaccagcatggcaggggcctcaggtccacycttctgttgctaccccacgcagcaggtcctcagacacctatagatcagcttggcctccaaggcagaaacccatggatgctcatttggggaaggcccgtcaaaatatttcatgttctttttaatctcacaaacggaaagtcatacagcaaacgcaaagtggcaggtaacgatatgatcctagaagggccggtttgggccttggtcccagaagaaatctcaaatgccgttcacactctccctcccctggtttccctcaggtaatatgacctctccttgccccggggctgttgttattattactgtgatccactggtgagctgggctgcaacccagctgtgcccttggtgttgtgggcacaggggagctgcctgcacctttctcaatggctgcagagttggggtgactgtgtctattttgtatggtttctccaaccattctccagacgccgactgaccagttctttttgctgacacttgacactgcaccttcccccatgccaggccctcaaaaggttactactcttttttttttttttttttttttgagacagagtcttgctctgtcactcaggctggagtacactggcatgatcttggcccactgcaacccccgcctcccggcttcaagcgattctcctgcctcagcctcccaagtagctgggattataggcacacaacaccacgcccagataatttttgttattttttagtagacatggggtttcaccatgttggccaggctggtctcaaacgcctgacctcaggtgatccgcatgcatcagtctctcaaagtgctgggattacaggtgtgagccaccatgcccagccgaacgttactgctcttctgttgtggcctgtgaaaccagggcatgcagtctgttagaaccatgtgtaaagtaaaagtaatgaggctttgagcaagaaaatctcatgggagaaaaatacatccctcttgtgttttatttgatcttactttcttggtgatagctctaaagttctttgtagcctaaatgagttgatactggcactgccctacaggatcgtctgtgatgatgcaaacgctccgtatctgcactggccaatgctgtagccacctgtgggccactgagcacctgaaatatggccagtgtggtggaggaaccaaattacacattttgtttaatttttgttaatttgactgtaaagagccagatgtggccaggcgccgccctgttggtcagctctgttgtaggcgataccctcctgttggtcagctctgttgtagacgatacccccgttggtcagctctgttgtaggcgataccctcctgttggtcagctctgttgtaggcgataccctccacttctctagcgtgtgccagtttccaaaacaccttcttcccgagcacattcatcctcccagccagccttgtggtcaggattagtacttttaaaaaccacacagatgaggaaaccgagactcagaactacaggggaacagttatgtcctgatcctccagwcccctccctggataagagctgtcacctaaggactgaattcatgaagtcattcaacaagcagaggcctcctaggtgcaaccctatgcccagacctggggataggccagtgatggagagggacacggctctgccatcacagagccatcaagctgggggggagacagatgatccctgaagatggctggtgagaggaacagaaatctgtgtccttgagtgtggcacttttcatatgtgccactgggcatctttgacagttgagtgtccaacaagactcagaggaaccccaaaaggaagctgaatgggggaactggcccaagcccctgctggagccccacggagttggtggagggcctgggtgcaggtgtcccgccccctgctctagtcccaggaccttccaggctgggagactcccccccccccgctcccctcgctcacctcccacatctccagggctcttcccacctccacaagcccttaatcccacaatcctgcaagaggaaggtattgcatcactctcatgacagaccagaaatgaacactctgagcaggtgcacaacttgaccaaccgcacacagctattcaggagagagctgggaagaaaaccaagacctttggacttcacgccctggcctttgtctacaggcaactagtaagttaaagaccagaggggttaccagagtatgagaccatcataccagcagactggctcaaatggaaaagatgaaaaatgataagtgttggcacagacacagtgcaaacagaatcctaaattgctggagggagttaaactgtgaatccaccttgtgacagctctgctgaagctgaacatgagtcccctagaacccagcaatccccttcctccacagaaaggcccatatttgtgctcccaaagatgtttgcacaagtgttccctgagcattaggtagcccaaactagaaactacccaaatgaccatcaagagaagaatgaataaagaaatcctggtatatccactcagcagaagcctamatgatgagaatgtatggtctacaactatgcacaacacatagatgacctacacaaactgagcatggagcaaaagcarctggacagaagcatgtcatcaatgtacatcaccatgtgcttccacccatacaaacttcagaaagaggtgcacctgagtctgtgctgtgggaagtcagggtactggttattggggtgaccaattgtctggtatgcctaggactaaagggtttcttgggatgttgaatggtcactactctattgggaaaatcctgggaaaaccaggacatggtgttgatcctactggttaccccatggagggatggcgctggaaaaaggcaaataggagcttctggggagggctggcagcattctaggtctggattctggctgttggtgatacagggtgttcactttgttaaagttcatcaagcagtatacaatgtgtgtactcttttgtgtgtatgcaatgttccaattgaaatttttttttttttttttttttgagacagggcctttctctgttgcccaggctggaatgcaatggcacgatcctggctcactgcaacctctgcctccttggcttcaagcgattctcttccctcagcctcccgagtagcagggactataggcgtgccccaccacagacagctaatttctgtacttttagtagagatggggtttcatcatgttggccaggctggtcttgaactcctgacctcaagtgatctgcccaccttggcttcccaaagtgctgggattacaggcgtgagccaccatgcctggccgaaagattttttaaaaaaataaatcagattttctagagctgaatccaaactccacaacttggccttaggcaagtcgcttggtatctctgagcctccactttctccctggtaaaagtgagattatactcatacccactaggatggatagagaaaaaccaaataaataaaagaacgtagacaaaaaaaaagtgttgagggagaggtggagaaagtgaaacctgcttacaccactagtgtgaatgtaaaatgatgcaggcagctttttgtaaaatagtttggtagttcttcgaaaagttaagtatgacccagtaattccactcctagatatacatctaagagttgtgaaaacataggttcacacaaaaacatgcacacaagtattcaaagcaaaatgactcataagaaccaaaacatggaaacagtatccatcaacagatgatggataaacaaaatgttgtctatccattcaatggagtattatgcagcgataaaaaaaagacattaccacatggatgaaccttgaaagtattatgcgggctaggcgtggtggctcatgcctgtaatcctggcactttgggaagccgaggtgggcagatcacttgaggtcaggagtttgagaccagcctggccaacatggtgaaaccgtgcctccactaaaaacacaaaaataagccaggcatggtggcatccacctgtagtcccagctactcaagaggctgaggtgggagaactgcttgaacagggcaggcagaagctgcagtgagctcagattgtgtcactgcactacagcctgggcaacagagcaagactctgtctcagaaaaaaaaaaaaaaaaagaaagaaggaaagaaagtattacacaaagcaaaagaagccacacaaaagaccacacattgtatgattccaattatgtaagatgtccagaataggcaaatccatagagacagacagtgggttcatggtttccagggcagggacggggaaatggggtatgatactaatgggtatggggtttcattttgggggatgaaaatgttctagaattagtagtgattgttgtacaacctggtgaatccagcagtcctccctaatctgagatttcactttcagaggtttcagttaccagtggtcaactatggtctgaaaatattaagctgtcttgagagagagagagagagagagagagagaccacatgatattacctttattgtagtatattgttctattttttaaattgctgctgttaatctcttatggtatctaattcataaattaaactttatcataggtatggccgggcgcggtggctcacacctgtaatccccagcactttgggaggccgaggcgggcggatcatgaggtcaggagattgagaccattctggctaacatgctaaaaccccgtctctactcaaaatacaaaaaaaaaaaaaaaaaaaaaaattagctgggcgtggtgacaggcgcctgtagtcccaactacttgggaggctgaggcaggagaatggcatgaacccgggaggcagagcttgcagtgagccgagatcgcatcactgcactccagcctggggaacagagcgagactccgtctcaaaaacaaaaacaaaaacaaaaactttatcataggtatatatatgtttaggaaaaaacacagtgtatataggatttagtactattcgaggtctcaggcatccactgggggccttggaacatatcccccatgggaaaggggggactgctgtacggtgaaatcaacccaactgtacactttgaattagattacaactaagaaaaaggtaatgctggccaggcgcggtggctcacacctgtcagcccagcactttgggaggctgaggctggtggatggctctgagctcttaagttcaagaccagcctggacaacatggcgaaactccgtctctacaaaaaaatacaacaattagccaggcatggtggtgggtgcctgtagtcccagctacttgggaggctgaggtgggaggatcacttgaacccaggagttggaggttgcactgagccgatattgcaccagtgcgctccagcccatgcaacagagccagatcttgtctcaaaaaagggaggaggggggagaatggggaggagggggaggaagaggaggaggagcgggggaagagggggagggggaagaggaggaggagaaggacggggaggacggaggagaacgcggggggacggacccacgacggaaagaggaggaggagggggaggaggagcaggaggaggaaaggtatggtagggggaaggtaagggtagagggaagagggaagggaaggaatactgtacctgccttaagggtgtttgcagagagcacctgaatgggccagggcatgtggcgtgctcagcacaggtgagcatctgatacaggtaactatgattatgctgccccctcccccagactcctcaagagggtgctagggagggagtgtagctgtgagaaagcagatgggagaggctacaggcaggcaccgggtgaggcgaggatccatttgtgccagcrgccaatgagctcaatgcccagacgcgccaggtggtcggcgggcactcaatacacggaggcgattactttcaagcctcaacaagaaaaaagagctttgctgaaatgcttgccaagctcctccatcatccacggattactccgaaaagagcggagaggaaagctccggcttggagtcggcctggtgcatggggtgaccgaccagctccacatgatggatggcaagcaggtcgcacagctcttgatggcctggggtcagagacccgatggcacctgcgcatcacagggctgcagagcagaaactccccccgccctccaaccccccaggctaggcacaacaccacctctcgccaatctcaaccaagcctacaatacccaactctccttggggacccaggaggggtcatgggttcatcaagacgacagaaagaccctccaggcacccttctctgctgcccagacctcagcagcacagcctgcagctgggctgggagggcagagctggtgcctggggctctgtggagacggtcaagaggcaggacgtgggctcattaatcacgaaaccagctatggcagccacccccttttatggccacatggctcaaggtttaataatagagcaaacgactgatatttccacattcaaacccctccagccccagtcatcttcgtgggcatgagaagagggatgaaaatctgggtccccagggtgcagcccttggcatctgtgccactgggcacctttgccattggaacaggtgatggacacaaagatgccctaaagtcagcatcatttccaactgccaagtcacatgcatttggaaggcccacagcagccagcctggactgggcacatgccacatgccaggtcctcaccaaagcagcctccagggaccatcttcatctcatggatacttcccaaggatcctgggaaaggggcactgctaagactccccagttccatggaggagaaaaggaggttcgggtccatcaagcagtgggcctcggtcacagccgctcagtggaacggccacatggaagccaggtctgttgttttgagtcctaccttgcttctaccagacactggcctgggagccccaggatgagcagggtgagcggagggtgcaaagtaatggggagtgcaaagtaacaacaccacagtgccaaaggcaccgcaggaggaaggaggagggtccggtacaaagggcaaggacaggagggaggggcaccctggaacacggggagggctgcccagaggtggcctttgagccggctgtcaaggtaaggaggggagcgccaggcattctccgccaaggaaacagcacaaggagccagagtttgtgcgaccctggtctggaatgagaagttgtcagaggaggcttgggtacaaggatgtctcaggcaggggcctgagacaggacacagaccaggagatagccctcgactgcccaagcttctcccatttctgaatcctctctcttattctttctctctttccattcctttcttttataaaaaattaagatgtaaacagtaaggtgcataaaaaagtaaaatataaacagtaaactgcagccaggcgcagtggctcatgcctgtaatcccggcactttgggaggccaaggcaggaggatcacttgagcccaggagtttgagaccagccagggcaacatagcaaaaccctgtctctactaaaaacacaaaaactagccatgtgtggtggcaggcgcctgtaatcccagctacctgggaggctgaggcaggaggatacttgagcctgggaggtggaggktgcagtgagccaagatcacgtcactacactctagcctaggtgacagcacgagaccctgtctcaaaaaaaaaaaagaaagaaagaaagaaagaaaaccagtaaactgcataacaagcagaagggcagaaatcttcagtgggttcattctgacaatgcacacccctgtgcacctgccagccaggccaagatggggagcatctccatgccctgggggctcccctgctccccttcccagcccagaaggtccggagtgttgacctccatctctacagattagctctgcctgttcctcaacatgttataaatgcaatcacacagcagatgcacatttgtgtctggcttgttttggccagtatgatgtctgagagcttcatccatgtggctgtgtgcacctgcagctcatttgtctttgaatcgctaagtagtgctcctcccccagatgccagtatggaaagaagggcactctgcctctgggttctcacaagcccgggacacgcctcaaccccagtaccttctgtgcactgtctccagctgtttgtgttgtgagttccttaaaatagcaccttacatctctatctggcaccttagctggtgtccagagtaatgtgacttgattaaagacctcatgtgtgccagatactgggtcaactgctcagacatctccccackaatgacccatgccaggggtaccattatgatcccattttatagatgagaaaactgaggcccacagaagagaaataacttttcttaagtgatgctgctagttattaatgaagccaggatttgaatctgctataactctaaatcagagcttagcaaacattttctgtaaagggccagagagaaaattcttcaggctttgtgggccatatgccctgtctcacaactgtcagcagtgctgttgtggtgtgaaagcagccacagacaatacacaaatgatcatggttgtgttccaataaaactttatttacaaagacaagtagtgggtccaaccctgatctaaaccattcaagaggaaatagaaatgtgatggatggatggatggatggatggatggatggatggatggatggatgagagaaagtgagaatatgttttctctccttgctttctttgcacagagaaccaaaagatgtttcagtgggtgtgtaggtgagaggtttagtttgttatttgttgtttacgccaggactgggtcctactgagacatcctaaggccctcatttctgcaatgtctctcctaggaactggccttaacccaatccctaagttctatggaagcatcagacaagttctgcagaaatttcccagaggacaaatttgccgaaaaattccttgggcccatccctaaaagaaagcagatggcccagaagccgggcgacatgggttttctctcccagggacacccacatccacttggggaagcgaggctgctggacatgatccagaagtgagctgccaggaccccggacaaggtgacccacatctctctcttgttcccgaaatcatgggaatgagccagtgtgacagaagcctcctttggacaccctctgacagtgtcaagaaagctggggacagtgccttccagcaacacagccttcaagagaataccaggaaaagaggttgagacgaaggaatgggaggtagggaaggaatgggagggaggaaaagaatgggagggatgtttttgtccgacgagcagagggaaacggaggctcagaggggcgtggtcattcccagggttccccgccaagtgtccaggctggcagacagggctgcctctcttcctcctctcaggagtcctgctggtctatcctgaggccctagtgagcttcagaagctctgtgccctgagggcagcccctgcagtcaatccctgggcctccagcctccggacacctgctgtcaccccctgccccatcaatccatcccccacaggactcagaatgtcttctctgagatcttgagggacccagggctgacgccggcctatcattacacacgccattgaggtacactttgtcgttttacttatatttttcactaaacagattcattcagcgccttaagtttacccgctatgtccatgacaagttgagagagggaggaagggacagagagaaggctactttttatgaagcctgagtatgtgtgcttctctgtatgcattttatctggttcaacaaaaacttttcttcgaaaatactacattgcgctgaatcgatggttatgcatctatggacacagaccatggcaggggctcaggggactgctttgggatttttcttgccatgcatgcctgcatcgtcccacagagagaccagagtgcccggcatgggccaggctggctgccatggggtgcgagacctggccctgcccataagcactcgccatagggtggaaaaaaaaaaaaaaaacacaagtctgcatatatgtttctactgtgcttctaatataggtagttactattgtcatgaatataaatttgttgaaaagcaagacaaggccaggtgtggtggctcatgcctgtaatcccatcattttgggaggcaaagaaggatggatcacttgaccccaggagttcgagaccagccagggtaacatggagaaaccccgtctctactaaaaacagaaaaattacccgggtgtggtggtgcacgcctgtagtcccagctacttgggaagctgacgcaggagaatcgcttgaatcaaggaggcagtggttgcagtgagccgagatcacgccactgcactgcagcagcctggaccacagggtgacacactgcctcaaaaagaaaagaaaaacaaagaaagaaaaggaaaaaaaaaaagcaatacaatattctgagcaccggaatatgtttatggcctttcatacatttttctcaagttgtaatggtaaagaacacagctttgagaacagaaaacctgactttatatctcagctctgcctcttacaggctgtgagactcccagctagagagccagttgggctttatgaacctcggtctcctcatctgtgaaatgggagtgatagaggccaggagacagggccacaggaagacgacgggaggcccacgtctggctcatggtaagtgctcaatgaatgtcagcgtgtacagcacagagggcctgctgtgccccacgactaaacagcacaccggctttcacagggtctcctgcatgctgggggagacagacagaaaagacaaataagtgaaatacacaggatgttaagtgatgataagcgtaggtgaaaagcaaaccaagcagataacagagaacgaggatgttgggttttggcaattactgaagccatggccatgtcatttcagaagaagtaggtaatgatgtaattgtcacaccgacaatgctggagaagcactggggctactgctcagcgcctcccaaggtacagcaccctgcccgtaaacgaggtcaatggacggtggcacaccgggaccacacctgacaagcgtggctccagatttaaagagaaaacttctgccttcagagaatcaactggaagggacaagtctcccccaaatctcttaaaaagaggtttaatctgggactggggaaaaagagagagagaagaaaggcatctactttgaaagacagacttgggtactttttctggccaaaaaacaaaaactatgcaagccgtctttccctttctgctacctcaacagagagctccgagacggccaaacaaagcttggggtgatcggcccagccctggggatccggagggtctcgttctgtttgatcctaattgcctccttccacacagtgtctcagctctgaaaagcctcggtcctcttggaggcaggcagggtataatatcaagacaaatgcagtagttcctggggaagcaagagccggcagccttagacggtgtgtttcaagtgggaaatccctgaccgttcctgcctcagcgctggcctgggggctgcaggcttccatggagggtttccaggatatgtgacaagggagcttgactcatgcacccgcacactggctgtccacacacggacctggccacctttctccaggaggctggacagtcaggcccaaaacatctgaggctctcaccctcaggaggggatcaacgtgtgctctctaaaatcaccatgaaaaatctgctccctgaagtcaggggaggagggagagacaggtttggtcacttcaggaagtcaggagcagtagaggaaagttctggaagatggagcagagacggctgagattcccactccagcgctgtagctcacccattgggtggcctttggcggccacttcatctctagcacctttggttttttcattggtaaaatgggaatgagaagaacacccacctcaaagctttaccgtgatggggatgatgatctgcgcaatctgtgcagcagctggggaagcaaggactttgtggtggctctggctgaacagaggtgaaaccggccccccactgggtcacaggcccccgagtacatatggcacagacacagactgaccgcctcatcgattccacccacagcactccacctttcaaaattctgcctaccaaacatactcatcatataatgagcagaggtggtgtttcaaatgtttaatcgctggtacagcccaggaatgggcggccccatcagagtggaccccagctgtaaagctggctccagtgtccagtgcgctcccctagaccctgccccgtggtaatgagtcatgcaggttccctttctcctgtataaacacctctgactccctgcccttctgcatttctgtttcaaatcaataccagttaactgctattagggaatcacactgcacacactgcatcaaaaacaaaaaccaaccacacagatttcatctcatgtagcctgttctttacttttctaaattgggaaaacagctcatgggtcccaacagacttaggtgaatacctagaattccggaacaccccagatttgaatccagcgagctctcctctttgagttctctactttcttctctcctttacctcactttaagcacccatgcaaatgccccctcggttcatttgtctaacatctgtgtgacatagtccagaaccccttccttaaggactccacagttgagtggggagtcagatgtctacacattagtagaattccatgtgtatgtgtgcaggtgtggaggcagaggagcccgagggaaagtgggacgaatacttcagagagtatgcgatgtttgagttgggctttgaaggatgaataggagtttattgggcagagagagagaagttgaaggaggtgagtcataaaaactgattaaatctcgattacagagagccttgcgtggcaggctacagtgcttggagttacaccggatcactgaggaatgtgagggcttactgggatttaattctcctagtacgggagacactaggtaaatgtatgtgaacaggccttgtgaagagggactcttgggcccccaaggatcactgttgctactgtctacaaacaagtaggcagtgaacgactatctctttctactatcgctgtttcgatgataatagcacccacaaattaccacctccaatgcaagaagagatgcatcacgcctctactacagtaaactgtgttatcaaaatagtagtaaagttgctttgtccatttcactatcccatcaatagggcccaaaatcccatctctgaaagagcctggtaagtggggtcctgatgacagaaggtaggtgtggggcggggctgtctctacaagtagctgtttagacccacccccaccccaaatcctttctggaaaaaaaaaagataggagcacaaacagatgacaacatgaccaatccctgaagctagagggagcaatggagtccggctgtgagaatgccatgcgtttgttccctggaccacacgttcactaacaggccttccccggcagcgccctgggcaccatgctccaggagctcatggagaatgggggaggtgatcagtgctggtgagacaggtgctacgacaggggcagcaactcttacagagcagtaaagaggaagacagccactaactctgctcacagccgaatcttgagaagtgaggaggattttgctgggccagggacatggaagggcatttggggctgcagggtcaggacaggtggggttcttctccagcccaatcctccagcagatgcaaaggaatttctaaggtccagggaagtggactggccaaaaggtactgtgccatgcggtgtctgccgttaaatttgtactgacacacgctacgacatggatgaaccttgaaaatgtgatcctaaatcaaagaagcctgatacaaagggtttcagaatggaattgatccacgtatatgaaatgtccagaataggcaaatccacaggacagaaatcagacggctgtcatggcctggcaggaggggagcagggctgactgctgatgggcacgggtttccttttgaggtgatgagaatattgtggaactagatagaagtggtagtgattgcacattataaatgtactaaatgccaccaaatggtacatttattattattattttttgagacagagtcttactcttttgcccaggctggagtacaatggcacaatctcggctcactgcaacctcaactcctgagttcaaacaattctcctgcctcagcctcctgagtagctgggattacaggtgcccaccaccatgcctggctaatttttgtatttctagtagagacagggttttgccatattggccaggctggtctcaaacacctgaactcaagtgatctgcccacctcagcctcccaaagtgctgggattacaggcgtgagccaccatgcctggccgaactgtacatttacatgtggtttttacattatgtgaatttcacctcaatgaaaaagaagttccacacgaatgcaatgaattctaagaattttccaaacttacgggtgatattaaaatggccatttcaaagcctctgctctcccttcacaggggtctgaacagttgggggagttgactcatggaggcatccaggcccagcaggcttcatccacagccacatgaaccccttccttgcagaagcgttcctttactggacagagggagaatgaagtactagggtctcaggggattcctccagaggccaattcaagaacagaaagtcatttcctggcatctcacgatgtgttgataattcggatgatggacggcgccgggctagtttgatgtttatttccatgagcttcagtcttcctagttggatgaaccaaggctcctgtcattatgtgggactgcagctgatctacacgggcacactcttaacagaccaatggtttcagccattctcacagactactctgaccactcgaggtaaaaacagggtcattctgacaaaaagaaggatgattttacacttacatacatatatacacacataaaacacatatacaaacatggccttacactcagcttgaaacaaacaacctaaaaactggattaagagtctccttcctacgcttcagactcacagtttattcattcatcaaatatttacggagtgcttgctggaggacatcgaagtacttccagcatgttctaggtgttacggacacattgttcaacaaaacagaaagagctccttgcctccaaggagttttccttctagtagggggcttacactccagtgatggcaatgcaagctgaacccaccacctggtgctggtgggcgctaggggccgtcttcccaggcctggcttgtggcaaccacgcctactgctcggccacactccaactccacttctcccttggattcggcgctcccagcccttgaatctagtgagtcaccagggtcagagccagctgcttcttgcccttcaattcctccacaccttcccttgccctctatcctacctctgcctcctcttatttttcttctggaatattccaaaggcttccaatctttatttcctgcttccaacgattccctctctacccaaaacactgtcgccagagttttcttcccaaaacacaactcaaatgtgttgttcctctgctcagtgactttgaatatccctgatttgcctacagagaaaaatccagcccccttggccttgtattcagtagcctccataaggctttcagatgctctcgtctttcccagaaaccacttgggaaagggktatctagaagtgcctctgcaacgacagacagaggactttaggtccaaaggagaaacaaagtacccccaataagcctcggttggggctgacagtgagaggaaacacagtgagacagtgggtcttctcttgggactcagtcactccctccacgtctgtgacccggccgtgagaaactctattgacaagtttcattgagtgctggtcccgctctctgcccagggtcaagtattcccaatgacttatttttaaaaagcaaattcgggcactaactgagaaagaattcagatttagcctagaacagttgctcaacaagtgacaagaatagatcagtggccgatcccattcagggttaaagaacagagcctccttttctaccatcaggcccacagctgtatgagaggcccggagccccgaccccggggggaagtgccggtgacagggtggggacattcgcacagacatgaggcccaggacttgcccaatgctgtcgccgtcaatagggagacaaaggggccaggcaggccagatgttggcagcaactcccttgcaaccccaggaacaattccttctttcactgcctgatcagacggccaaggtcagaggcaatgccagccagagcttaccctctgagtgccaaggccctttagagaaatttaaayaattttagatagaaacactccttctttcctcgctttaagcagatggcagggagtagcctttgccctttcttgctgatgcaattgtcccttggagcatctgctaccccacactgccaccgtcaggagctcctgaagcagtggagagctgctggcccccgaatggtgtcccccaactgccgtgcactctttatcttcattttctttctgtcattttcgttttacccccgccgactttgtgctgttgggcattccgctcgccgttcatgaaagcgttccctcttgcttcatcctgatttgctgcttttagtttcatggtcttggaaacccaagcaatacactagtcaggactgtgccctgcatgggagcgaggccctgctgggaatgcaaccaaagagttagagtgtggcagccaccgtgactttggtacacttctctacctggattctgggctgggttcggagtgtttgctggaaagtggtctctgaataagcagggtgttcctccgtttaccatcaacaaggtgcacagatgactcaaagctcagaggtccttacaactgaaaacccagcccactggactccagggagcaatgaaaaaccacttgctaccctttaggggaggcctttgaggacccttcccagtccccacacatcccttctcaagctcagtctgataagtggctttcagaagcactgccttggccctgtcacgctcaaggagactggggacaccctggcaagttggcaaaaaaaatattccaaggaggggttcctggaggcactgggctgaacatttggggaagaggcttgacatggtttgggtctgtgtccccaccccagactcatgttcaattataatccccaatgttggagaaggggcctgtgggaggtgattggatcatgggggcagtttctcaggatttaataccatccctcttggtattgttggcgtgatagtgagttctcatgagatctggtggtttaaagtgtgtggcacctctccccgccagctctcttcgtcctgctcaagccatgtgatgtgctggctcctcctttgccttccacctgaggcctccccagaagctgatgctgccatgctttctgcacagcctgcagaaccgtgagcccattaaacctcctttcttaaaattacccagtctcaggtatttctttagagcaaggtaagaactgattaatacaaggcccctctgcagagaaggaaaagagcagggactaaagggttctggggatcaggctccctgggtcccaaccccagctctgccaccccagagctgtctgygtgaggaagtggttcccttgccctgtgcctcggttttccctctgtagcaacctcagggtgttatggtgaggaataaggatagcactattcctaaaatgccaagctcggctattccccttctaggtgaataccccaaagaactgaaaacatggactcaaacaaatacagccaagcactgcataacaacgttctggtcacgatggaccacatttatgactgcggttccataagattatgattccatatttttactgtgccttttctatgtttagatatgcttagacacacaaatacttaccactatgttacaactgccaccagtattcagtagagtaacctgttgtacaggtttgtggcctaggaacaataagccgcacctcacagcccaggtgtgaggcaggctacaccatcgaggcttctgtgagcacactccaggatgttcgctcagtgactaaatcacctaactacgcgcttccyggaacgtatccccatcgtgaaacaatgcatgactacacttgtacaagaatgctcacggccgcttattcacgacagccaaaaaggtgaaaacaacacaaacgtccatcaacagatgaatggataagaaagaaaaatgatacatacagacaatggagtatcattctgccatcaaaaggaaggcagtgctgacacatgctgcaacacggaagaacyctgacaacatgacgctgagggaaagaagccagtggaaaaagaccatgtactgtgtgattgtactgctatgaaaagtccagaagaggaaagcccaaaaagacagaaattgatggctgtcagggggctggaagagaggggaatggggaatgactgctaatgggcacgagatttcgtgctggggtggagaagaggtttcggaattagatagaagtggcagttacacaacatcgcgaatttgctaaaggccgctgaactatgctcttgtttgtttgtttttgagacagagtctcgctctgttgcccaggctggagtgcagtggcatgatttcggctcactgcaaccaggagcagtggctcacgcctgtaatcccagcagtttgggaggcgaagacgggtggatcacttgaggtcaggagttcgagaccagcctggccaacatggcaaaaccctgtctctactaaaaatgcaaaaattagctgggtgtggtggcaggcatctatatagtcccagctacttgggaggctgaggcacaagaattgcttgaacccaggatgcagaggttgcagtgagccgagatcacgccactgcactccagcctgggtgacagagtgagactccatttcaaaaataaaaaaattaaaaaaagaaagaaaagagaaagaaaacaaacccaaaataaattaagtgggcaatttcatatgaggtgaatttatctcaattagaaagacaaaaataccttagcttagtgcccagcgtgtagctcaccatgtcacaaacaggctccagagccgggagacatagggcacctcgcttctctgattcttgtctgtcccctaaaggggtctgatcacggccctgccctcaaggccctacatcacagctgctgtaaagctggagattaggaatgggagctgagggagggtgtcaaggcagctaagcaggttaggaaayccctgcctccatcttaaggggagaatgaactcttgggagccccaagacactggttccattctactggaaatatccgttcttcagaaagacaagttgagccacagttatcctagcttcaaactttttaaacctgtcatatcattttttttttaatttctttttttgagacggagtctcgcactgtcgcccaggcgggctggagtgcagtggtgcgatctcggctcactgcaagctccgcctcccgggttcacgccattctccggcctcagcctcccgagtaactgggactacaggcgtccgccaccacgcccagctaatttttttgtatttttcagtagagacggggtttcaccatgttagccaggatggtctcgatctcctgacctcgtgatccatttttttttaagtggcagaactctttttttacatgaaatctttgcccagagtcccttaaaacagaaggcaggtgacactcagcgggaggtgttgccttcagsggggagcagggctgggccatgccccctctacctcttccacacctgctatggttcagggacaatctctccaagtccacattttccctcttcccagtgagacaaccaagaacgggcctggcagggttctgctggtttccttcaagaaggaggctcaaggtgaacatgacactaaggggcaggattgctgtccagttagaaactggcttccgaggtctggagggctgttttggggcacagaggaaggggctggatttgtggtggctcaagagagcagagctagggccaaagagtaccagtcagagggacaaaggtgaatgccttccacacctgagagctgccccatggaggccccaggaggaccagctgctggcctctgtcttgcaaggaccgccaccacccttcaccttcatcttcctcctcattgttaagaagtaaccccttatcatccctgcaatagccctaggaggcaggggggtgccatccccatgtccctgcaggggaaactgaggcacagagaggcgagggtgcttgccctaggtcaactggaattcttatctgaatccgagattctatggaagaaaaacagactcaggagaggcaaattgctttctggagctgaagaagctgagctagatctggaactgtgtctcctgactcttagtccagtgttccctctgctgtctcccactgrccagcacagaaaggagaagaagcatctggggtcagatggcacaaccttggacctcgcaggccaggtctccggggcagcaagtggctttggagtgaaggcttccctgcaatggcacgggcttatctgccatggaacttttccgacgccagtgcaggaagggagcaggtgttggctgcttccaggccatggtccccagagagggacacagaggatgtatgcacagtcttttgtgatgtctcccacgtgcaaaaaaccaaaatgtctttatccaactggctgggaagaacatcctacacaccagcccatggcatggagatttcatactttatggactgaagggaccagaggaaggggtggggaaattcacaaggacagctctctccaatgtgagctccgagatgagatcgtttttggagaaggaaggagagagggagacacaaaacatctggagaactctctctgtgttcttccccttgctcaggtatacaattcaaagtaacaagacccagcactcacatagctcagggctgggactgccattgaccagggagagattaagggactctgtactctttatgacaaagaccccaggaagagcaggaaagagaccttatatgcagtgtctctcacttttagttaaatgatgacgatggtgatagtggtgatgctgtaacagtggtgacgaagatgatggtggtgatgaaggtgatggttatgatggtggtgatgatggtgatggtgacagtgataataatgtagtggtaatggggatgatggttatgatggtggtgatggtgatgatggtgatggtgatagtgataataatgtagtggtaattgggatgatggtggtgatgaaggtgatggtgatgatggtgatggtgatagtgataataaagtagtggtaatggggatgatggtggtgatgaaggtgatggtgatgatggtgatggtgatagtgataataatgtagtggtaatggggatgatggtggtgatgaaggtgatggtgatgatggtgatggtgacagtgataatagcgtagtggtaatggggatgatggtgatgatgaaggtgatggtgatgatggtgatggtgacagtgataatagcgtagtggtaatggggatgatggtgatgatgaaggtgatggtgatgatggtgatggtgatagtgataatagcgtagtggtaatggggatgacggtgatgatgaaggtgatggtgatgatggtgatggtgatagtgataataatgtagtggtaatggggatgatggtggtgatgaaggtgatggtgatgatggtggtgatggtgatagtgataataatgtagtggtaatggggatgatggtggtgataaaggtgatggttatgatggtgatgatggtgatggtgatagtgataataatgtagtggtaatggggatgttggtggtgatgctaatagtggtggtgatgatgacagtgacagtgatgctgctgttgattgtggtggtggtgatgatgtgatcagagcagcctccactacgaccaagtacttctcaagtttcaccaaatttaatacctgctctgacacttccattttacagatgagaacaccaaggcttagagaggtactgggacatctcaaagctacacagctagaaagtcatgggagtgggactcacacctggatctgcctaactctagaccctgtgttcttcagcactgttctgcactaggcttaggagacatcattctgcagcaagtacacagcagtgggtaatacaccacgctctagtaacggggtgctgacattcaagtcctggctctgcctctcattggctacgtgtccctgagcaacctactggacctctctgtgccttgatctcctcattgtaaaatggacataatactgcgtttcattaattcagagacgtacaactgaacctcccttaaaactgatgtgataataagtctctgggcacattcttttcttttctgttttttgtttgtttgtttgtttttccccgttttttgagacagagtcttgctctgtcacccagactggagttcagtgacgtgatctcagctcactgcaacccctgcctcccgggttcaagcgattctcctccatcagcctcccgagtagctaggattacaggtgtgcaccatcacacctggataatttttgtatttttagtagagacggggtttcaccatgttggccagggtagtctcgaactcctgacctcaggtgatccacccgcctcmgcctcccaaagtgctgggtttacaggagtgagccactgcgcctagacgcattcttttcttgcttagaggtatgcaagaaaatggagtatcttacaagatatctcagatctggtgataaatgctagtatctaccctagagggttgttacaggaattagatgagataatacctagtgmctgcttagcgcaaccaggcactaagtaagcatttataagaactaytcttattttgaaaagtcttacagtttagccagtctactaaatgtatccaagtgtttgtcaaggaattaaaatagccacacttagagccagaacctgtgtcagaaaaagttctctgcccttacagaccatcactgacccctactcacacacatcatcagactcacgtggccaggaagggccagaggcaggacctgaactcagagctcttcagggcccagcacacacctcccaaacacgcaacgtttacatgctggygtcttgggctacaatgtcactgctgtcccgttggcagtaactggagcatccccagaggaaccaaggaggtgacaatacaaaagggagcagggagttgtcctgggggtgttggctccagcctccagggcccttgtgtttactctgcactaatggatgaagtcagcctctgtatgggacctcccttactggggcctggatcactgctctagatgatctacggactcgactcgggacaatgttttctgctccctgtagccatgtgtcacccctgctctgagcctgctagaaaaggagggccagtgacagctttgtagtcgtctccactgatggtgtggggagagagaggaaggggccaattcagtccacgtccacttctaggaatgttctgagcctggtaaagcccagaggaggcccgacgcatccccattccaacactgcatgactcaggcccaagtgcctaacttctcctgtgcctcagtttcctcctccataaactggggataataataggtcttttgtacatttgttgtgaaggttgaatgagataatctgggtaatgcatttagcatatggctggcatgaagttaagtgctcagttactcagttattatattacgaggcaactctcyttgagcaggttcaggaagcagcagggcacacctgtgtccttaaatgggagcaatgagtatccatccccattacaggatgaaatgaggtaggaatgagcaagagctcagaacaagagaatgccctatgcaaatgctcttccagcaaccatttcgtgagcagctactgtggaggggcttaggatacgcaggggacaatcctgtccttgcccacgtgatcttgcagtgtggtctgctctgacagtcagctgaagtgtgagctgcatcttcatgtgcctgtttcccctactggcctgtgagcctcccgagaacagggatggtgacctgtccacagaggccaccactgtatccccagcaccagcccagcatccgggacatcaaacctactcagaagtggaagaaaaaactgagcaagggtgaggaactgtatttcaggccatactcgaaggctctttcttacagaatcacctacaacctttccgtcactgtttttagtgactgaattttccaatttgtccattagtaaagcctccaacagccttccagcttttgccaaatctccacctttccctgaaggattatgccctgaacctggggcacggctgtacccagctgagaactcgggcttcgcccggtcctgctgagaaaacagtgccacttgccaagcctggcacccctgccatgtcctcctgccagccagcaggactcctggggctgtgaagttgttggtgccaggctacaggcagcccccagaagggctgagaggtggcagggtggccaagcagttggaggagggggccgtggggttatcagattcacagcctgcaggtgagggaagtrgggcaggtgggctccctgggccctcagccaggcatccctccagactagcgcggcccaacagaacgtactacgatgacggaaatgttctgtatctgcactggccacaggtggctactgagcactcacaatgtggctagtgtgaccaaggatctgaattcttaagtttaatttagcatagaacaggcacacgtggctagtgactactatactagattgcagtccaggtaaaggctccaggggtcaagcctaggcttgggtgttaaatggcgcccccaaaagttggyagaaaatggagggtaggtgaaacgaagcatgtcttatttctgagacacactcactgctcaagaggagtcaggacactgacagctcacattcttgaacaactgcctctgggccacgcatgcgttaagcacattaactcacttaactggcacaaatacacgttacacattacactgccacccagggaggtaggaatgacaacaaggcccattttacagatgaggagactgaggtttaaaaaacccttctctcagcaacaccctgatgctatgggtgatgtcctgctggctagacctccccctcccccaaccctagggccccgaacccacaaagcgattttcaacaagtaacagatatattgtacttatttttaaaacaacacaaacacccactttttaaccatcaaatatgagcttcgatgtcctcagtctcctgcatcccaggccaaaggtggaattcctctccacttctttccaaaaccttaaatgaggaatagcagggtatacctttccttattaaaagggttcccacactactgcttcacttcacattctgacagctcctattagggaaaasatgccttttttttttttttattttttgagatggagtctagctctgttgtccaggctggagtgcagtgacgcgatctcggctcactgcaacctccacctcccaggttcaagcaattctcttgactcaccctcccgaacagttggtattacaggtgcccgccaccacgcccggctaacgtttgtatttttagtagagacggggtttcaccgtgttggccagcctggtctccaactcctgatctcaagtgttccacctgcctcggcctcccgaagtgctgggattacaggcatgagctactgcacctggtctaaaggtgcatttttgtaatgtcactattatggctctgacaatagggaccagaggtcatttcattttattattggttatctacatttctctctcagtctgaaacttgctgatatttgaagaaactgggatgtgaggcagggaccaatcatggaggtgtgtctgagacggagggggttcctgggaggcaggactgatgctggtgctaatgctggggaagtcccaggcaggctagcmgggtgggcaccaagctcgatgtgaaccgccgtcattctgcactcaaactgatttcacaaccagcctgagggaccttggcgccactgactctgggactgtgggccaccagggcaagcaggkccagcgatcaaggagcctggacttgaagtaagactcaacgggatttgagacccccgctcgaccatgtgcgggccgggcaccctggggaagtcgcttctcagagccccagtctccccrtctgtaacataagggtggcaaggcctaactcccgtcagggaaggaaacaaagaactaacagagcaagcacacagtaggtgctccaagaacactggccccgtccactcactgttaaaggccagatgcagagaagtaccgcttaggaatgactgcaggaaagaacccaaagtctcatktaatccaacctcgcacgcccccaccctaccccagcacatctgcaaggtggtgggggctctttccaagagcgaccgcgttcattcacagaaacagggcaagggccaatcgctgctcagaggatgtccaggccaacccgacagcccaactccaggctagttttgtagacagagatgagaaatggagtctgaggcagttgccagaaatcaccactcttgagatccaagaaagagatggctgcttcagacgcggagctgaaggtctctgaagccttgggaagaacatgcaaaagagcccccgggagacaggagggaaatgggcccaaggacgcgccagaacacgacatcaaagtcaccctgggctggtgccagggtcggggccaaggccgtcctggtgagcgactccaccaagggtctcatgatgcaactcttccgagacacccttcctccagtgaggctgaargctgagggcagctgggtgggggcagaggaaagggctggaagagagttgggatgaaccaggtaagaggtaatttaagcacagatccacccttgttagtgcaagaggctatttctcctgggcatcaagggagaggcttccagccagggaagcagggctcccgcgcacggtcgaggcagggtatgagcagccatggtgctgaatgggacacacgcaaggtgcacgacgtgctcactaagccatgtcctacacacaccaaggaagggaccgcttgctcgtctgtaccaagatcccctgtgagcctgcaactctttggaaggccttttttttcttttcttttcttaatttttttttttttttttttttttggtagagatgagatctcactatgttgcccaaactggtctcaaactcctgggctcccatctgggcctcccaaaatgctgagattacagatgtgagccactgcgctgggctctttcctaaatgacatagggtctcactctattatccaggctggaatgcagtgacgtgatccctgctcgctgcagcctcaaattcctgggctcaaaagatctctcacctcagcctcctgagtaactggaactataggcacacaccactgcatctagctaattttttagttttgctagagacagggtctcactatgttgcccaagctggtctcaaactcctggcctcaagcaatcctcccacctgagcctcccaaatgctgggattgtaggcatgagtcactgcacccgcctgtctttttttctttamcagattttatttttgagaatagcttcagatttacagaaaaactgctgagttagtacctagagttcccatacgcatacccacacctcattttccgactatttacatctgacattagtgtggtgaatttgttacaactaatgaaataatattaaaacattttattgctaaagtccacagttgattcagagttcctcagtttttttctctaatgtcccttttctgtttcacgaccccatgggmcatttcatcatcacgtgtccgcaggctcctctgggctgtgatcatttctcagacttgtcccagtcacgcacctgggacacaggagggctctggaaacagaggtcctgatcactggtggccttggtggaggactaacgacccaaaggcttggattgggaacagaatggggacctggaaccagggatcgctagagacagagcaccggcgtctcctttcagcacatgttaacagagaaccaagttcaaacaggaccgcgtttttgccagggagagcctttcctcgggccgtccctggttctcctcccagggacctgctggggcctccaggaagaaggggatcagtctggagactctcaatgtcccacaggggtagggtggggctccctggcgtttccacctcggcttcttcaaaactagcggtcccaccacctgccaggaggccattgttagcacattttatagactaaaaaaatacaccgaggctcagaacggagcagtggtttgcccaaggcagtccactgagaagcagccaagccaggttcaccgcsagtgtgcttcccccgcacagcactggccccacgacagccatcccggaagtctactgccagttcccaggccactgcctctaaactgacaacacggggtgctaggattggcttttggaaggtccacgacccccagaggatgcgccttctccaccccctctgtggctacaccaagggaggcagccacacaagtggaaatttctaaaaaacacaaaaaaactayagctgtccttggctcaaatcacagcaaacaaggatccagacaagcccgtctgcagaaggggtgaggccatcccccttcccccattgatactccaagggagagagggaaaaggaagattctagcacaggcctggtggacagttggctttgacggacagatgctggagggctgaagaagttagtgaaagctgaatgaatgaatgaatgaatgaatgaatgaaagttaagtgcactcataacgaacgcttagacagcacctaccacagtacaggcgctagacacacattcactcatttaatcctcacaatcaaccaccctatgcagcaaatactgctcccattttacagatgagaaaaccgagtctcagagagattgacaccaggtcaaagtcacccacctgggcagtggtgaagctatggctaagccagctctttccagctcccagaagccaactgtgcccatcttttccaaactctgcatttaagcatctcactttggccatagtgtaagtatttacacagtagaaacgggcaagcrttgcaaatcgggacttccccggcacctgtcagaaagttgctgccgcctctctctggcccgcttgcctccttggcaggactgtcctgtggaatcagttcctgcaggtctcggcagctggaaggtaacactgaattcaagagaagccaggatcccctgaggcccagccagtgccatgtccctctgggagagccagggaccaaacagtggtggaaaataagcaaaaaaggagagcaygggcttgaggctggttaccctaggttcagatgccagctccattacctactggggtacctcgccgaagtcatttcatcattctgcgcctcagtttttgcctctgcgaagtggaacaatggaacccccagaatgagacagtatgtatagaatgcatgatacacaacaggtgctcaggagctgtcactacagatattctcaagggatacagggtgatggggagagagaaccaggtgaggtcaccccaagagcatccaatttagaggagggcgattatgcacccagaagggaaagcattcataagggtgctacagatgccttcytcgtaaaatgtacgatcttatttaaacctctgcgagttctccaggtgaaaaactgcaccccctgttctaatttacatctctttgatttttgagaagctgacagtttttcactgtatttctcttttgttctttgcaccttttccccttgaggcagtcacagtttctcactgattcacagctayttcggcttattaaggtcatttaacccttcaattgtcaactgggccacaagtgcgttttcccaggtcacccactcgcctttcagactggtttatggcgaggctggttgctggtctgcttttccacgctcmagggtcactttgttatggagccaactccagctctccttgcctttgtggtttctgtcttcttgaacagaacgagccaaggtttgaggctcttrckgatctgttaggytgattcctacttactgggttgaaagcgagaaacaaatgtaaaagtttccacyctcctcccccagcaagccaagggctgtcatgccgggtcctcctccccatcaggccttcactcttgggtcacccctagtccctggagctcctgcctggcacagagagagagtgactcactcccgaggcacggtgcccttgcccggggccccagccacaatgagatgggagacacacggcccacggactttgaggcttttgctgatctgtccctcacatgggggttgggggcacagctcccttctgatgctcccactttcastgggcagagggcaggcacgtaggcagtggggagaaagaggtgaaagttagagggaaaggcagactttactgaccgcactgaggtcagagccaagggtgaggccagagggtccctctccccctggagttgcaatgaaaaggcagaaagacaaaccgaaggacctcaacatcaagcctacggattctcccatcaaaggtgccstagaaggcaaggccctggtccctctggaccttggtctccatatctgcaaaatgggcctcttttctgtacagtttcttccagcttcaaaaaaaaaaaaaaaaaaaaaacacacacacacacacacactgaaaagctcacggtcatccagtctacagttcccagcatccctggaagaggatactgaggccttctggcctcaacttcactcaaaataaagcctggagaatgaaacattaggggaagcttctaccagctgctaacaagtcaagtcaacaactatttatcaagcacctactacgtgcccagggctgcagatatacagcagtgaacagaataaacaagaatctctgcgcttcggggaggtgacaagaagcggggacgaaataaggcaaatgccctttagaaggtggtcagttctgtgcagacgacacagcagaggagcagcgcatggagaggcagagcaggagggtcctgagggcggcgtggcatactgtgagagggaaagggactttcagcctagcttctagccacgcaaggggccgacacttcccatgtggtctcttgggtgatcctcacaccatccctgaaggtgtgaagtggaaactgaggcccagagacgtggcatcccttacccaaagttgtgcagcaagggaattcccaaagtgagtctgcctccctccaggccacactgttttcctgaggcccaaatactgcctgacttggagctcctgggcccggggaaggtgaggatgtggccaggccaccctcccaacacctgccacggatgccacatccaagaatggaaagaagtggattccgccctgtagcagcggtgtctcactgcatgacatgcttctaggacaagcaagtcccttcagggaagtctgcagctgccctgagagcagcacaagctcccgtggtgcggggtttccgccaggcggcaaagcctcggacttcgatgtgggaattcctcccagccrgacacatggctccgaagacccagtgagcatccacagaaactgtatggctgaaggatgcttgtctctgggtgcaggaggtacgagaagtcgctcatacatactgatggcaagcatacagcctgacaaatgctcacactcatgtgaccaccacccagcaccctagaaggctctctcatgtcccttcttggcaattccctcaagaagtaaccatcattccaacctctatcactacagggtagttttgtctgaccttgaacttcctataactggaataatacactatgtactcattttactttattttgttcaacataatatctgtgagattcatccatggtgtttatttttcattgctgtgtagtactccattgtataactatgccacaattggtttatctgttccactgttgatggatacttgggttgtttctagttggaggctactatgactaaggctgctctgaatattcttgtttatgtctgttagtagacagaagcactcagttctcttgggaacagaattgggagtagaatcattgggtcctaggagaagcaggaatgaatgcattagacccctgccaagacctggtaagcaggcaacctaggaaggcctccttgaatatgaagaaacagagatctagtaatatacccagagtcacacagcaaagctgtggtaccaaaatccagttgtgcgtggctccagctccatgacctcctcacccagtgtagcatgggtgggcaccatgagcaggacctgcctgagaaagagcagacaggaaggaaggaacagcagcagtgagggaggaaggctccttcactgtctgaaagaacagcaaggaacccgatgtgtccccaggaggctgggagaccaggtacggggcctggtaggctgagcaaacacagaagcatgaataaggcctaagtccactaaaccccaagcacataattttatctggaagccacaactcatccagccacaccggcgcaccctccttcttgaggagagggcagcctccaatctgaagcacctctgtctcccctggactgtccgagacagagtggcagaagcctcgcttgtccaaacacacgacagtcaacgtctcccaggtcccccgctgcccaatttcagcctcaaagaaccaactatttgcctcggcctcccgagtttctcacctggagtctccgggctggctatgagtgttcgggaaactctctggctctggtcctgaaaggtgaaggagggygcaggggcatgtccccccgtgacatctgtgcccgctccccaagcgccagcccaacacagggctgggaaaagctgggtgagagtcggcacatcctgaaggaggcggcgccgtgccccagaaggaggcagacaggaaagccaatcagtgtgtgttgaatgacagcaygaatgagtcaaacccctcctgggtagggggcaggtggcagacagccgctgtctttgtgtcactccctgcccctctgaatctcccctgccccgctgmcatgaggatgccacggttaccacaggaggctgccatgtgtgtactaggaccccacctggcagccacagttgaccagtccagaagtcagcatctgcctgagcccaccgatatgggttccttctgggggatgtgaagactggagtgagaagggcagatggtctccctggcaatgctgagctgcagtctgcaccaggggaagctggcggccctgtgttaccaggaggggagcaggaggatggagtgcagagaggagcagggatgaaggtgccgcaggctctggcccctgcccacctgcttgccaacaactcctggagttgggctgctgggatctgcatctggaacagggagagaggctcctcttcttggagaaagcccactgccacccagtggggcaaatcttcctttggaaggtgggccatggtacaagcctcctatccatctgggcccagatcttgggctgaagttcacatactgccctgtctttggggctggggcatcccttggccgaaggagggctttctgtaatgccatggttaccatgccattcccccactccctaaactgagcctgccatcagctaaaatgtcttaaggcccckcttgaagggtcttagcccttcaccaggcacccccgagcactacctcttcatgaaaccccctctggagacccctgctccatcccctcctgccctgcaatgcccaccccccacaggttcatgcctcccacctgcatacagtcgcccgggcacacatgcactcattccaaggatgccttcttccccgcatgttctcctctgcgaattcattctctgtgtgctcatccattagcttgagcatgttttattcattcccacgtacatgcctccactcatcaaatattcatcgaacacctattgtgtgcccgacttgctgactcttcccctagtccccaatttctagaagtgcaatctgcagggtcatcagcatcagaatcacccaggcttgcttgtttaaaatccagagcagcccgacccactgccccattgtctcaagagcacactcttggaacaggctccctggcactgcggcgcagcctcgagcttgagaactcctggctcccggctgctggcagaggccagctttgcttcttctcattctcttattttccttcttccccccacatcaacyctaggggattccagggaggagctcagagccacattacatggaagactagattcctctgtaatagctttgtggttttatttctgctctgagaccattacatgtataacacacactcgtaaagacacatatgtacttttaaatcaagtccctggagctcagcatgggcacattttagacatcggagactcctccaagaaaggcaccttaagtggggttggaagtaggggtgatatggaggaaggccccaatgcaaaaatgtctattctcagcaccccacccccgggtgcccagcttccttgcctgtgtgagggcggcattcttttctcccctggcaggtgtatttgaccaactaaaatctgggctccactgtgatgtcaccacctgcttctgtcctacctgccccagtggctttttcagaccacatatatcaatctgtcctaaaactgctaggtagaaggagaggacgaaatgggagaatggctggcctactggccctgggctcaggctctgcagctctttctagcccaggaagacgggccctgaaagccagacccaggcaccagctgctggagacagctaggctgcagcatggggttgggtgtccagcttgtggtctgcaatggaaggcggctcttccaaggtgccattaatggccccgacagtgctgaccctccctcagcagaatcagggctaaaaggcagaagcttttctagacattgatctgtctcccagggcacctctgcaccatgaagccccataataatagctaagagtctaggagagacggcccaagattgcacagctcatgataataagagaacacgccaagcaagaagcgtaccgattgccatgcaacagcatcatgctcaatatggaacccgaaccaccttgctcagtccacaccagtgtctcagctttaatgtgcacatgtrtcgcctgggrgttttgtaaacatgcagactataatgcggtacgtgtcagtgtggccccagatgctgcatctctaacaaactcccaggtgaggctgacgctgctggtccayagaccgcaccttggatggaaagaagtattgctattatcatcattcccattttaccaggaaggaaaccgcagcagcgmgcagagtttgtgacttgcctggagtccacaaaacagaaagaggcagagctgggatttgaactcaggacttctggctccaaggtatgagcccatgatccccaagccaagatgaccctctcaaggcaagcttgaggctttgctgtattctcactgttcctctgtgtctgccatcaggtgccagccaggttgtggctcgcctgtagacaccttttcaagaactggaagacaaagccccctcttggcagatgatagcagccatggccagccagctggggsaggctttgtgcaaaacaagatggtttttcctctggcgggtcagcgccttgccagggcacgtgagattcctgcccactggaccccacaccatgatgaggtctaaaatcaaaactgtgtaaccctcggcagaaagctctgctcagcagttctgcatcctactcagctcgaggacgcggcagatcccagcagacaagggcaagggctttggattccaaaagccctgagttcaaatcctgcctctcctacttggctgctgtgtgactttsagcaagtaagtgtacccttctgagcttcagtttccacatttgaaaaatgaaaaaaaatatttacgtccctcacyggatgggtatgtgatatgaacttggagcccttcggtgctggctctgtgccatctggcactggacagatgagtgaaccacccagcatgggatggagaaggtccccaggagaaatgtgtaatgcacccatctggggccatccgccaggcatgggcgtgggcgtggctaggaagcaaaggagaggacaccctggcagccatcctttgccacatgtcctactctcatgggccccagcccagggatcatcaccctggtccaagaggcccgcagctgggcatctgccaacactgccagcactgcaagttagccccaaatggatttgcttgagggcagaagggtccagcaccttgccagtggtttctgggatgagagaatgctgatgaggcattccttgtaaacagggcccccttgtcaggactaagaagacccagatttgaatcctggctccttggaccatgagctgggtaagcctgggcaggcatggacctctgcggagcctcagtgtgttctgctgcacaatgggggctgagggtcccaggagatccgagtttggctcagtacttggcacagaccacagctcactcaatgtaacttamaacggttggctgcatcctcatctcataaatgacctttctggccttccaatggctctgtccaacaaccatggaaccctcacttcccttccttgcacatttacatctaacccacgagtgtgtcctgccctctttaccagcagatagatcctgagtccgaccactgtcatgtcctctgccctaggtatttatcagccttctctctcaactggattactacaacagcccccagcaggtatcccaactcccatacttgcctggatttagaccacatcatccaagaagaagtctgggatggtggaaatgttctgtatctgggctggctactgagcatctgaaatgtacctactgaaactgaggaactgaattttcagctttattgcttcaattaatttaaattccaatggctacacatgcccagtggctactagactggaggtttagaatactgtccatacagcagctgagggatgctttttaaagccagagtcagattttatcctccctctgctcaaaaccttccaaagctctccactccrcagaaaactcaaggccggggcaattgtctgcgaggccctctgtaattgctggtyctacctttcataccccagcccctgccaccctcttccccctcactctatagtagcccccastggcttcctggtagttcttaaacctgaccagcctcactcctgctgcagggccctctgcacatactgtgcctacctccaccctacccttccctccaccacacatctgctaagtgtctgcatagctgggtcccttgattcacagctctgttcaatgttgtccctgaacccagkaaaggacaccctaagtcctttgcacctcagatccctctgccctctttctctaaagcatctatgatcacctaaaatattaggtgatctatagtcatggccaggcacactgactcacgcctgcaatcccagcactttgggaagccaaggcgagtgaatcacttgaggtcaggagttcaagaccagcctggtcaacatggtgaaaccctgtctctataaaaactacaaaaagtagccaagcgtggtggcatgtgcctgtaatcccagctacttaggaggctgaggcatgagaattgcttgaacccaggaggtgaagattgcagtgaagcaagattgcaccacggcactccagcctgggtgayggagactgtctccaaaaagaamaaaaagtcatgcatctcttaacaatggggataggttctgagaaattgcattttcagcgattatgccattgtgtgaacatcatagagtgtatttacacaaacctacatggtatacggcctactacacacctatggctgggctacaaacctgtacagaatgttattgtcctgaatactgtaggtagctgtagcacagtggtaaatatttgtgtacctaaacatatttaaacacagaaaaggtacagtgaaaatatggcataaatgataaaaacgatttacctgtacagagcatttaccatgaatggagcttacaggactggaagctgttctgggtgggtgagtgagtgagcggtgagtgaatgtgaaggcctgagacattgccgtacactactgcagacttcataaacactgtacacttaggctacactacatttgtaaaaaattgtttttctggctgggcgcagtggctcacgcctgtaatcccagcactttgggaggccgaggcgggcggatcacgaggtcaggagatcaagaccatcctggctaacacggtgaaaccccatctctatgaaaaatacaaaaaatgagccaggaatagtggcgggagcctgtagtcccagctactggggaggctgaggcaggagaatggcgtgaacccgggaggcggagcttgcagtgagccgagattgcgccactgcactccagcctgggcgacggagcgagactctgtctcaaaaaaaacaaaacaaaacaaaacaaaaacaaaacaaaacaaaaccaaaaaaacacacaattttttttctttttcttttctttttttttttaagacagagtctcgctctgtcgcccaggctggagtgcagtgacgcagtcagggcccctgcaacctctgcctccccagttgaagcgattctccttcctcaggctcctgagtagctgggattacaggtgcacaccactatgccccgctaatttttgtatttttggtagacatggcgattcaacacgttggccgggctggtctcgaactcctgacctcagatgatctacctgcctcagcctcccaaagtgctgggattacaggcatgagccaccacgcccagccccacaatgcctttctctgtatacctcttgaaagacttgcctgaggctgttttatggctcatttttttataactagaaggagtataccacaaaataacaataaaatgtacagtagagcgaatgcacaagccagtaacttagttgtttaccatcaagtcttatgcactgtgcatactgtaggtgctgtgcttttgcacractggcagtgcgagaggtttacaccagcaccaccaccaacacctgagcaatgcattgcactatgacatctctacagctatggcatgagtaggtgacaggaatttttcagctccattatgatcttatgggaccaccatcacacaccgaccacgtcactatgcagtgcatggctgttatctgtttacatgtttatcttctctgtccttacctgaacttaggaatatgaaaacagattttaactactgtggtcgttgctctatctcctgcacctagaacagctccagaaacacaagaggctttcaataaagaggcacaaaagaatcatgaggctggcccagcrtgaaataagtgaccactgatgctggtgtcataataaatgttcaccttcaccccactcttgggggtcactcttaccccaagcccacctaggccatgttcggggtctgatatcaaactgtctggtttgctcagccaggcttggtgttcccttttaaataaaaacaaaaagcgccaccctcttcttctgcccagcatgcccggcctgtggaggccaacaagctggaagccgcacacagaagaaggaagtcctggtggctctgggcggcaggaggggcgcccaggcctggttgccaggtaaccccgatcattcacaaacacggggtaatgcggatcccacaaggagagggctgggtgtttactcagacatcttatctactgggctcgcctgccagtgtttgcaccttgctttcaaaggacaaagtacctggtggcggggttggggaggtgacgctgaagggaacaaagtcaggatggctgcaggcgggaggaacagtgggcctactgtgcgcagccactctcaacacattttatgccaagctcctggcattggggactgaaatgagacaatccaagaaaagcttcctggggtgccaagcagcaaatactcacagctgccgcagctgtgttcattccaagatgtgctcaggacaactttcccagcagcctgcctggctggcctgcctcctccccacgcctcctgtctttccttctgccccttgctcactccaagccaggctgtctccacctgggcactgttgacatttggggctaggtcatctctgcggtgtcctgtgtgtggcagggcactgagcagtatccctggtctctacatgctgttagtggaaatgtaaaatgtggcagccactatggaaaataatctggcaggtccccaaaaacttaaccggagaagagctgtatcatccagacgttccatttccaggtacagacccaaaagaatgggaagcttggtctgtgtgtgatacctgtaaacctacgttcactgcagcactatctgtaacggccgagaggcggaagcagcctcgtgtctgctgatggagggatggagaagcacggcctgcattcaccgcagcactatctctaacggccgagaggtggaagcaacctcgtgtcctctgatggacggacggatggagaagcatggtgcagcatacacagacaatggaatattgccataaaagagaaagaaattctgacacatgctacaatatgaaagaatcttaagaacatgacgcctagtgaaataagccaaccacaaaggataaatattgcgtgactgcatttacaagaagtacttagagcagtcaaattcgtagagacagagcatagaatggtaggtgtcaggggctcggggaggggaatggggagttagtgtttaacagggacagagtctctgtctgataagatgaaaagagttctgragatggagggtagtgatggttgcacaatgggaatgtacttaatgccaccgaactgtatgttaaaaacacctccgatttggtgaatttgatgttatgtgtatttcaccacaattgtcttgttttttgagacaggttcttgatctgtcaaccaggctggagtggagtagcaacatcatagctcaytgtagccttgaactaggcgatcctcccaccttggcctcctgagtagckgggaccacagatgtgcrccaccaygcctggctaattaaaaacattttttctgtagaaacgaggtctcactgtgytgcctagtcctcccatttttatttatttttattttatttttggatttgttagcawgatttaatcaattattccacattataaacatatattaaattatcacattatactccataaatatgtaatacatacaactattgtttgtcaattagaaaaaaagaacgaagaggctgccaacaagatggtaagtacacagtaataagtgaattcaaccaacatgartgaattcaaccaacatcagtaaattsaaccaacatcagtaaattcaaccaacatcagtaaattcaaccaacacgagtgaattcaaccaacatgcatttggcattgacatggccttggccttcatgsagcttcatgatctcgtgggggaggtggcttctcatttttaaattaaacttttcatttgaaagtacttttggatttaccgaaaagctgaaaagacagtagagaggattctggtagccctctcacccagcttcccttggtgttgacacctttcagaccatggaacattttcgtcacaascaagaaaccatcattggtctctgatgctgaactaacccggacactttrcgtgaacttcaccagtttttcccaagtgtccttttcccgtccctggatcccatccagggcaccacatgacattgagtcatcgcgcctccttggcctccctggtctgggacagtttacgctttcctcagccttgaggacctgcacagttttcaggagcgccattcaggcaccgtacagaatgtcccttaaactgggtgtctcctatgtgacacctgcttttgtgtgtgtacacgtgatgtacaattgtgtgtataagtgatgtccaatttagccattttaaccatttaagtgtacggttcagtggcatttggtccatccacactgctgtgcaaccatcgccactgtcggcctccagagctttctcatcttcccaaactcaaactctgtccccatcgaacaccaactcccggctccccttccttctacctgtggttaccakgattccaccttctgtctctggagacactgcctcatgcccattaggagggccactgataaaacaayggaaaatagtaatcgttggcacattgtggagaaatcacaaccttcacgcattgttggcgcgaatataaaagggtgcagccaagttactatrtgatccatcaatttyactcctagctatatatgcagaagaatkaaaaatagggacttttaaaagggacaccagcgcacccgtgwtcagagaagcattactctaagtagccaaaaggtggaagcaacctagtgcccgccgccacctccttctgcagcagaaggcattcccccataataaccagtccaacatctgccttccaccccacccgggctagaacaggttccgtaacagcaaaatgagatgacgtgcagccaggtaagtggactgttctactcctgagatctctggcctcagttcccaggactcasaaactctgagagaacaaatagctcaccgctgggtctgcattttccagggmaaaaatggcttcagacagagaagacggtgattctgtttggccaggactggactcaaattctaagaaaagtaacagtcacaawggagctcctattaattgsacacttcctgtataccaaggtttacccctagctctcatgctcacagctctcccaggggtgggtattattatggatccattttagagatgaggacactgaggttcagggagaaaaatcacttggcaggaatcagtctcccccaaccagggcagaccagacacactccaatggcaataaccagcccggaggggtttcatctatgctggagatctccccaggcttaggtggggacgtttctccttcctgatttagctttggggagcacagtataccctggtggggacccatgaagatggtgacttcacagacttggtcacatcactgccaggccgcctagggaaatggggtcatctcagatctgtccgggccccaaatgcccaaatggcaaggccctcttggacagggagcggacagtgtatgtgctgagctgggaatgaggccttagacccttttgttgtgcacactgagtctgtgtgcatcctgtagggtgtgttacctgggcaggtgtgctttcactgtccccattccctgctgagagcatgaattcttctgtctgttttgcccatgggtccggattcctctctggctttctgctgtgcctgatgtcacttggggactcccacagtctagggggggttcttgatttccccagagctatggtgacccactcaggggaaaagcaactggaggtatctatctcagcaccacaccatcacgtttcccctccctggatgaggcctgctgcttattataacaatgacaacatcggaaatgctgcttgtggatttctgcaagagaggagatgacaggctttctttgccctcctgctctttgttggattctgcagacccgagatgaggccttgcgtgtgtgggaaagttccctgtggctgggaagactgatggcacagatgaggcaccaaggtgacagctggtgcccctcccactgtaggggtgtgtcgaggcagacttaccagggaccaaggaaaaacccccccttctggggggcatccctaggagcttccagcccaatgacacctgcggccagggcttcaatttgctgaagattaaagtgaaaacaaatatattttaaagttgccatcatctcttcagggcctgttagttcctagcagacacgatgctaagcactctatgctttcgttgggtcccacagagtcttaccagatataacgattatctccattctacagacaaagaactgaggcccagagaagaataaagttgcctgcccagggtcacacagccagagaagtggctgcaggaaaaaaggcacctgctgacagcggtgaatgaagaaaatgagaaagtgaaaggacagctctgagccagaaagtagaaatctggaggtaaacatgaattcgattatacacccatatttgccagtctgggattctgcaaacttctmaagcacctggtagtggcctcctggaggtgtgttgtgaacggttctgcagctgcctctgggctcaacaggaaagagtggtgattgattattgatgtctgccagggcacacagttctgagaagtagcagaacggatgctacaggaatctcctgcccaactctctgaagcaggatatttctctgaatctttctgctccttagcttctccttgcattaaatgagctcagatagagaataacaggttaaagtgccttttgaagaggagagcattttctctgaatgctaattgcacatctggcatttgttaattcagagataaaactcagttctcatggaaaggtagactcccctcaacatacatttatcaggcactgattgtattattgggtatccgccctcaatgagtttggcaaggaagacaattaacttaatgattatttaataattattgttgttctaaatgccttaaatggaaagtacagagggccaagtcccgcccaccacagggcagcctcgccttcctgttgagtatttgattctgatgtggaaaattacttttctgttcacagcccactggaaacgcttgcatggtggctccagtgcctaggagggtgttagaccaccaaagaatgtggacacgtaatataaaagggccaggggggccacgtgtctgcacacaaagctgaaggtggtccctccaccagcaatttgtctatctttgctaattagaagctcatgcctccttctttgmtttttcctgccccacagaggaatcttggccatgctgcctatagcttttggcaaggggcgagggcacgggaaagagaaaacacaaatggcatctggcagggccaagagaggtgcgtgtgaagctggcggagcacgcccagccttcctctccaggctgtgtttagaggtctctctctctccccttggcctgagcaccctccccactgccgggtgaaaggagccacagggcgtcacagttgcctcccctgttcraagctggcgccgggacaggcagtggggctctgtttggaatatatgctcttcatcagacractctgaaacaatcaccctttctggcccgagaggaggaaggcacctctgaggccagcgcttcccccagtgcaaacagcgacccagcctgcccagtcctgctttcaactttgttgcttttgcaaatacggtcctgggtcctatttcccacatccctgcagccaggtcccgcctgcctcctgggggcatggcctgctccagtgcccaggccaggacgcaggaagccagccccttcatcttccagaaaagcagtgggcgggaatggggatgagcaatctgcgaaacggagcaggccacagtcagggtggaagaaaacgagggaagactgagaaacagtgggactgaaacaagcagagactcaggccctgggtgctgggacccacgtggctgagcaactggtcttcacaacatttatccccacctcacctccctaactcctcctcaatccccagacagcagctgacaagtcacgtctttagaggagactttcctgtcccccagggaggggactcccaaaccccctgcactggaagtctctgctgaaggtcagtcttccccttggaaaggactggcagctccatgaggacagggccctcattcctcttgtgcactctgtccccagccacagcaatgaaggaacaaagccagagaaagagagagggagggaggaaggcaggtagcctggcttctcccactaaggatggcccctggtggtaggcacaagagcagctccaaagatgtctatgtcttcgccctgatccccagaacctgggaatgtgccatctgacatggcagaagagacgttgcagatgtggttccattaaggaccttgagatgggagattctcccagattgtcgagttggtcccaatgaaagaggaaggcaaagggtcagagagaggctgggagatggtacacaggtggctctgaagatggaggaaggggccaagaagccaaggaatgcaggtggcctctagaagctgaaaaaggcatgggaagagattctgtcccctagaacctctggagaaaacatcctaacatagcccacctaacatagcccagggggatctgttttggatttctgacctccaggactgtaagatgattgatctgtgtggttttcagccactgggtttgaaggaacatgtcacagaggccacaggaaaagaacatccccactacacacaggataccctcgggaaccaccagccagcccttatcagcccaagtgagccgacgtcagagacaggcagacaactaccaatgagcacagagttctggcttccttccactgccacgtatggggaggattccaactccctgcccccttgcagccaggccaccgctacacaactgggcctggacagtcagatgtcagaggatgtcacacaagtccctcctaaagccaaaggatgcagctgccagcgctgggctccccagtcctccctgcccctgccgccgaggctgcagagtcaccaggtggaaggaccccaccagccagggcccccctgcacactgccggtggggaacagcgtccatggtgactgagcaagaacaaagttgtttcaagtccctggaccggggagtctttgtcacagcagcagagcctcacccatctgaggatgcatggggaactgtctatgggagcaggagctgtcacccacatgcatccaggggaactgtccacaacaggggcctcagccacctctggaagcagaggccaccttggacacagacccctatgatgtccccagggccctgtgacaatttccaccttggatgggggaagtttgccttagtcaccaaatgactgtgagatgaaatcacttcttccagacagtgtggagagaaaacggaagacagagcaggttcccacagctcccacatactgcacacggccccagtgtgtctttgaggcacacactgcagccacctacagccacacactgacatggctggcccgacgtggtcctctgtgcttccttcctcaggaccccaaatgttttttcatttytctgcttctcagccaggtcccatstgccatgtctgtggctgggattccaggaagccaatggatattttcagctttattgtcccatttgtcacttgctaattagctagaagtgactaatcagaaaacagttgggaggcagaggaaatccccccattttcctggcttttggttgcccatggttactcagaaccctctgggtgtgtgtgatggaactggggtgtgtgatgaaactggggtgtgtgtgatggaactggggtgcgtgtgatggaactggggtacgtgtgatagaactgggacatatgtgatggaactggggtgtgtgtgatggaactggggtgcgtgtgatggaactgggatatatgtgatggaactggggtgcgtgtgacgggactggggtgcgtgtgacgggactggggtgcgtgtgacgggactggggtgcgtgtgatgaactggggtgcgtgtgacgggactggggtgcgtgtgacgggactggggtgcgtgtgacgggactggggtgtgtgtgacggaactgggatatatgtgacggaactggggtgcatgtgacggaactggggtgtgtgtgatggaactggggtgtgtgtgatggaactggggtgtgtgtgatggaactggggagggcacagaatggggttaggactttcttcatcctctcctgggtgtaaggagaatctatgtgctgtaaccaggcatcacttcagaatgacagtgctgtggtcaccagtgggcaaaagccaaggtcaccaaagcccctgacttcagccttctagtagtttctaattgatcaggtagattccagaagcacaaacagctccactgggtcctcctggtctatcctagcaatagcagccatgtgaccccaggccacacctagagcacagagggtggaagccacatagacattctttgacgggataagacctgtcaacaccatcctgcccartgctgccaaggtttcccagccaagagtgggaggggggcatgagcagaaagaagcaactaaagccctgcgaccctcctgcacctccatggacagggccagaccttcccaaagctgggagggcatgccatcactgactgccacctaaggcaggccccagccacacacacacctatgacccatgaccttcaatgccactccacaccagtgctgttccttattctcccatttcacggatgagaagactgaggctcagagagcttgcatgaccagcctcagatcatgcaatgagtaactggcaaagctgggtattaaattcaggtctctctgtatccactgtggaacagtaaggaaagaaggagtgctaccgagggcatgggcagggtgctcagtgtgtactgccttcgtcctacagccataggggtggggtgaaatcacatcacataggcacacgcacaataattctgacacacatgtagatgtgcacacatttgcccacgcacacgggtgagcgcatttaaatatgcacatgggcacttggacggcacaggcttgtgtgcacatacacacacacgcaaatgcacaagcatgtacacacagcacactgcacacacacattcaaatacacatgtacaaacatacacactggcatatgcacgcgcgcgtgcacacacacatttgcctggtttctccacacgggaagagaacgcgcagttgccttcagaggaaccagccagcaccctgtgccctgctggggcacccaggccctgctctgggctcggtctgcccagcttaccaggtctagcaaaggccagtccttgctgcctgtgtcctttaggggcgatttcatcatgaatggtacaatttccaaagacaaataaataaagaggaggtctcagccccgcctctcaggaccactggcatttcactcagggccgcttcttcaatatcctccgccccccgcccccaacacacacagagcccagccatgaaaatcccctacatgggacagtttcctggggcacgtacagcactccagggctagcaaggaaaagtggcagctatctgcccaaggagaatttcccaacggccctcggctgctggctcctgacctcatgggtgacaaagtccaatgaagaaacagcagatgtgaaaccaacggccccccatttgcaagcccggcattttccagggtaaggttctatcgaatgatttaccagctcaaccaggttaatcattgcctaagaaatacaaatggctccatcaaccctcaggctggtcacccaggtgctcctgcaggttgaccggctccctcctcatcctgcaacctgcacttagggtctggtttgttgactgaataagccagtgacaaatcatcagaaaagcccctttccctgactacctactacacatctggctttgggccacgccctttccacctaagcctgcagtaaaatagatccaggaactgagtacaggcccatgcagacagacctgggttcaaacctcagcaccaatggtccagctgtggtgccaagtcaatcctcgtgtgtgaaatgggttgctatgagaatgaaggagtcaatgtgtaaagcagtggttcccaacggggggcatttggcaatgtccagacacagcttcctttttcctttttgtttttttcagagacagaatcttgctctgtcacccaggctggagtgcagcagcatgatcgtagctcactgcagccttgaactcatggcctcaagcaatcctcctgcctcagcctcccacgtagctaagactacaggcacacaccaccatgcctggcttttttttttctttttttttttgtagaggcatggtctccctatgttgctgaggctggtctccaactcctagcttcaagtgatcctcccacctcagcctcccaaggaactggaattacaggtgcatgccaccacacgtggcctggagacatttttggttgtcacaactggggtggaagggtgctgtgggcatctagtgagtggaggccagggatggtgccaaatgtcctaccatgcccaggacagtgcccgcaataaagactgatccagctggctggtgcctcacactgtaatcccagcactttgggaggcaggtgagacaagaggaccgcttcagctcaggagttcgagaacagcctgaacaacaaaacgagaccccatctctacaaaaactttaaaaattagccaggagtggtggcctgtgcctgtagtcctagctacttaggaggctgagggaggagaatcgcttgagcccaggaagtcgaggctgcagtgcgccatgattgtaccactgcactctagcctgagggacagagggagaccctgtctcaaaaaaaaaaaaaaaaaaaagtgatccatccttagatgtcagtagagctgaggctgaaaaatcatgatgtatatactacaatgcttgggtcaaggtaagccctagataaatgccagccgctgtaatgatctggaagttgttccaacagctttacagcatgacatgattgccggcgtgctgcagaggaggctgggatcagaggctgcgagttgctcgggtgacaggaagagcagagctgaagaggcctgcctggctccctgggcattcctttgttgccacagcacctggccctggggcacaagctggtcccaggccaagggtcccagtgtccaatttcggtgtctgccaaattccccctcactgccccacaactgtgagccagcctctccaattcttcttcatcttgcacttccccaaagggaagaggggccatttcctgaagtgttttcttgggtacactgaactaacggacactcaatctggaccctgcaggcttctgaggagatcccttccttcctcctcctcctcctcctcctcccccgcttcccaccctccacctgcaaaccctcgcttttgcctgaaacggtaagtttgtctccaaggcccagctacccctctgagcaaggtgtccagccctgaccccgcaaaccaggccctcctctgaactggttgtcactggctttgggaccctctgctcagcgtgcccacagcaagagatggcctgcaaagaccctctatctgactggaagggccagcagggagcctggagcgggggtctttctgcagagatggcagagcatctgcaggagctggtctgtgtccccctccagagtcaccctcgctgcacacaccccatgccctcggccacataaacatgacatggtctacgacccagccgcgctgaaccccttccgtctctctttctggaggccaggccttgacatatgtgcttccctctaccagatatgctatccctctcctcctctgccccagatcctcctcacttgacttaaacaccattgaaacctccctgcctccgggagcccaggcatggctcggccatcccacatctgtgtgcccacatcccagcccagactgycctgtactgtcacagaatatgtgccggtctttaataccgcaaggctgtgcactcccgggggagtggcctttgcagcccagcaccatccagggagctctcgcgatgcagggaatgttctacatcggcactctccagtacaagagctgttcgccacgcgtggctacggagcactgaagtgtggctacgtgcctcacaagctgaatttttactttggtctaattttaattcaatgtaaatagccatacatggcagcggctactcttccagccagcacaggtctagagggatgtctagctcccatccagtgctccacaccccctgaacaagagaatgaatgaatgatgagtgaacagcacttggttctcaccctcctttctcaccccgcacgataatcatctgacttcaattttctccacgaggccgcagctacctgcaggcaggagacacacaactgtgttcgctcattgctgtaacctgtgctttcttcggttcctgggacacagaccctcagtaactattagttagatgaattaatgggtgaatgaatgaaccgcctgcaactgagagcctcttctccttccccaccaagcctcaggaaaactgtcatgaaaaggaaaactccctctgggtggatttctgagtgcacctccagcccagttcatcctcttgctaaagggaccgccgccctacatgctggctctgtcctgcctggcattgagagggagcttctgccgccggcgaacaaggcatccttctccatgccttcttcctgctctcccaggacaccatgggagaagtagggcaagtctgtcttctcttgactcagagaaaaggatcgggattcctcatttccctgggctgccattccctgcctcctggccccagcagcaggatgcccccacgaggtttcaggagacacgataactcrtaagaaccagggtgaatttgagagtctattataaatcaaatgcctttcatcctcgactgctggctgtgatgttctccaacactgctattcacagcgagcgccatttgcgttttccccacccaccgccccgtcccacttccttctgatgtaggtcacggtggattctccctgagttcactagatctacctgcagtgagggggtgacaccgcttgaagcaaatttagcaattctcttacaggcatgtgggaatcccgtgctcgctcattcagccgagacccagacttgtactgtgtgtggaaaatcctgtgcaaagaccctggggcccacgggagggccggcaggaaggcttctatgcccaggtaagctgggcgtttggagcttgaaaaccaccatcatttggaaacaatgctgaggagggttcggattctagaacagaagcagatcagtcaagtagtaacttgccctagttttaccgtgagcatcgcaggtccgccccgtgctgtgtggtctggaccaagtcacttctctccagcctcatgcttccatctgtagatggaggaggatgctggagctcgccacataagctgtgtggattaaatgccattcatagagcactgagcacagggactcttcacacaggagacgctcagtaaacgttattactgatgttgtcactgttgtgtgcacggtcccttttagctacacaatataagcatcatcttagtacagaacctaagcttctgctccttcactgcgagaagcatcaagcacccaccctcttccaggcaccatgctaggcgctggtgatacaaggacgggttcgtctgcaggacttctctagaagcgcagcaaatcctgagataacgaatgcattaaatcaaacaccacagtacctgtggtcagcctgtctcaaaggatggaagaagctaaggcaccctgcagggaggagggcaggcctgggagagtttcgcaccagtatgagctgagcagggaaagcggaaaggggaaccctggctgtgggcctggcatcttctaggagtctaggagtttacaagatcatgggctcttttgggcaacagcaaaaggtcgtttgtggctggagcacagggtgtctggtaaggaactggcaggagatgaaaatgaaaagattgagtctggccccaatttggcagccttctctgccaaaaaaatgaggggttgaactttgtcctgtggacaacagaagggttttaagtaccactcataaagttactcaaccccagaaaccggaagcagagccctccatgcacgcacacacatggcatacacacatctcacacatacaccctctccacacacacgtgcacacacgcaacactccacacatacacaaatacacgcacacacacmcatgcacatatacacacaacattccacaaacatatacacacatacaaatacccatacaccacacatattcaaacatacacacacacacacaggcacacacacatgcacacatgcacccctgtggtggtcctggcaccctgcactggacccagagcagaaatagaagtccttaggctccaagatatagcaataaggaggtggcctgagagccacacagaggccgggaaggtcagcggcaggctgtttggagaaggaaatatttaaaaacaagaggtttcctgtgtgcgcgcacacacacacacacacttaccccctgaggatgagacagagtcctatcagtaattctttcaaaataatgccctcacgtgttcacgccacacacatagcaccaaagagactttgcaattaaaaaattgagtatttttcacttgcatgaccctccagcctcggtctcatttgagagctgaagccacccctctgcccagcacccacattgaaaagggatgcgtgcacatgacttgagtctgtctccgtgagttcacactcactgtgcactaggtgcatgtggaaccccacaaatgatggataattggggcggggggacccctgcgtgtccagcgtttgcccttccttctctctctcctttcccctcttctgggctgatgaactgttttctaatgggaatgggtaccccaaggaggctcacaatggagatttctcatgccaggtggatgcaataaaaatgtgctaaagctccttaaaatagctgtgttctcccaagtaagataaaccttttcccgataatacgattcagacctgcaattagctcagtaaaccctcttctttagacagaaagtagaaggtgaaatggaaggcatttcaggggtcatagctggactagtggaagttgattttttaaacaatgactcaaacttagttatctccttggaaggaaagactgcctgagccaaataaaaatttctctttgtttcagaaaattaaatccccatcctttgttaggcctgatatagaagccaggcactgttctaagatagtagcttgttttatcctcaccttagctctaggtggggaaactgaggaacggggggaagtgactagcccatggtcatagataaaagccaggaattgaacacaggctgtctggctccaagggtcagatcttacccccacgaccctgaccccccttcctttcagcgccctcagtcctgctgctctgctggaaaagggaggtcacaggctggcccaggacgcagcagggagccctgggcggccctgaacttcaatgtggggacactagccaacgcaacgccttggcaataagcagccagctacaggggtgggtatgattgtttctgaatgttctcacgggaccaacaaagagcgctctccggctgccgtgtagcactggacatgattagggaagggaggagagggtgtcttccagccaggaagctggcccacaggtgtcactttgccatctcagaaccacacagtcttcagattcccaaagtcagacccagcccacctctcagatgcgctcacctggagcgaagcaacttcaaggccacacagcaagccatcagcagaaaagcagtgacacacagtgccaccagccaggcctgggcccttgccacctcatgggctccagcgggcagggctcagaccagcaccccgtggaacggactggctcccaagcggcctctcgctaggcctggggcagaattcacaatcccccagagagtgaagccacaagtcaagctacatactgctgcaatgtaaaccgttccttctctctgttcttccgtgctagggacggtgctatggattgtatgtttgtgcctcccggaaattcctctgttgaacccccgaccctgcaatgtgatggtatgtggaggtggggcctttgggaggtgattagggtttgaggaggtcatgaagttggggcccccatgacrggataaatgtcctcataagaagagaggccagagtgctctctttctctaccatgtgaggacacagtgagaaggtggctgtctgcaagccaggaagagggccctcacccaaacccagccaggccagcaccttgacctggaactctgaaacaataaatgcctgtggtttaagccacccagtctatggtgttttgttatggcagcccaatctaacacagatggagaatacgaccctcagatgaaggtccagaaaaacacactcctgcagaccctattcccagatgcaggccagtttcacctgcctctcaagatcacgcacgccatgctaccaatctcccaacctacgccatgctacaaatctcccaccctcggtgcctcacagagcatacaactgggactcaagaaatgcctgcgtgacaaacagatctaagcactggtggggtgtccgagcatttaatagttggcccccattttaattctcattcacaggtaaaagacttggctcccattttcacagagctccccgcctaggagtcttcaacttcaaaatcaaccaactcctgctgcttttaaaatttggaatgccacacccagcaagtctgcctctcagcatctactgagagtcccaggtaagacagcttgttcctgggctgtgtttaagagtgaaaagcgagaaagggccttcacatccatcgacccagggtggggcacgaccattttatggaatgtgatgtggcagctgaacagaataaggtcagtctttggttattagaaccagtgactgagtggtgaacccaaaggagtccattaaaggagaaaattaaaacatgraatagacatttcgtttttgctaaaagtatgtaaaggtgtatatgttctccatcttttgtagtagagatgaggctttccctttgcagacggcctctgggtcgttttcacataaacgcatgcctgatgcctgattgacaagctgcagcttctgtttctctgaagaccccctcaaggctgtctgatcattacagctttttcctgttcttttacagttctctcacccacaacatcggttgttttgtagggacactccactccactgagactttcttaagcattccattcagctttcataaagacagccgttctctcttcacgctcatatttcataagtttatgtaatcttcaaataaactgtgtaaatccagtaacacctctcaccagcgtaaccaggtttggtaaacaaacagctcaactcatggaagaagcgtgtgagggtcccaagagcatcctaccagcctggggcaccgatcaggggctggagtggttagactggctgggcctatgaaatcacagccctctgccactgaaagttacaggttacacggctccaccgtgcacatctccaaaacacatctccaaaaagactcactgagtgaagaagtaaactgcagaaagatctatatgacaggattccttttatgtttaaataaagaaactcacataaaattataccatatactttctatagaaccatctgtttgaatgtaaatataaaggaaaaaaccctagaaggatgggatatggggtaggaacagggtcgggggtggaggaaggggaacttcagacttttctgttaaggcactgcttttcacaagaataatatacttatatatatagtacataattgaattgtgtttatttagtcatcaagacttaacagaggggttcagcacccaaaacaaataagcccacggactgataagtatgcaacttaaaaaaaaaaaaaaggccgggtgcagtggctcacacctgtaatcccagcactttgggaagcagacgtgggtggatcatgaggtcaggagatcaagaccatcctggctaacacggtgaaaccctgtctctactaaaaatacaaaaaattagccaggcgtggtggcacaagcctgaagtcccagctactcgggaggctgaggcaggagcatcgcttgaacctgggaggcggaggctgcagtaagccgagatcgcgccactgcactccagcttgggcaacagaccgagactctgtctcataacaaaaacaaacacacacacacacacacacacacacacacacacacacacactcaaaacaagacayatttaactggyttcaaagaagaggccaggccaggtgcrgtggctcacgcctgtaatcccaacactttgggaggccgaggcaggagaggatcacttgagcccaggagttcaagccctgcctgggcaatggcaaaaacccatctctacaaaaaatacaaaaattagctgggcgaggtggtttgtgcctgtagtctcagctactcgggaggctgaggcaggagaatcacttgagcctgggaggtcaaggctgcagtgagccrtgattgtgcccgtgtactccagcctgggcaacaaagtgagactcagccagggtgagcaagcccatctcacggatcagaggcggcacaggatggagctctccaacaggcaagactaaggaaagccggggactcatcaaatcagtgtgctctgacgagacacaaaaaggccagcgatgctggtcactaagctgccctggtgagcaagtactttcggcccttgcttcgtctttccgtttggatggatgtgctccacgtctgacaaattcacaatgaagtgacactaaaaacgacctttcaaggtggctgagattactgtgcaaattagagaactactttcggcttcrttcactgccatcgtttgtttctgtcactcattcaccaataacatggtggtccctgctacatccaggcccagtgctcagggctgggggcagwgttgtacacacggagcacgtagagagacataaagcaaccaatggacagttggttattatttcatgtaaattgtgctatgaatcacatgctatgaactgtgcattcataaagagaatgactgtcctgtggtgggggaatggtcatggaaggtccagtggaggtggcactgaagatgaggcggagggaattaggaatgartgagtgaaggcaggagggaagcttagtcttgctcttagcaggaactgcgggcctcaggtggtagggaggaggctccagctgagaaaaggaaacaggacgcagggtaggagcagttaaggagctccgaggtgcagtaagagtgggagaggcagggccagacagaaacatacctagccctgtagtcctgatcagaacaaggagtgtttcctaaaagcaacagcgaagcatgaaggattcttgagcagagatgtggagtgcccttctctcactcccagcagaaaacaatgattgagcagatctgtgcttcaaacggcccttgtgtgcatccatccccgcagggcctgcagacattggtttcaagaccccctgaacagccagacattgtgcagctgccctggcccatcatcctccacccccaaggacgcctggttagaaccttctcaccattccgctcaaaccttcagactgccgggctgatggaaacattcccaaaatgtttttctgtgcaattgagatgccggcctggmaaatccmtgctgcaagcatttctttctcacaggaggctacacccaactgtttcgctgcaagattctgcgtcacaaaagggatatccccagctaatatgacattcaagcgaatggagaatctgagctgcctgaattcagggtaatcggcccatcggtgtgtgctcttcctcggcactatctaatcgaattttctgtgtgcatgaatataaatactgttgtctgacccacagtgaacttgtaaatagcctgattatatcaaccttagtagatcaggtttccacaaacagatggacaccgttcattttattttaatttaaaatgaacacaatttccactggatacagataaaattaatgaccttagaatcaacttgcctgtgaaaaaaaaacctgataatcatattattgcccgagaagatcataacaaagtcttggtttggaatatcacgtgctattttgaacttaatgcctttttctatttccttggaatgagaatatcctgacacattcttcagggtggactcaacatcagtgtgacttggcttaaatggcagaggatagatcaccaccccaaaattactgaaaccaagagatccacaggatcaagaccagaccaagaaaatcttataaaatggtaatcaaatcaacttcctatcaaaaccaggctcttcttaaattgcagatatcaacttactcagctcgcgaagtaagaacatggagacayaggctggccccaaacaaatcccctgagaaaataaaaagctaacccacagcacattcactaatgatgatgaagctgttttggaccacatttcaactttgttccaacaaccccttmgagtgaaattcggcagccttctctcagtgtttatgcaactgggccactgcaggcaggagccaccgccgggggccgcctatgtcttaagtgtctctactttatgagtttccatgggcaggcagcccatgcttatgggtgtcgctctgagaatgagacggactcaggccttagcccctcttgactccctaccacttccctaatctggagcaagtcattttacttgcctgagcctcagttcccccatctaagaatgkgtacaatgatagcagctacctcacagggttacagggggatgcaacgagactgtggtgtgtgtgtaatggaccaggcacaatgtcttctgcagggcaagcccctggtgagtggaaacgatgattgytattgttctgtccggaatgccgggtctcttcccacccgcctcggcctgacggccaagactctgcacccagggctctctccaccctctgtgagttccccgacaccttcagctgacccttgccctgcaccccacgcatgcagcccccaccaccccaatctcttgctgccacttcataccacagggtgtttccctgctcaaagcgggaggctcctgaaatcctcatggctaatcctccactgaactttcaccaaactcccatttggggcatttcttttcttttcttttctttcaacagagatgggcgtctcactatatggaccaggctggtctcgaactcctggccttaagcgatcctcccatctcagcttctcaaagtgctggggttacaggagtgagccaccgtgcccagcctctatttgggtctttttttttttttttttttttttttgkcttttttttggagacggagtctctctctgtcacccaagctggagtacggtggtgcaatcttggctcagagcgacctctgcctcccaggttcaagcaattctcctgtctcagcctcccaagtggctgcaactacaggtgcgtgccaccatgcctggctaatttttgtatttttagtagagacagggttttaccatgttggccagcctggtcttgaactcctggcctcaagtgatccgcccacctcggcctcccaaagtgccggcattacaggtgtgagccaccgcccccagcctatatggggcgtttctatccaactttatttctcaggatgccccgacactccaggccaaggcaggctcacacgtgaacattgtgacggccaggacggtgagcaggggggaccctgctctgagtctgtagcccagttctgccatgactggtcctgaagtttccagcaacttactcttaaagtcacactaatatgtcatgggaaaaatgccagacaaaatcatacatgccaaacaactgcacagatgtggagttcacaagcgggcaaaaccattagacactgatacaagccaggagagcagttacccctggggagagcaacggctggcgggaggtgcagggcagggggtggggtactgctcagtatgttgtctcttgatttgggcgctggttacacgtgcgtgctgagttggcaaaaattcactgagctgtacgtgtgcatgcttccggatgtatgtgacgcacgtatgtttctataacaacattttactggaaaaaaaaaagacaagcagtgcctcagtttcctcatctgaaaaatgagaggtattaacacctaccacaaaggctggtgctgttgtccctcggcctcctgctctaaataagttctacccacttcatcaaaggtcatgaaccaggtgtccacctgaggtagccaaccctaattctgcatttatagaaagaaggttccggagacgggttgtgctacaatgtgaatatacttaacactattgatctgcacacttaaaaatggttaggacagggcattatgttctgtgtatcttatcaccatttttttaaaaagatgaactataagagaatattcttatcctgacgatcaatttataatgcccccgagttaatgacaggtgagagaggtaccgaatagcaagcacacaggccacactgggtccatccagggcacaccctccctgcatggcgcaaggtaagatgaagacttccaattgccacagcaaggcaaggagcactcccaagtacctttggtcatcctcacaacaagttccaggtcaccctcagcaagctggaagccttcacaccaaacaagcctctcctcgtgaaattttaataattaacacttacctgatttcaaaggttttacagggaaattaatcttcatactggctggttatggctgctctgcaaagccaggggtcgggggatgcttcgggtccctgcttatgagtttacactgcaaacagggatcacatcagcccacagcacacagcagacaagaggtcccttgtcaccgaggttccctgggccctcaggtgacacgactctctctgggaggagatccaagatgctctcgccttgaagtcagcgtggacaattttctcaaaaacctggaacatgtaaactgacctggagtcctaggagcttgtgggaatgctcaagtgcaaaactttctatcactgtaacagcttgtcagccagttcagagtctggggtgacctcggtaatttatggtgggaggggaaggtgggtaacagggtccaacatctgtaaacgagtgtctgaacactcaagggcaactgatcaccaaactgactgatgcttcaaatgaggacgtaccttacaaaaagtcaacatcaatggaaataataataattgtattattactaatagattaagggctttttctatgccaggcacagtactacaaaattcacgtgtctgatctcattcttgctagtagcttcatgcagctttttctgactagctccacttagagaaagaacgtacaacagctgtttaaaaaaaaaaaaaaaaagcattccagtgctataccatgagcagaagtgacaggaaagaagcacagggaagcatcatgagacacagcccacgagaaggttaaatacactggaattttatgcatgtgagattctcagacagcatttggctgtgtgaccttgggcaggttgcttgacctctctggtgcctcagttccttcatctttaaaaggagagggctcaattttaaaaaaattatgggccacgtggtggctcacacctgtaatgccagcactttgggaggttgaggcaggcagatcactaggtcaggagatcgagaccatcctggctaacacagtgaaaccccgtctctactaaaagtacaaaaaattagctgggcatggtggcaggtgcctggagtcccagctactcaggaggctgaggcaggagaatggcakgaacccgggaggcagagcttagagtgagccgagatcacgcctctgcactccagcctgggagacagagcaagactccgtctcaaaaaacaaacaaacaaaacactatgaagctggaataaaacagcacagtggcagagcaaggacagtatatcagtggtaactaacagaaagcctaaaaggaaacttagcacatatttgaaaaatttagtatctgataatagcaatattttaaagcaatgggaaaagggcacactattgagtgaatgataacagacaatccattaactatttggagggaaggaatagcattattccctgcctcacaccttataccaaaaatttatcctgggtgtaggtgcttagttctaggttaattttacagttctatagttttgttttttttttatggggaatgtttgctcaatcttaaaatttggaagaactctctaagccacgaagacactaattaagaagtcactaattaagacactcaactctgaccacagaaaaatatataacttctatatatcaataaatacctcaaacaaaatcaagagactagaaaaacaaaaaaagttggagagtaataactgctacataaatgatttgaaaaaggatgaacagttttctatatttcaaaagaaacccttacaatctttttttaaagacacatgccataattgaaaataaaacacacaaagaatataaacaacttgcggagcaaatgcaaacagtcaacaaacccataaaatgagggcagtgaatgaggtttaatggaacaaatcctgactgagggccactgggcaacattcacaattttaaagagctcagagtccactgctattgggtatgtgtggccttgctgtgtggtcaaaagggtgcattcctgaaagtcctggctttgaaacgcagcctggccacaggctgcccgggtgcaggaaccagtgtggcccagctccagcgtggagatgctctgacccacaggcagccgtggtagccgtgagcagtagctctcacggggccctctcctgccctgcctggaaccagatggtggagagaagaaaatgctcatctctgcgcccttccttcccatctgcggycacctcagctgcccagaagatgctcaaggtgatggagatggaaggaaagggcaggagaggttcactgcctccttctgactagtgttccctgcggccctgcatggactccaccccggtcatgctctcagatctgctagtrcagccctctgattgtaaaaataaagcacataggccaggcgcggtggctcatgcctgtaatcccagcacttagggaggcagaggcaggtggactgcctgagctcaggagtttgtgaccagcctgggcaacacggtgaaaccctgtctctactaaaatacaaaaaattagctgggcatggcggcacgtgcatatagtcccagctactctggaggctgagacaggagaactgcttgaacccgggagacggaggctgcagtgagccaagatcacaccactgaatgccagcctgggtgacaamaagagactccgtctcaaaaaaataaaaataaaaataaaaacaataaagcacataatgacaataatataaaaaatcatgcacataaccttagctaccatgtactgagtggctaccatgtacttaacaggcaaactttattccaatggacaaagtgagtgctgcaaagtttgactgactgatgattcattcattcgttcactcactcaaaactatgtactgagcatctagcaggtgccaggccctgttctaaatgctggggatacagtcatggggaaaaaacaggcaaacccctgcctttctagtgggrtggaataataaacaaaataagtaagaaacrcgtggtctgtcagatgataacatatgctcaggagaaaaaaacgtaagtcagggaacgagaaataaaaaattgtgggagtgggtgccaactttttggatggatggaatgatcaaggacagcccaaggaggtgacttctgasaggagacaggagggaagcgagggagcgtgtggtgtgggtgtttagacaacaggcatcccaggcagaggaagcagtcagggcaaaggcctygaggcacagcaggcttggcgtgtccaaggaggcagcccagatcacaccatcagtaagggagggaggctttcacttgccaygctgtctgggcagasaggcgcrggaggcaacacggtgtgtccaaggtcacacagttaatcattgagagatcagccaagcatggcacactggagtcagggcacagagctgcatcccagggagtcacacccctccacatcccaacactctgatgtcacacctccaccttccttggaggctcctggaggaaaggcccaggtgacagctcttccctggcaccaggtgggtctcctggcttcgcctcccgctgcctcgggacctgggaaaggttctcccgactcagctgctgsgcaagccraggcctcctgtggtggcgagactgagcgagggcaacagcgctagtccctggggaggctcagggcgacccccgggattctaaaggtacttagagactgcgaataagttcagggatttatctgttgggctcaatgtattggcctggcaggaaaggtcattcaggaaatttttcaaaattagtgatagtcaatcttctaaaagacaattatatctgtgcgtatacctcctgcatcagcgtgtggaacatacacgcacacgcaggtgcacacacacttctacctaacacacgtccgaatgtgaacaccacttgttcaacttcgacatctaatgatgaggtgatccgtggccagcgtgaagatacgcagaaagcatggactcctgagccctgggactgcagtctgaaagcagcgraaacacttcggaccygggcaccttgcgcacctcgcttctttagctgtccttggcctcgatttccttatctgtagagtggagctcaccagattgctaggagaactacagaataaagcgcccgacttagtgcctgacatccagaagaagmgccatgaaatggaagctatcaaatcgcaggacagttttagaagtatgtgcagtgcaatcatttcatttagaagacaaaccaaacccatgtaagcaaatttatgagccatttctaaatacaaatagcaatggaggtgagataatcaacaactagccccaactagtaatttgcaacagaaatgaatgtttcttagtcaatcatcttctgtttcccccttcctggtggtgacatgrtttgaatcagccagtctgggaaaagccatgacacacgggttgacctcttgaaagcagttaacttggaaggaaaaggaatgattcttaaacccagtgaacccagttctccaagcaaaggtcgggcggcaggcccaggcttgcccctcgaggtgtggcccgagcctcctcaagccatgtgagcacgtcacagagatgcctcaagtgtcccaacttcctacttggtcagcactaaccatgcgggtagagacggcctggtgtgaaaaacaaaacacgggtagggtcgtagaatcgagactggactgagggcattgatgtcccaagggcctcctgaacaacagaccataaaccaggtggcctgcatatcagcaatgtgctttcttaaagttctggaggctgagagtcctaagtcaagatgtcaacagggttgatttcctccggaggctctgaggcaggatctgctccacacctctctcagcttctggggcttctggggctgccaaaatccttggcattccttggctagcagctgaatctgtctctgctgtcacacggtgctcgtccctgtgtgtctctctgtgtctaagtttccctcatcttttacggacacagtcactggatttgggcccactctcctccagcatgacctcccgcatgacctccagcatgatcttaacttggtcgcatctgcaaagtccctatttccaaagaaggtcatgctcacaggtacagagactacagcgtaaacgtgccttttgaaggctacagttcaacccataacaatgacgatcccagaagacatcagaacaagctcaggctagctggtggctacgttcgacagttcagcaggagaagggcgggtgggctgagtactcagggctcgcttttccaattattctccctgggacggtagagaaatttcttttttatgcagaagaagctgaactgatcgaagataatgtatgtaaaagagggtacgtgcctagcacacaaatgccacttagtgatgccaccttggatggatctggaggaggctcgaagctctgayactcggtgacatttccactacccggtgacacagaagcctcggaggtagcagccacgcgggcacccagctaagggagagatgtgggaggcgggcgggagaggctctgctctgccttgggaagcggtgaggaaagctgaataaaggcgcaggcttttgtgagcagaggcaagagactcgagtgaactgccaggaaagtcagctgccaggggtgccaggtgagtcactgactcagacgggctacaccgatcccacaaaagacacgtcctcccaccaagagaaatctgtttgactttagaaaagtacaggttacagtgatactcactacacaccccaccttgcagcgcaacagaggcgagacgggaggaacaggaactgcacctaggtccctgagggatccggatccacctttactgggattttatttcccccaaaagcaggactctactcaaatcacattcgcctggggtaataaagtatcagaatcctctagtaagaaggctggagcctcataagacgtgggaccctggtaggaatggatcagattctgtgactttccttgatcctgaatgagtctgattttccccctgggcttaattttaacaacgaatgatctatagagataaatttatagcggcctgactgaaagatggactctttgagaaggttttcacgcagtgatgatggtcttactgtccccagccaaaaaccctatcctctcactgttaatgcggaccctcgtacaaaggttttcagatgtccctgcacctgcccatgtataaggttcctatggctgctcaaatggccacacacgcaatggcttcttctcttacagttcttgaggtcagagcccaacacggcctcacaaggctaaaatcaaggtgtgggcagggctggctccttctggagcctccagaggagaaggagtatccttgcccgttctccaaggctgcctgcattccttggctggtggctccttcctccatcttaaagccgggaattgcaaggckgctctctgcctccgcacatctcctcctcagactcagactctcccacctccctctgtccctggtagggacccctgtgatgacactggcccccctggataatccagggtaacctccccatcccaagctcctcaacccagtctcctctgcggaatcctcttcatcctgcaggcagcatattccatttctggggagtaggacatgggcatctttgrgggcccatgagtctgtccaccacacagatctcactgccccacagtttcacagcccatctcctcgaagaccaacaagccccaaccaaactgctgacagatccagagccatctatgtcacccagcccctcacactctgcccacccacactcggtgactcggggctcactgagtgtcccaagcatggctaccctctgtatcatgtaccatctgagaaaccatgtgcccccaatctctctctttaccctccctcacgggcccatcccaagatattctcaagatgcagcaatagcattgtgacctccagaaagcttttcttcatcctcccaacctgccctagagacctctctcttcttccccccttatatccgtgtcatgctgcattatgaataactatttaatcatttgtcacagtatgggggaatacttcaaaggcaaggaccacagctcattcatctgtatctagccaaggcctgatttacaatgggtaaagccatcagtaagtgatggatgaagggataaagggatgggcggatagatggagggatgggtgggtggatggacgggtgggtgcatggactggtaggcaaacaaactgaaggagaggagaaaggaagggagggagcatgggtgagtgcctaacaaaaaaatcgcgctcaccaaatatttgttgagtgaaagcaaggagatagatgatgatggcagtaaagcagggcgagcaggcatgaattaggaccatgctctatgaccttaattctatgtttctttcatgccattgaaataactcagctgagcagttaacaacatgaggaagaagctcaagacttgggcatcatttgtgctaagtcagagagggaagccccagcaagcaggtagctgtgacctcaaaccaatgaccaggaggattctaggaatagttaccagaattagccaaaactcaatgaactattttaatttcccaggctgactcaaaagtacatctctctgggaccagcaaaaagtgtaagaacttctaccaggccaggaaccagctccacgctccacctctggtcatatcaattcaatgcatgagcacagcttcaaggtactcccaacctcactccgggcccctgtctctggctacacccagcttttaaaaatgtatccagcattcagcatgagaccaatggtggactggggagccacagggtcataggaggaagggccagccttggcattgtttagaatgaaaaaaaaaagtcttcactccaagaccagacaagcgccaatttcaaccatctccttaaaaatactatttttctatgaagttgtcatgaatgtgaaggatatttttctccaacattttattatgaaaaatttcagacttaaagaaaagttgaatactgttatatacccaccaaaatggctaaaatttaaaagactgacaataacaagttggcatagatatgaagcaaccagaaatcacccatactgctcctgggaatgtaaactggtacaaccactttggaaaacaggttggttttctctacaaaaggtgaacctatgcaataccagcgaatggcaactcatgcctaactataagccaacagaatttcatgcacacattcccaaaaaggcatacgcaagagacttcctagcagtattattcataaaagcctaagaaggcaacaacgtgaatgcccaccgtcagtagaatgggatatttttaggataaaatgtgatccagcaacaaaaataaataaccttcagctctaaacagaatgtagatgaagctcacaaacacatgtggagccaaagaggccagacataaaagaacacgcattgatttgctttctgtaaagttgaagcttctaaaaaaactaaataaacacagacactgtggtcaggagagttatcgcgggggaggaggatgaagggtggtctctgggaaaagtctgaggatgcttccatggtagaaacaaaatccaactgatagcctggtggtaggtccatgagatgggataattcatggagctgttcatttggttgtgtacttttgaaagtaagtaatacttcaataaaaagaaagaagaagaaaagaatggatgaatacccttacasccaccacctagattctacaatgaacrtgtccctgttggtgtttttttctggtatctagctattcctttacccgtccatcaggcattatcattattactgacgataaatgatatttctggcatgcaggctgtgaacccaaaggctcttacacactcagccaacctcccccaccgtgggctcccggccaagccagggtgtgtctgcaaacctcactctccaccatcgtcttgttacccagcaccccctttcctgacacactttgagccaacgagctggagagctgagaaattctgtagcagacaaaaaccaagaaaacacattcctttcaggtccaggcctgcctggcccgcgcgtgttgtctgaactgcaccatcaccctgtttgcaacttctycagaaaccaggccccaaactgcaaagctcacgccctgtgtgctcactcctgggaatccaaacaaactcaaaacatgtccaaagccatccaaggaactgagagaagattcctgctcattataaagcaaaatttctcttcttatattggagtgggtagagagaggctcagggcccttccaaaggaagttgggttgccttccacagagctgcccagaaaccaaacgcaaacctgctcctctggcgggctggggccttcactgtgacccctcccgggggcacctctgcaaggcaagagtgggcttcctaagcttttttgtgccttggaccccttggtagtctggtgaagcctctgggccccttcttagagtaatcttcttaaaagtataaaataaataggaaactgcaaaggaaaggaagctgatcataatgaaaaacagctatcaaaatatcccttaaaatttccaatggagtaacagatcccctctttattaatccatcgtataacaagacctagctgtgggcctgataactactgtaactttggggtactgatgaatgtaatgatattccaagatatccacaacaacaggaatgaaatatgcaaacacccgcgatttctattgatgactaagtcacaggcactgctaacaccactgtgattggtactgcctacagccgtcatggaaacaaatgctaaatttcagttacaggttggtgaccataaagatgtcttttttaaaatgccacatccaagttcacagatcacttgaattctatccaaggacccaaggttgagaattcctggaagtcaggagctttcttttgtcccttttgttttactcctgacgagaaaatgctctctgcacctaggtatagacccaaacaaactgaaagcagggatgcaaaaagatacttatataccaatgttcacagcagcactattctcaaagccaaaacgcagaagcaactgaaatgcaaacggacaaactgaatggacgaacacacacacacacagacacacacacacacacacacacacgtattattagtcaacctttaaacaaaaaaaaggattctgatacatgctacaatatgggtgaaccttgagagcattacgctaagtaaaataagccagtcacaaaaagacaaatcttctgattccactcatacgaggttcctagaggagtcaaatgcatacacacagaaagcagaaaagtgattgccaggggtcgggagtaggcagaatgtggagctatcatttaatgaggacggagtttcagtttgagaagatgacagtgttctggagatggatgatggtggatggtcgcatgacaatatgaatgtactcaacgaactttaacatttaaaaatgattggctaggccagtggcacacatctgtactcccagctacttgagaggctgacggaggagaaccatttgagcccaggagttcctgggcaacatagccatactctgtctcttaaaaaaaatgttttttaagatttaaaatggtaaaccttacgttatatgtatttgaccataataaaaaaaaaattaaggaaataaaaataggggccagaggcagtggctcatgcttgtaatcccagcactgtgggaggccgagatgcacggatcacctgaggtcaggagtttaagaccagcctggccaacatggtgaaaccctgtctctactgaaacacaaaaattagccaggcataatggcgggtgcctgtaaccccagctacttgggaggctgagacatgagaatcgcttcaacctgggagatggtggttrtggggagccgagattgtgccactgcactccagcctgggtggctgagcaagactccgtctcaagaaaaaataaacaaataaaataaaaataaaaaataaatgaataatttaaagaaataaaaataggggccaggcatggtggctcatgcctgtaatcccastactttgggaggccgaggtgggcggatcacttgaggttaggagtttgagaacagcctgtccaacatggtgtaaccccatctctactaaaaatacaatwatcagccaggcatgatgtcatgtgcctgtagtcctagctactaagaggaggctgaggcaggaggatcacttgaacctgggaggtggaggttgcagtgagccaagatagcaacactgcactccagcctgggcagaggaatgagactccatctcaaaaaaaaaaaaaagaaagaaaagaaataaaaatgctccctgcagaacatgggaaggcgcagttactgtcaagaataggaacagcctcacttgtgactgacagctgagtcgctgkgtggctctgagcagggcctgtgccgccaaacccactaatgagctgtgccaccgtgggcaagttacttcacctctctgacctcaatttcggcatctgcaaaatgagggccgtgatgkctgcagctgccataccttgggcaatgatgacgtgcctggcttggcgataagcattttgcagacactgtctcaccaagacttccagataaccccacgagcttagtaggttgtggctaacacgttacagatgacttagttaactcacccaaggtcacctgtctaggacatagcagagccagrctggctgaagaactcagacttataattctctctgtatctctctgtcacttgtagacagtctctgcccctctaagctccagtgggacagacaccatctctgtttcatgtgccatgttacccccagagcccactacagaggaggtgctcaataaacacttgctgagcaattgagagaatccagctctgtctgaccccaatactggcttcctttataagcaatggatcgtggcattacagggtcctgtctttcaggtctcctaatagatgctgtgacaagcctagcacctcacaggtcagagggttccgcatggaacccstgaaagrggcagaggccaagggagccagtttaagagacagaaaaataagcctactccaaggagcacagaaacactgtccacccatgggcacacatacacacgtacaggcacacctggcaaaaacacctacaactcaggagccaggagctgcaaagttctgccggtgtgcaggcgctggcttttagttcaagacgccttracgtttggagggagccaagggatgagctgggtgttacatccaggctcctagctaaaggaagctgtgtctgagcgaggttcagggttacctggtggtgactcagctcaccttcttcctgggggaggagggaggctccaccaggggctacgaggtggttggagaacaggcacggtgctctccagacaaaagatgctgtcctcttggttcttttccagacttcgttctaggccaccatggcttttcgcgggaagggggtttggctgggatctaaatgaggcaaccacggttgggctgrgtgactcgagaatttggatttgtcagactggatgagtcagttgcttggccggggcccaggtaagcttgaggtatcgtgagggaagccctgcttctggagtccaaccaaaatgtgctgggagggtaccagacccaccttgcggccgtgtgactgtgggccccacgtccttctgtgtgacagggggtgagtctgtcccccattcaggcctcgcactcagatggaacaagatggcaaacagggagtgactccacagtaatcaaaagaaatgaactagatattcaggaatcaacggagagatctccaacacatgagcatcgtcggatagggtggaaaaaggcaagctgcaagggaactttaaaaacatacacaaagcaaagcgcggtagctcacacctggaatcccagcactttgggaggccaaggcaggaggatcacttgagcccaggaattcgaggccagtctgggcaacatagcgaagtcctgtctctaccaaaaaattagccagatgtggtgatgcgtgcctgtagtcccagctacttggggggctgaggtgggaggatcacttgagcctcagaggtcaaagctgcggtgagctgtgatcaaaccactgcactccggcctgggtgacagaatgagacactgtctcaaaaaaagaaaaaaaaaccatatacaaagaaatgttatatattgtttatgattatgtgtgtgtgtgtgtaaaaatattttaaatgtgaagatgcacaagggacttacaataagggggtacctggaggtgggtagtaaattagaggtgaatgtcaagtaattataccttttccagtaatgttttatttctttcacttaaaaaaaaggcaaagcaaagaggacaacatastaacaatgctctagtcggggcggtagaaatgcgattttatgatactaatctttgtggcttttgcttcctgtttgcttgtttatttgttaaccaacctggaaggcatcttgacatcagtaggtggtgaagccacatgtcctactgattgggtatgctaaattgtgtgtttattctttttacttttcaaaattcaaaaagaagaaaagyctatcacagtatgcagtgctcactaaatggcacccttctaacaaaaatccaggcccaggcaccccatggctatgccagaagacacccctctggcctctggctacttcaagtgagaaggagaactctactgggcactgcatagaccctcagggagctctgggtgkgcttcagtggatggagcagcactgaagckgtgtccctcctgtgtcaatccaggtgtggycacctggcttagggctctgatgacagggcccaacccaccaatcacactccaggaaacccagtgacatcatcgatcgccaatgggagctcctgatcatcgtgggcgaatcggtgttgccacactgggttgataggattccagctagaagcaaagatgtctgacatttcccttgtcttaggcagtggcagccttatcaagtgtgaatggasaagcagaaacctcatccgtctgcacttggctcctaaatatcagatttactcttaaattgtaacagcacctctgaaatcctgcttatacgcttttcttctcgccttcctggataaaaaggaaacaatattctgtaccctgcatttcactgtatcagacactggcctttcttggagaaattctatctgtaagatataggataccaaaaagacaagggaacactcaggatacctttctcctttccctaatctcggccaactcccaattgtagaaaagtatcttatgtttgaaaacccaactgaccccctaaactggccattttgaaatctacaaggtatcataggagcttcaaaagccaattggtttctcctgttagctcatcatcccacatctgtctacaaatacacaagacttagaaggaaaagaaaattcactccagggaggggctttttgaagaagctccgcacagactcgacctgctaggttcagagtgtgaatataagcaccctcccctcaggtgacgcacccttagagacactcagccccctcctcttctggaagcagaaatgctattgttgcaacccagtccttccaagaacctgcagtggcatttcagggaggcagccgaccttggcggtcaccggtggttctacagagcagaacgacagcgggggcagctcgtgtttgctattyggggggggtggcaaatgcgaagccaccagataactaaaacctctgctgtcttcctgccactgccgaccatcaccataggaaccacatcctgctgctaccatggcaaccgtgcagtaccatccgctcagcaagcaatgatgcagaggccactcaggaaggcttgccgaaaggcctcggggctgaaagggtcccatggtccacagtcacggcgaccgggcagtgacaaagaaaagccttccagaacaatccattttttggtataaaagccctcctcctgttcctcaagaatttatcccaaaattaaatcttgtataaagcacattcctgttcccaggctgcaaaaagctccagggcaaaatgcatcagtgaagagcccagggggcggggggtcctttttctgacacatgccaccgctaatttaaagaggatgcgaaacccagggagctccccacaatttagccacacactcacgacagcagctcctacgggagacccaggcaccaggattaggccctcccagaagcagcctctgacttcctcctcacaacccttcttataaacctaattcctcacttcctacacccattttacacaggaatgaggctcagagaagttaagttatttgcccaaggtcacacagcacaatgggcagactgtctgactctccagtcatgagaaattctgatcaacttaattatatccaatgccaagttccaataatcaggccctacttattaatcacagctcatcttgattttctttctttttctttctttctatcttctctctctctctctctctctctctctctctctcccccttcctccctccctccctctctctctctctgagagatggggtctcactatcttgcccaagctggtcttgaactcctgggctcaaatgatcctcctaccttggcttcccaaagtgctgggattaaaggtatgagccactgcacccgccaatttttaataagcattattttaagtaagcaaacactctctacagcatagaaattgcttatttgttctaggcattgttcaagaagtgggatcctgtttgtggctcccagagtctctgaggtagaaaccactagagatgaagaaatcgaggcagacagatgaagtaacttggctgagtgcaccagcaggcaagaggcagacctggggttcaaacccagccagcaggactccagagaatgggctcacagccgctttgctataccgcttcttgactacctgggcagctgaaatgcaaatcttaggccccacctgctaagcacactctccaaggccttgaaactgaaatgaccccaccaggccactcaagagcagccgcatcaccacccactgctgctgcacccctgccgcaaagccagcgtaatgacagctttagggaacagccccgagaagacagatgagaccttcccagagagccacaactacaatgccagcttttgtccccaaatggtggtttcagtttcagagctcacttcccattcgtcgccattcaggatgacaaagccttcaacactgagggctggaggagaggaagggaacattactgagtctaccatgtcccagcacctcactgaggcatctccatgatggacatacttgagtgagccatgtcaaactgccgttctgtaggttaaaagtggtaaaatgctggctgtttcatgtgttttatcctgtcttatcgtcataacaaccccactttacagatgaggaaactgaggctcaatttcctcaagtgaggttaaatggttggccaaggtcacagagacaggaagtaggagacccaagattccaaccctgtctggtctcagtcaaggtccttcccctccaccatgcacacactatttcctggactgccctggggcatgggaggcccagcaagggtgtgcctgagtagagaacagcccagagaacccaattcctctgctgacggagttctgagttaaggggtcaggactttctttgggcagcccagsstctgctctcaaattgaagcagctacagcttagcaagtactagcaaaaatataatcacagggattttactttttgtgtgtgtgtttgctttgagacagggtctcactctgtcatccaggctggagtgcagtagcgcgatcacagctcactgtagcctcaacctcccagtctcaagtgatcctcccacctcagcctcctgagtagctgcaactacaggcatcaccacaccctgctacttctgttaaaaaatattttgaggccgggtacagtggctcatgcctggaatcccagcaatttgggaggccaaggcaggtggatcacaaggtcaggagtacaagaccagcctggccaacacggtgaaaccccgtctctaataaaaatacaaaaattagccaggcgtggcgcgggcgcctgtaatcccagctactcaggaggctgaggcagataattgcttgaacctgggaggcggaggttgcagtcagttgagatcgcaccactgcactccagcctgggcaacagagtgagactctgtctcaaaaaaaaaaaaaaaaaaatagagatgcaggtctcgctatgttgccccaggctggtcttgaactcctgggctcaagtgatcttcctgcctcggccacccaaagtgctgggattacaggcatgaacctggccttttatattttttaatcaacaccaacagacacagaacacaggaagcaggtagacagttacttaatcggtttgagtcccagctggctagtgggaacggtaggatgctaatgccaactgcatagggctgctcagaaataaacacagcctgtaagccaaaggccctgacccgtgctgggcgcccggacggttctcagcgtacatcacttcccttgctggtccttggctctctcgccaagctggaggggtatagtccagcctggacccctgcagggacttcagtagacagcctctcccaggcctagcctatgttcttccccagacaggtgaaggtgttgtctggatgccattcaccatgaagtggtggccactgttaattcacggtcccgacatccctctctctgctacccaactccaggtgtcaacaagcccggtgggccaggaagaatgacccttagaggatgacaggtcctactttcacaattatgacagattttctgcgctccgctgtctttcgaccaaagtgagagccaaataggaaatgcaggggtgagatgatccacaggctttagccatgggcgtttcaactgactcggggaaacagcaccccattgaccccagccttccgaagaagggtgagtcctcaaacagctgcaccacccaccgccctcctccacttccagcacacacacacaattaaccatgggggcatgagaagtgcaaagggacccccgtcacttactttgtgaaaaaattccacacatccactggcgttcattttcctagaaaatccttgaatctcgtggctgtggcaggaggtccacaktgaaaagagatgtctgcagccackgccaactctgcgccctggctgcatctcccaagcctccagagaacgtcgaactccaaaaacggcattcccgaaggatgggatcatttcctaaacacacccagagaatcgcctctgctccacatttcttcaggaaaaaatgtttcccacttccctggcattgtcgggggagactccaaggacacactggctaaaatgtggggctttttctttctcataatggcctattacatactttgcaatttcacagctaatatgtgaatacagggctgtcattacaatttgaataatatagaaatgagaagtgtgaaaagcaacaaaatcccctttacctgaattcaagcccactctcttgccagaggagggtgtttccttggtctcatttttctatgcaatcatatacatattaaaaaatacctttgtgttatgcatttgtgtgatgagtcttagacaataacatgtcttggatatctttccacagtcatgcattttagattcacttcattctttttcattgctgcatcatattccacagaatcaatgtactaagacatactgacctattctttcactgatgaccttggaagctgtctgatttttcactgatgaccttggaggccgtctggtttttcactgacgaccttggaggctgtctggcttttcactgatgaccttgaaagctgtctgatttttcactgatgaccttggaggccgtctgggtttcaccgatgaccttggaggccgtctggtttttcsctgaagaccttggaggccgtctggttttccactgatgaccttgaaggctgtctggcttttcagtgatgaccttgaaasctgcctgatttttcactgatgaccttggaggccgtctgggtttcactgatgaccttggaggccktctggtttttcactgaagaccttggaggccatctggtttttcactgatgaccttggaggccgtctggtttttcaccgatgaccttgaaggccgtgtggtttttcactgaagaccttggaggccatctggtttttcactrtgctacctgacacatacttgggtatgtgtctatgcaaacatgagagaatttcctgaggacagatgcctagatgcttcgatatctattgccaggcatcccagacacagtggtacactagccagccctggtcccagcccccagggagcccacagtttggctgcagacaactaaagctatcagcccagagcaagccaatccccagcagtgacgcacaagtgcccgcgcactgacgagatgcatccaggctgggagggcagggaaggcttcctctgacggcgatgagctgagtcctgaaggcagagctggctggccaagagcaagagcatgagagtgtccagggagagtgtccagggaagggagtggggagggcttcyaagcctggaacacggcacgtatctgcagaaaccaagggctgaaccgaagtagagctcctttaggaaaagaaagcagctcaatatgattgcagtcctactcgggtggacgaggggacccgggggagctagaagaacgtttaaaacgggagagaagcgcgattccatgtgtattttagaaaatccccggaggaatcaagagtgagaaaatgggctgctgaagtcaagtgactggactagaaaccaccccaaagctggggccatgtcaccttcattgctagatcagtcagagtccaaccaggagatggaagccacttgggcactggaactgagagrctccaacgcagggcactgggtacacaaggaagragatcccagaacccaaacgggggcaatggagcaacccagagattagcaacagcaggaagctgcccccacccgcaggccagagagacacaggggaggtggcaggactgaggcccaggggctggaagcgccracagaggacaggccatagggtccgtccagtgggagctggagccacggaggagttgcaggtgccatcagagtggcctctggagactgagggaggtagaaacactggcttctccattcctcytgccttccaacctcctagcagctcctcccacgggttgaatccagtgacacgggagcctgggacacaagaacctacagagattggctcccgaccacacccagcagatcagagcaaggacaaggaacggaccccaagggcaaacaggcccagactggcacagctaccaacctccggtccttagaatagcgcctggtgcaggatacacatttgctaaaagaataaagccggtgatgcttcatttgagagcccctccagccctgtgatttcctgatggccacttaacgatgctcttgggctgacgaaacacgcctcccattatccccagccctggccctgtgctcccaaagcactcaatagtaaatcaatagtgcgttctctgaaacagaagcccagtggtgcccgcccacccagccttcaaagccaagatcagctgtgcctctccttacatcgccacacacgtcagtgccctccaacacagaccttgtgtttttccatctagaagcgtgagggaccacaacgcttcaaggatgagratcagaaggccaaggtgttcctttcagctgtgagtcattttgaggcctcgctgacaggtgagagggttcagcctcacctgcccggtcaatccttcagccctagagcccagaataaagcacagcccccagtaggtttctctctgctggagtcatgcttctagtttaactgggagaagacrgtctggcacagggaaaaggctgagagctttgggacagggcactcctgccaggacaggccacgtggccatgggtcacctcctggcctcagtctccagctctggaaaatgggaaggatatgaccttcctccagggctgttgggcctggcacacagcaggccctcgaacaacgatgctcaggggagtgttcatcgcattttctgttactggaccccagcgccccacytggtctgtggtagctcctctgaaagatgttagtatgagcaacagctagagccaccatggcgcacactggcacggcacacacacaggccaggcagcagcctaaggattgtgtattaagtcacttaatcttcacaaccaccctgggaagcaggaaatactgtttcctccactttacagataaggagactgaggcacagagaagtctggaaacaaacccacggggacccaggttataaggggtgaagccatgaccttctcctgggctctcaggctccagagccaccgcgattgaccgcaacactagatctaccaggggtgcccatgcggtgctgagagccacgctaaagtcttaattaataggctgtcccatctaattctcacagtacacccattttgcagatgaagaatggaggctcagtgagcgcaaaccacttgtctaaggtcatggactaatgagtagccagctgggttggaacctggatggtctcgtcacactcctgaccactgcaccccaagttagcctcgttcctaaggtcaaactgggctgcctcttcctccctcctcatgccacttctggaagcttccctcaccctgatcctctggaggtggccacacgcccccacaaaggggaagctttctcagccaccctcctcctccctgcctgccccacccctccaactgcatgggctgggacacctaccctcttcaccacaaaaccagatgcaaatccattcctcaaatagactggaagtgtcaccggattctagtctcttctatagtaaatacatgaagtcagtctccataaacaaatgcattattttagggatgaagattcmctggacatcaacaaagctggcggcgtttttgttttgttttgtttttgttgtttttcttttaaactagcagcagcaaccacaacggaaaccccatggtctgttttggggtcaaaacacaaagccttcctctagccccaggattgcactgggcagtgggggcaagaatgccccacctaggctgagggaagcgcagcaaatatggtttgggcaaagacaacagggcaaaggttgcaagtcagtggaatgaaagccagcccagaggatccgagagctggaatcttaaatattcacaccaggaagtaatggcactaagtctggagccagctagggccatgcctgtgtcccttgcaaaacggcttggcctggaaacaggaggcagctccactctgggaattgacccatctgacccttgccccattgcctagacccacgggtctgcacagcagccaggccagaacggaccggggggttcccaagtcagcaccctcagcacaagctggaggtacaatcccagctccacgccggctcagccccaggaaggtgtccccgacacggcagagaaacaaaggccagctctatttgcaaactggcctcctggagaatcccggggtggaaaggagcccactccagccaggtggtatggcagatcagcttgcagtcctgtcattcactcaacagccgtttccggaacacctactatgcgtggggcccaggccagccgcgctggctgtctcctcaactccagcctcttgctgggaccttggcaaccaggcccaagagaaaggcggctcctctgaatagcctgctggcaggaagccccacactctgggtctggtgagcagcaacggatgcaggcaggccccgctctacgaaaactcgatctagggggagaatcttccaacctaccaagaagaggaaagaactcagaggtttaccagagggcaagggatcaaaatcaaaactcaaaagctcccaccagccaaaaatgggccaaccggagcatccaaaagaatagtaactgcaaggaattgaaattcatcaaataagccggacatggtggctcacgcctgtaatcccagcactttgggacgctgaggagggcggattgcttgagaccaagagtttgagaccagcttgggcaacatggagaaaccccatttctactaaaaatgcaaaaattagctgggtgtggtggtgcgtgcctgtaatcccagctacttgggaggctgaggcaggagaattgcttgaacccaggaagcagaggttgcagtgagctgagatcatgccactgcactccagcctgggtgacagagtaagactctgtctcaaaaaaaattattattttaattataattattttgtggccaattaattttattaataaaaaagaaattcatcaaatataaatttaaatccatgaattcatgttgatatttaaaaaaaaacctttggaagatgctacaaaatcagtttattactctaaacttgatacaaaggggaagagtgaagcatttctgctgcctttcctgtacacactaaacattgcaacaaccatgtagctgatgaagtgaagcccttcttcggatgatcccatctgacaaatgaggaaggaaaggtagagctaaaacacctgccctttgcaatctctaatgaaataatgcacctgagcagtgattgctggtgcccactggaacatgagcaggaaaggtgatgggggtggtgatggatagatcaggcagccagcaccagaacctgcccaycarccacagcaagaaagaccyccmccaaggcatgagggaccctggagtgaggcaactggaagtgcacagaaacacctacctagagaggaatcatgccgaaaattttaatccaaatcaaccaaatctctagatcagtgctctccaatagaaatacaatgcaagmcacatgtttaaaactaaatattctagtagccacattttaaaaaagtaaaacaggtgaaatcaatgttaataatatattttaacccaatatatcaaatatattatcacttcaacatataatcaatacaaaaaatgagtagtgagatactgtatattttttttcatactaagtcttcaaaatccagtgtgcgttttacacttagagcacatctcaatgaggacctcatttcaagtgctcagcgaccatgtgtggctggtggccgtggtattggacagcacaggtctaaaactaactagaggccaggtgcagtggctcacacgtgtaatcctagcactttgagaggtagaggtgggcagatcacttgagcccaggagttcgagaccagcctgggcaacatggtgaaacgccatctctacaaaacatacaaaaaattaggcaggcgtggtggtgcacacctgtagtcccagctaccaggaaggctgaggtgggaggatcatctgagcctgggaagttgaagctgcagtgagccacgatcatgcaactgtactccagcctgagcaacagagtgagaccttgtgtaaaaacaarctaggaattcacaaggtatgcaggaaatctacaggaaatacagggaacagaggaatgtgttaaatgacaccatgaggaagcaatcagcaaaactcagaatatggaaaattctacagggcagatgactaacttaaagagattgtaaaaccttcagtaagcaaatacagggtgtagaccacgtccggaatcttaaatgagcaaaccaatagtaaaaatcatgaatgaaataactagggaaatgtgaacattggacatttgatatcaaggaattattgttagtttcttaggcatgaggatggtattacatttatatctatttgttaaaagatactttattttttagagattcctatttaagtcatttctgatgaactaacagcatgtcagggatttgcatctaaacagtggctgggagagagggaagcatacagaggcagctacaccccaagactcatcataagctgggaactgttgaagcagatgatgagtacatgggggttcattttactcccccatgctctcagtatatgttttaaaatttcccaaagttaggctggcagctgtggcccaagcctgtaatcccagcactatgggaggccgaatcaggtggatcacctgaggtcaggagttcaagaccagactgaccaatatggtgaaaccccatctctactaaaaatataaaagttaggtgggcaaggtggcatgcacctgtagtcccagctactcaggaggctaaggcaggagaattgcttgaacctgggaggtggaggttgcagtgagctgagatctcaccactgcactccagcctgggcgacagaacaagactctatctcaccaaaaaaacaaaacaaaacaaaataaaggtttgtgatttgtgattttttttgttttaatgaaggaaaaaaaaacattggtcttggactgrtccatcacagtatctgagaaaggtggtagtgaagtgtaattttgaaaagacctggaatcgcacctccaggacttaaatcctggctttgtgcctggctggttgtgtgactttgtgcatgtccctttgcttgctaaacctcagtttactcacctcctaaacagggctactaacaatagtgtttcctcagaagactgtcaaaggattaaactaatccaaaccaagtgcttagctgagagcacataataatgttaggtggtrataacactaccattattgacattgtcatcattattattagcaaaaacatcagtgatgaagtgatgagggcggccatcatggtcccacttgggcgactcacacccagggaaacaagggccctgacacctgctccgtggagctcctgggcagctgtgaggagygagcaccccctcgtccccsatcagaccttgagaactataacacaaagagggtggcagccccgcagcaggatgctgacgtcactgtcgtcaataccttgatagaggcccaagagacaaagtcacagccaaagtgagcagagcttttgccaaacgccccattaaagatacaggaaaagcatcctcatctaaaatcctgatggaaattgatcagaaaatgaggttcaatttgccagccaggtctgattcaggcatacttcctttggggcaggacttctccgtgagggcaggatgtccggagctcctgacaaaggggcccccagccaatcactgcatcagatccatcacacttccatgctcctgcccaccaggaaactcacctgttctctcctccctggttaagggagacaggaagacagcaagctgaggggtctgggtcccagttaagacccagccccaaggatgtgcagctggggcaggtaggcctcaagagacatctgttcagaccatgcccttgggttatccaggcagcattcctgaaaccagggttggagccctgaccccaaccctagggtagggctctgcttagggccgccctggctcgacctgctcaggatgaccagagggaggcggacagagtgggcggaagggaaagacagccagactatgacccccgagtacctgcacatcaggcaccaacatgaaagtcattcccatttttagagctaaaaaaccagaagctcagagaggtgccagaggcagtgcacgcaggaaggaggcagccccaatgtcaaacccaagtgcctatctccaaagccaaactcccaccaatgtgttatgccgagctaggtgacaggaagcaagcccccagacacacacacaggcagggaactgtgcaggctgagggcacatcagcatcattccggtgggctctccagctgggtggtcctgcccatgccacatctctctgcacctscttgcgcatctataggatggagctaaagagagccctgtggggcaatgacagctgaggacacaggaggtctgccacacggggagcacacggtgttggtgacacctgcagacacctgaatgaatctgttcttcatgaggacctgctggcactttttctctctgaagagtagatctttatttgaaaaaaataaaatgaatgattcccttcccatcataaaagctgctgctcttaaggctaagggaaagggaacctgaattgtattcaagagttcattcctggagtaggggagactccacgctgagcaaaggaatggcaggcaaggccaagggagaaccactccagacatgacacttgctctcctaagtacttcccaaccccagtgcacagttgacaaaagcatacatcagaaggggccctgagacaccatgaggatccccatcctggggcctacgtgggtccctcaggcatgatcagatcattctgcacaccatcccaggcctgcaggagctgtcctgagatctgtctcacggagcaccctctcagactgatggagagtgctgaaactcccaatgcagtctgtaaatacctatcaatattccagaggtgcataacctttgactcagacatttcatttctaggaatttttcccagagacatttttgcatttgtctcaaagatatatatacatggataatcacatggcattgcttgaaagagtaaaaggctgcaaaaacagccatcagtaagaaaatgaccaaatagagctatggagtagaatgctctgtaaccacaaaaagagaacagggaagctgtcctgatatgcaaccattcctcactattgtttagtgagaaaatattacaggaaaatgtgcacaggattctatcattcgtttaaacaaaccaaatttgtacgtatttgcgtctatgtacctaattatgtccacaaaggagatgatcagaaaccagggatgctgtggcctctggggaggagataagccagccgggccacagggcaagagggacttttcaccacatttccttatagatttcctgagctgtgcatcatatgaaagtcctatctattcaaaaataaatgcacacatttaatatttcaaaataatataaagtagaggatgtagcactcactttgtctctagaacaaggttgggggaggaatgctcctgctttgttcctctctgttcaatcatctctgattcctccgttaagcatgggtggataggttggcattgcccaagtgggctctactaaaakcctgggaaaaccaaatgggaaataaaccaagaaaggcaaaaatcaccggatcagtccagctccagcaggctgggccagtgtcccaggcagcaatgggactcacaccccagtactactgagtgctaccctcacagcccttccccagaacccagtcctcttgttcccccaagaaccccaaatataaagcagggcaaacgcaaagtgatctgcggccaccccaaccaggagattccactcaggtctcctggttaatcttaatgagccttgtgaatttgcattccactccacatctgtgcacactttaacagcaaaataatatctccaatgactcctgaattaaatggtttcaccttttctcccttcaccaaattgtctaaagtggatgttcccacaaaggggagccatgttttacattacgcaccaattaaacgacttaacctttccacccctcaaggaaaatgctcattccaagaagatgagccatgttctaaattatatattagttaaattacttaatcttttccctctgaatccacaagtcaagtggacacacatagaggacacacccaatttagcctatggtttctcaaactcctgacaccctcacaggctgcacatatcccagtttgagaaacgtagttttaggcttatctttagcagctgcagagggagggtacccaagacccccagaaagccaaggctgggcagatgatcttcctttcttttttaagacagagtctagctctgtcacccaggctggagtgcagtggcacaatcggctcactgcaagctccgcctcctgggttcacgccattctcctgcctcagcctcctgagtagctgggactacaggcgcccgccaccacgcccagctaatttttttgtattttttttagtacagatgaggtttcaccatgttagccaggatggtctcgatctcctgacctcgtgatccacctacctcggcctcccaaagtgttaggattacaggcgtgagccactgtgcccggccgatgatctttctttagaggacattcaggaacaaggctttgagccatttctttttttttttttttttgagacggagtctcgctctgtcatccaggctggagtggagtggcgtgatctcagctcactgccacctccgcctcctgggttcaagtgattctcctgcctcagcctcccaaatagctggggctataggcgcacaccaccacacacagctaatttttagtagagacggggtttcactagtgtggccaggctggtctcgaactcctgacctcgtgatccgcccgccttggcctcccagagtgctgggattacaggcatgagtgagccatttcaaactcaaagttccactttattttcttcccacttgatcatctttctattcggaagacttttccccaatcaagcttctgttcttaagccattactgattgttatttccattacccattttaatctccattttccaatgttatttccacaatacaaggccagtttctttaaaaaacaataaattgcaatgtaaggaagaatgaggtcttcctgtgtaatgaaatggctgagcataactgaggcaagatccacctcttaagaacagaggtcaagatctcagcagggctttgtgaaggtcagaaaacttctctgggggcccttgctcattactgtcttctcagaccccaaatcagtaagtactggtcaggatcagaacggtcctgagtgtaggctcaggatcacacaggcctagatccaatcagcttcgccagtttctaactacgtgagctgcaggaagttccttaacctctccgagccttggtttcctcatcaataaaatgaggctaagaggggtcccacctgttagggttgcaggaggatgaatagagacaacgtgtgtaaactgctcagcaatgtgacagcatgtaataagcactcaatgaacggcagttcttactgttcctgatttattttattttattttgagatggagttttgctcttgtcgcccaggctggagtgcaatggcacaatctaggctcaccgcaacctccacctcccgggttcaagtgattctcctgcctcagcctcccgaatagctgggattacaggcatgtgccaccacgcccggctgattttttgttttgtatttagtagagacagggttttgccatgttggtcaggctggtctcaaactcctgacctcaggtratccacctgccttggcctcccaaagtgctgggattacaggcatgagccaccgtgcccagcctgttcctgatttaaaccagccactctttcactgaggagagactcaaagagagacccagcttacaagagggaaatgatcttggccaaagtttctgtgcagagctccctgacactactcataactttcttcacagtctggggaaacagacaaggctttcagttcccaaactaagaaagcactaaagctccaagagggaccagaaactcggcccagcaggtcccagctgaggctctggggctcacagaccccgctgcctttgaaaaccagggtgcaaatggacaaaacgcacaagatcagcagctctccaggcgtggggtctggaggaccaggcccacatggaagcaagaacaggcagaagcgaaacaacaacatggcctccacacaggcccagttctctcctttttcagaacacatgagggattccacttcccttccctcttcacccacccctataaattataggtgtggctaygtgacttgtgctggccaatgaaccatgagcagtgatgtgtgtcctgtacaagtggccacacccccgtcctgcctccaggacagcagaagcacatgttgagacgggccctccatcggctgggtcactgcacgatcagatgagcaaggctcccgactgatgtgccctggacatttagcatgaaggagaaataaacctcaggtgtgtkgagcagctgcgctgccygttaccgttgcacagcccagcctcactggctgattcaaggggtcaaaagagcagggtctaaagcagcactttccaaactgtctgtgggaaaagacccatttttattttctttccaatccactgtaaaccaatatttttgaaaactataatgaaaatttcattggaatgtcaaaatgctaaaagggttccacaccctcactcttgctctcctcatttctctccctagaggctggtaacaagctctgcagataggcacagactgggaccactcgtggaatggcacagaccgtggagcacacacagcacaggtgggctgcaggcccaccggccattttttcttttcttttctttttttttttttttttttttttttgagacgagtctcactctgtcgccgaggctggagtgcgatggcacaatcctggctcactgcaacctccatctcctgggttcaagcgattctcctgcctcagcctcccgagtagctgggattactggcacccactactacacccggctaatttttgtatttttagtagagacagagtttcaccatgttggccagggtagtctcaaacttttgacctcaagtgatccacctgccttggcctcccaaagtgctaagattacaggcatgagccatggtgcccagccccgctggccattttctattttcttttttcctttttttgagacagtctcactctatcaccaaggctgaagtgcagtggcatgatctcagcccactgcaacctctgcctcccgggttcaagcgattctcctgcctcagcctcccaagtacttgggattactggcgcccacgaccacgccaggctaatttttgtatttttagtagagasggggtttcaccatgtgggccaggctggtctcaaacttctgaccccaagtgatctgcctccctcggccttcccaagtgctggaattacaggtgtaagccacggcgcccaaccccactgacctttttctaacactggtgaaataactgaaccttcccaagcctcacctctccatttataaaatgacagttggcatgtgaggatttaaatataaagtccatggagcacagggccaggtgtgaacacgccctcattacatgtcagctactcagccacatcctgccctgttcccaggtgatgacgtctgtcactgacaggcctggtgatccgctcagggatctggaggggtgccatggggttcaggcaacctcagaacaaggcagtgggttgagattcagaattcacttctagacatccacagtgagataaggtgaccagactggcacctcaatggggcagaaggccaggcgcggtggctcaggcctataatcccagcaccttgggaggccagggcaggaggatcgcttgagctcaagagttcaagaacaacctcagcaacacagagagacctgtctgtacaaaaaaatttaaaaattagccaggtgcagtggcatgtatctatggtcccacctactcgggaggctgaggtgggaggatggcttgagcctggggggtcaaggctgcagtaagccataattgttgccactgcactccagcctgggtgcacagagaccctgcctcaaaaaataaaaattaaaataaagggatcagaggtatctgggactaggcaggcgacccagtgatccactgagaccagggataacactgactgctcataccagggggaaactcttcaccatcaagcacccggctgtcacacagcagagccacagatgatgacccagggctgtgttcactccagagcagggtaaccatgtatcccggtttccctgggactgagggatctcctggaattcaagactttcagtataattgggacagtattgggcaaatcagaacaaactggtcaccgtactccggggcctgtgttctttagctgtaatatttaggwtgtgctgaactagggcagctctttaatgaaacatcaacraggaggccagagtagatctctggctgcttaacagactgcctgggaaagccacatcccacgacatcacgcaaacatatctaaggacagagagacagggcgtgatggatgcagcagcaaagacaaagtgattacccggcattgcagggacagcagtggctccgcacagcctggggactggctctgccctgaggcctgttcaggaatggaaatttctaaatactggtcacatagccagaaggctttttcttgcttctttttttgttttgttttttgcattcaaacaataggtaatcagaatctgcttagttaacagccatattgtcataatttgccaaacaaagcaatgggaatatgatgataacggtaacacttgacatttctcacaagggcaggtcttggatgtgacttcatttcccagagcctgctggctgtcttcttttgtctgagtcctccccatcctcgcccagccatcagcatgacgcccaaatgcctggcgcacgtgacaggcccatggatcgctgagcgaatgagttaatgaacgaggacatctccgttctgcgggtaacccaggcacccccaggcgagccaggctgggtgctctgtggccatgtcacctccccctccattgctcacatggaggcagtgccaccatgtccccaggattgtcctgaatactcaatacataagttgaccatgtaatctatgaatgaaatgaagcgtcactgatcactttactaggactacaagtgtaaactgggactgtccaggcaaaacaggacaagtggtcacctcactgatgtagcatctcacctaatccttgttatgctgcaactgtcagcccaggtcccgggtccagactccatggtctgaagcccagccctgcctcctagcagctgggtacgttacttaacctctctgggcctcagtttcctcatcggagctaggcagtagctgccccttagggctgctctgcagactactctatttaatagttgcaacacttagaatagggcctagcatatagtaggcaccactcatgtgttgactgaataaaaaagtcctcccatcatccccaggattgttgccatttcataaatcaggcaaggaaggcacaaggacttaagtcacttgccggttagtagcagaatggctcacgcctgtaaccccagcactttgggaggccgaggtgggcggatcacttgaggtcaggagttcgagaccagcttggccaacagggtgaaatcccgactctactaaaaatacaaaaattagctgggtatggtggcatgcacctgtaattccagctactcgggaggctgaggcaggagaattgcgagaacctgggaagcagaagttgcagtgagctgagatcacgacactgcactccagccygggcgacagagcgagacaccgtctcagaaaaaaaaaaaaaaaaaaagaaccagagtcaaacctaagcatcaatgcccatgccacacccatcctgagatcctgcccccgaccccactccacccccagctaccgcattttctctccccattcaagaatttagggctgttctgcagatgacgctatttaatagcgtaaccttataagtcaagtaagaaggagtgcaaggagcccgatacaatgcgtggcacagggcactgccagagctccccctggggccaaagaggggcttcaggtcccctgaggctgtgtggcacacgcaaagcaggaggcaccagtcccaaaataggacgggcatttgctgcccgtgcgtcacaacccaaagttgttctccttttctcttcttgccaaattactcgatctcagaaattccttagcaagacaagactgaaatgcaatctccaaccccatcrggcccagtggaatttcaccaacacaaattactgcgttctccaggaaaacggaggacgctggcctgaagtttcagattctcagtaggtcttagaaagctccggcacttgagcagctcctggaagtggcaggaagtggtttgcctttgcttattttccaaaggataaccaccagatttgctcgtaaaaacttgctaaccaattggcagagggcacctgcgcaatccaatgatttctcatatcctgggtttttcttctcttgttagttcaactcgtgaggacttcaaagacgcagatgcacaaggcttgscttggcacatgcaaagaaggaaggaaagaaagaaggaagggagggaggaagggaaggacagagagggagggaaaggaaacagtgggccggggagggcacagtggctcatgcctgtaatgccaacactttgggaggccaaggtgggtggatcatttgaggtcaggagttcaagatcagcctggccaatatggtgaaacccagtctctactaaaaatacaaaaattagctggatgtggtggcacgcgcctgtagtcccagctactcaggaggctgaggcaggagaatcacttcaacccgggaggcagaggttgcagtgagcggagatcgcaccactgcactccagcctggcgacagagtgagactccatctcaaaaaaaaaaaagaaagaaagaaagaaaagggggaggaaagaaggagggagggagggaggaagggagagagagagagggagggaggggagggaggagggagagaaggagagagagaaggaggaagggaggaaaggcagagagggagggagggagggacagagggaggcaggcagggagggaggcaggaaggaaggaaggaaggaaggaaggaaggaaggaaggaaggaaggacggaaggaaggaaggacggaaggaaggaaggaaattttgataaagaatcaaaattcaccaaaagaatcgttaagccacagcccatggcgtcatgttcaccgatgctcaggcaggactgcgcaccagctctaaaagtcgccagaggctggggctggcaggacacagagtgagggagggaaagaggagcagagaccaaggagtggctgaagaaggccrattgccccagggagactgggtatgttctgcatcaggagagagaaggaagaaagggctcctccagaagtcagcagcccaagcaaagcagaggagccaggtgaagcccagagtgcgtggggcgccccggaaggcaagggcagaggagtttggatgcctcccatagggccaaaataggagagtctcgcccgggctgacaagcccagacttgaatctgaatgccacaggcaacaactgcgagttgctgggcaggaccggagctgccgcccccaaaactgtttcagattcagagggcgctgctgggtaaaggagrggtaaargactggacggggaagctgagtctcctccaccacttctcaggaagcctttggggagccacctctgctccccgggcagaggccacatgccagcccagtctgctaaggacattcccagattcttggaggctgggatgggggcacgtgtcctgggccagcccagaagatggatgacaaggaagctacrtgggcgccgggacaggcggatgctaaggtgaggagacagctcagccagggctgcctcccactcagaggtcatcgccaggtccagatctgtgcagtcacttccctcccgaactgggcacttgggagaaatcagagaatatcctagaagggactctgaaagggagctggagattggggcgaggcttggggcacatgtgtacatgggtgtgcaagtggtgtgtgtgtgcagagacaagtatgtgtgccgagtgtccttccatgcataggtgtgaggcatgtgcatccatgaccttgagattgagtgctcatggccatatgtgtatacggtgagggggtgtggccatgctgggacacgttcacagtgtgaatggtgcatgcatgcacacacatcttcaacaggcaaacagcatcgtgtcagggccaagagcctggactgaagccttgagcacacgatctagcttctctacaccgatctaactgctctacacctcagtttcctcatttgtaaaatggcgctaataacagaaactacctcctagtgttgatagggggattaaatacatttgaatttgtaaagcactcagatgcttgtacatggggtcctactaaatggtatgcatgtgtgtgttaaaaaataaatgcatacgtgtgggtgagtggtcgcacagctgggaacctgtatgtatggagaggtgtgcacggtgtaaactaactgggactgtgtgcacacgcaggggcaggaagatatgggctgggtgtgcacggatgtgcaagagggaggtgtgtctgcccgtttgcaaacgtgtggactgtgtgtatacatgaygcctgggggagtgcatgccagggcccaggacatgtgtgctcaaggaccatggggtgtatgcatgcacacaygtgtgtgctcgtggggtatgcaagtgtgtgcagccatgttctggggcacacatgtgtgggcacctgggcaggggcatggagggatgggagccatgagtcaggtggaaggaccctctcagagtgaggcgcgaggagcagaggcctgataacccccgtgagaaagcaggaccactgggcagaggcagagtggccccctcagagctgccgagcagccccagggggactcggtgcagaggtgaggacccagaccaaaaaggccgggggacaagggccgcatctcactcaggcctgtgcccagcccccggcactggaccgtcctcaggaagctggaaaggaaggaaggagagaatgtgcccaagggagggacacagaccccaacatgacaagcaccatcctcaggtcacgtcctggggctccacatccatcatttcattgaaccttcttgactgtcctagaaggagccacgttttcagacaaggaagccgagttctatggttaaaacatctgcccagaggcccactgctagggagcagcaggttccaacccagctgggtctgacctctgtcctcagagccaccatggtactctgagaatgaatgaatgaaccaacacatgcatgcatgaatgaatgaacagaccaacaaagaacaatgaaaagraaaccgaaacttagtgcccggaagaggaataaaataagggaagcaccggagagtcggcaggcactgcctggagaascctctggggggaccacagctggagcagcagccatggtggcctgcaggggacccaggagcccacgctgcaygggcagaaggagctttctttgtagcccttgaggctgcagcagcagaggaggcggcggggcacctgtgtcggccaaggctcccagagcacaagccctgtggcttcacagcagggccaggccactgagcctttagcaccaattcagaaaaccgggattctgcactctatgcgagtcctgtgggatttggggttaacaagacctcggctgcccaggcccagacaccctcggasagccagtctgccgaggcctgggcatcaccggcaagatgggttattagagtgacttctccaagctggctgtgtcctaaggccccgtagggctcaaactaatgaaacaatgagacagtcgccttgcttccagagacccttctgggagccaccagctgggttcgggggttgtttagaaacagttcctagagacccctacttatwatgagctccagctctaagtggcctcttggaaaagtggctcaacctcactgagccccaagttcttcctacacagtaacaatcactcatccatgaggggttattggtggagaggaccaatacaaggtatgaaaaacacatctcggaggacaggtagcaggtccttccaagtgacagctgttctcataaatgggagccatcagagccctaggtctgcctgagcagaggggagccccaagctactgagtcccccgggctatgcaaggctgtcaggcaggggttggaggagggtggactgttgcatgggcaccaccagctccagctgccccatcactgtgcctgggaggcccagggtctacacctccctctccrcctagacatccccacagcccggacaccccttacgaggcccagcatcagggcatctgtgcaayccacttttatggcctcttccaactgttgaaccccccagccagccagcagtaagcaaatggcccagctgccaggctgtgggtgggtgtcccgggcactgcccgccaagcggcactggcttctccctcttgaacttgtcctttgaccccttggctcccattcagtttcacagaatgtaagactctgctcattttaattgggaagaagcccaagagatggagcaccaggtttcaaactgtgttcccaggggtccagggtccgcagggggctgacccccgcctctactgggatggtgtgcctttatgaaccttctcttcttgctgttggaggagacagctgtgataccaaatccctggaagcacgtgcacaaaagctcaccaaatttaaaactgagctctcccgcaccccactttgctactttgagacatcgtcatccattcaaagggttttatcactggatgaaacaaccataaatctgatttgatccttgctgaaaggctgaaattttaattggtctttgtccttcaaagtccttctcacttttcttttcacttgtcagggttgagaagcaattaactcccctccatcgtacaaattctaaataggtttcacttacttccttgtttcccatccatcgcccccaagtaggatcgcccccatgaagggggtctgttttgttcactgctgtattctgagcacacaacaggcacgacaaatattgatttaatatttattttaattaactaaatgtagcaattttaatagtaaccatagcacctactatggtccaggccctgtttacacatgtgatgtgtgttaactcacccagcactcatatccacccttggagaccagtcccattatccccattctacagatgaaaaaacaaaggcaccactacacttgctaccctggattcacagcatcttcaaagccccaccctcggtccctggctcacttgctctcccttccctggaacaacgccctgcttcctttgcgcccctgccagcttcatggcctctttctctgctcctgcaagtctcggagctgggggagctgggggagctggggattatctcgcaaactgcattttacagataaggaggctgaggactgacagcttcctgtctagttgggggaatgaggtggaaagaaaatgacagccaacagccaagtcactragggaggccagcagatgccccaggagagtgagtggccatggctgaccacagcaggcaggggcttccaggaggaggtgacagctctcacaatgtctcaagtcctccaaagagcagcagcccacagctttggggtctcagccattcctcccacaaacataaaaagagaaggggcctggggtctctcagattagcasacacacctgcccaccctctgagaagtgggtctgtgaatttcactggcctgyggccagcagcagcaggcgaggttttaggcacagacatcaagctggacagagtcgttccccacatgggactgtacctcagcagcctgtcccatccttccccggacgccagggcggagatctgtaacttccctcctcgcaggaaacagagcggcagcccggccggcttggtttgttgttctcaaacggttatgccatgcacgcccagcccatccaagaagcctgtgggtcgcctggctcctgcttatcactgaaccagcctgcccagggccccgccccagagggttcatcctctgcttcccccaggctgagaggtccactctgaccatcagtgtctgtttcactgagaaaccctatgctacagtaatgatgatgatgatggtgagagctaacactgagtgccaggtactccacagtcattaattcacatatgcaaacctatgccacggacagcatatgaggtccattttacagaagacaaaactgaagctcagagaggtcacctaatgtgcccaaagccttacagtccccaagtgtaaggttttgtcatcagaattgtgtgtgggtgccatctccgacactagctctatgatccatggctagttacatagctgctctgtacctcaatgacttcatctgtaaagtgcgatactggtgcccaactcacgggcttccttggcaggctgaatgagaaagcacctggcaagtaggggctcttgataaatggcagttattagtatttattgttattaataatattcatgatgaaaagagattcagagttgtttggggacaagggtatcagttacccaggggcacctgggcagtgtccatccaggagtcgaaagagcacaggctttgcagttggcctgacctgagtttgaacccagctaccatgtcctgctgtgtgaccttaagcatcagcggaggcatcggggggcggccccgggggtcccccatgcccacaggtgcctcctcagaacgggagccggctggggctcctcctgaccctctttgataccgtgcttcctgaggggagtgtgtcctgttccgcttacaccccaaggtggaaggggagctgtctggccgtccctggagagctctagagaaggcccttcccaggtccaggctatagggagacccaccctctcccagcacagccacgtgccttctttcccaccctctgcgtcaataaaggccagttctggggaaagcttcagccccgcatctgctccattcccagcacatgcctggaaacacctgcagctggctgggctctgccctgcgtccctccagcactgggctggcaaccgagaggggaaggatgaaagacgagtctgaaatcacggctggagacccaggaagaggcagctcccacagtctgaggccccggtaactgcccccgattcccccggtgactgctcagcaggcaaggaccgtgcctggagggaagcttctggaacattcttcatccaggtggacaggggtgttacctttgagccagggactctggctctgacctccccgatcacatggtgaatcacatttccacatactcacactggttgtttttttaattaagagattttaaaaaaacggctaataaataagtcatcttccctaagacttcctgagaagcaccagtgtacaggcgaggcctgaaacatgaaacggcgggtgacaggccgcgtgagtcacagggcaggcctgggccctgaagccacgtgggtcacctgcaatcccggtcccggctgctgtgtgagccagcaggtgactcgcccctttgagctctggtctcctcagctgtgggttctgcgacgtgcgtgttgcttcgtgtatgttaggccctcatattcggcagtttgttgctgccattgttattactgttggtgtttatattaactgtgaagctcagttttcccatgcggagagtgggaacgagcagacctaactcgccacactgccggaagattcaacaaggctgggcccgggtggcttgcgccatgctggctgctgtcctgatgcccttgtcatcgtcaccataaagaggacagccccttgagtcacacggtacacactatgtgccccactccaagtgctttatatttcgtacttcgtttaatcctcacaaagacttgaggaagtgggcgacattcccatctgcattttatggtccagacaacaggtaacgacaggtaaykacaggtaacgacaggtaacgcggagggtgagtgaccccagagctccggcctgtgcacctgggcacaataaccccttgcacagatggccccagtccagctcccactgctgccctcagactgcactctgatgctgggggagggccctagaggagaattcggtgtggtggctccatcacccctgaagtgtctgtgtgccgggaccaggatcaaggccctaggtcctctgtgaggacgtacaagaccctggaggggcaggaactcgggtctcccagctccaacctacagcttcccccgaatcaagcttccagtgacccccgccagcggctcctccctgcattctggtcctttccagcccagagtcccttccaggggcgcagggagcaatgccctcctactaaaggggcatctgcatcttctcgctcacgggccctcctcttcggccgctcccttctctctgtgtgtctgtctttctgggtctctctctcccacgtacccccaccccacacagctccccgtaacccactctccctttactccccatttctccccgaccccccacgacaacttccgcctcccctcctcttccacatcctgcctcttgtcctccttatcccggctgcctgccgtttccgtggtctatttttgccagcctttgtctttgtttctcttcccccctttttctccagggccctcccttccctcccctgttttgcctcctcctcccaaggcgcctttgtccccaggccctctcgagggcctgcatagcctggcctggccagcaaggcccggccctgctagcaaggcccagccggccagcacactcgctcccggccaccgcgatgccactgaaacccctccctgctctgcagccagaggaggaagggagagcctgggcagaagggacactttttcatcttcatcgctaacagaagtgctcatggctgagtggccacggacagagggacagaggactcagccaggagctgaaggcactcaggcatgtgtctcaaagccagctgttgactaataacactgaacactgcaccattttcaacacgtgaagttaatttaagaaaaaaatgaaaaacaatgacacccggagaggacatggcagtgttaaaataaggacgcttgcaccctgtggatggcattacagatgggctccactctgcgggaaagcaagagagcctcatcgatatccaaagccatcaaaatgttcatacccctgtggccgactaatctccctccygggaatttttccaaatgatctttcatcatcaaaaggaaaggataaaaacgctacaggcacgcagatattcactgtggcacactctattgrggaagaaaagcaggaaacggccttagtatctaaccaaagggagatggtttcatgaaaaatggtgtgacacaaaagatgaccacgtggccactaaaaagcttccatcacggcgaagactaggtaaaacgtcatctccgctgatgacggtagaggagaaaatggaaagaaaccagcatgttcactgtgcctgtaatgacataaaagtatgtgtacagatgggccaagaccaagaggaataagtggaaaatcgatacaagcaatcctcagtagccaaatccatccagctcccgagttcagacagggaagggtgccaaatgatccagatccacgtgattgtggagttggggacgtcaagcggcaagagttcgccaagtgaggaatttatctgaaaatacatccaaacccattcagctggtgtatacttgggtagggtaggatttccatacttgggtgaattgtatgaagaggtttttttcgtcttcttttaaattatcttccatgttccactgatactgtttttgcaattaaataaaggaaaatcagaattctcgtgtccagggctttggagcccacagagggctttcccacacataatcttccctgagcctcacaaaagctctgtaaggaagcagggcagggagttttactaaccccgtttttaccaagaaaacgaggactcagaaagggtgtgacttgcccagagtctcacacagccatgcggtgacagagacgggactcaaaaggcaagggctggcccagccctgtcctcaccaggctcttgtaaggccaaccccagacaccggcactccagccccctagacatctctggagctgtcgccctgtgatgggtgacaccgttcctgagccctcacgaggataatgcctgcaagggtaatggccagaccccacatgggtcaggaacaggaacccaccacaaaacccctaccccagtctctcagctcagcccgcgcagcccaacgagagccaaggctatgcagtcaagcagtcaccagttcaaatctcgacccctccactgtgtgcaggctggaccccttggagcctccacacagccaggagaaaaactggcattacacaggggaaactcttaggatcactagataaaaggagaaagtgtgtattctgcacccagttcgatgcctgccccatctcaagtgctccctatgcctccgtgtcctccttggggcctgtgcatttgctctccttgtctggaatgttctacccagacaccccagggtggctccctccttcaccctccttaaagtttcacatcaagtgttagcctggtagaggactggccacgccacaaacacctgctccctttgccctgtgtgggtcttgtctkcttcagggcccttattcccccgccatgctaggcatttggtttttcgtttttgagacagtctccctctgtcgcccaggctagagtgcgatggcgtaatcccggctcactgcaacctccacctctcgggttcaagcaattctcctgcctcagccgcccgagtagctgggattccaggcacacaccgccacactcagctaatttttgtatttttagtggagacaggctttcaccatgttggccaggctggtctcgaactcctgagctcaagcaatttgcccaacttggcctctcaaagtgctgggattacaggcatgagccaccacgcccgatccatgctaagcatttgtatgctggtttgttacaatagcatcaggcctctgcactgggctctcctgaccacgagaacagaaacatcattcactgtgatgctatattccttgcacacagtaggagcacagaaaaccaatgaattaactactaactggtagtgatgactctgtcagagaggaacaggaacctttagctacacctaacctcttacagcccctgagggatgtcaggctccttgggacactacaggcctctggcacaggcgtgcaggcgtgtccacaggtctcttgccctctctcacttcccctctcactccccagggacccaaagagcaccagtccaaaggctggtactgagaagatatcaagaatcccggtggccggaaacacataaaaaactgtctttctgcagcagaaactgcagatttcaggacatcactggattctgaacccctagaaaaggtcaaattcctagcactggagagctggggaagttcccgagactctccttcccctgtgcctcctcctgccagagttggcatttgccaaaagctcccagcgtgaagggcccttcgctgggcactacgcacacatcgcacatcagctctctccccctccctgaacgagcctgggcagtgccgtttcacagagaagggaggggggctccataaaaccagaagcaggagccaaggccatcccacagctgggtcctgggagaatggtggcctcgtgggtctgtttggtgacagggtgtgctgggttcctgcactctgaaagtcacacacttgtaaagtcttccagacctccgggtacagcggcacttttggaaagagggactcacaaaggagacctctcctgctggtctctcacccaagcccctgcacccaagtgatgtacctgaataatacgctctgactaccgaggagaaaaaagtaccagtgtattgtggtactcctttcctcagggcctggagcctctgcaagtaaagtccccctctgtggggaacaagcactacctcccctcttcacccaccaactccagctcctcctctcctgtgcacatagaagtcacctcctccagaaagccctccctcacccctcaagtcagcctctgagtgcaccatcagcatctgtatgggcacatcgtacccctccttgcccgcctttcytcatgccaccagctagggatgtgagctccccaaggccttggaccagctgggccttcatgggtgcatctcctgtgcctgagagtatggccaggacaaagcagacaatcaaactgaaaaatgaatgaataacaaaagaatgaacgaatagaatgaatgaaagcagaaagaatgggaagagactgaatgaaaaaaaaaatgaatgaaagaatgaagcatgaatgaaactcacaggaaggtctgaaaggccatctcttccagtgcctgccagagacaggaagcaaagtccagcatcaatgacagtggctcacatctgattctacagtggcaactacatcgctctgccagagattattctctccccgtcttccagatcacactgggcctgcagaacagcgaagagccaggagctgtggggagagttcccgaagaggagtacagaggttctgtgccctcccaaggctctcctgaaagtcacaggagcctccctggtgctgcrgtaaagcaaggaagctgatgactgcccaggagtgccaccaaggagaaggggcacacagagaggggatgggggaaggaacaggcatgtcacccttatagcagtcccaggagacgcatatatccactgtttcggggagaaccagacacagaggaggccaacaatcaaaacctgcaggtggaatgagtggatgactacaatgatggctaacagcacactccctccgtgcatcgggcccagttctaagcacttcatacgtattactcatttaatcctccctgcaacccagtgaggtagacactattatgcccagtttagagacagggaaactgaggcacagggactctcagcgggtgacccaaggtcaccmactaggaagtggaggaagtggaggaagaggaatttaaaacccatgcagactggctctggaatatgagcccttaaccccctacggtcgcactctctcagcttcggtgtgctacggtcacggagctaatcagaaccataacaataataacaatgtactcatctttagtatgctaaggtcatgcagccaataaaaaacaataataatactctcagtttactatgcaaacggcgtcttgccaacaataataaacaataaaacaacaataaataaaaataaaataaaataataattaaagtaagatgcgaggctgccagggcatcccaatggcacctccaggttgcaaagagcagaagccgagagcagtcattccatgcaagaagaggcattcgaagatcgtctagtaaccgtgtttgcagagccggaacatcctttttgtttgttgataggggattgctctgagatgctgctgggctaagccccctgaagctgctctctggcaccacagctcttgagcctttactccgtgccaggcaccaaccaaacactttgcatgggttttttcctttaatcctcacacagaccctgtgagagtggtgcaaggaagccacagtttgcasataaagcaagctgaggctcagagtggttaagtgacttgcccagtgtcacagagctaggaaatgatatctgaactcagccgctctctgaccacaaagcccagagccttgcgctctggctctggcttccttcgccttgggagaggagttgctgcctggaagccacgcgggccatgctgcccagcctgcccattcccgccaagccggcccgcttggcaggccacaggctcagaacccctcacttcaaagtgattcaccctcaagggctgtgtggtttggtctggggcctcgggagtggagcagtcagagccccactcggccctgaccacccaggtttgaagcgggttcctcaggacctcaggaayccaggtgccagctcgccgtgaccgcccgggacagccttgcttagcagaggccaccatttctcaagaagtcacgctggggctcccaggtagagcagtgaggctcaggaggmaagggagggtggggagggggcaccccaaagtagcccccacaccccccscggttcactagaagcctcacccctgcagggcctgttctggttctcagggccccccatgaccagaggccaagcacagcccagcaggcgtccccttctgtttctccgagscctggtgtccagagaaacgaagctgcgccagctgcccccaccccagtcccacgctccctccagaagcttccctcacggcgctcaacgcccagtgcggttatcgcctgccgtgcgcctttgaaccccaggaggccggggagtatggaatgtgcgatgcctgaggtcagagctccagtttgatttgagctgggttgagatgaggggaaaatggccaagaacaactcactcatttacttcatttccagacttggcggctgttggggccgggcttccaaaccaagctggctttggccaggacatctgcaacagtgccggccaccaggcacagctggattcgcttagggagttaagagccttcaaggtctcttaagaaattagttcctggggagtctggctctctctggggaccgggcaatgggccggcccactccagcctcacctcctgtggctgaggacacccggaaactctgcgggactggagggactcggcggtctgcttggagagtcactgtgtgcactcaagtgcaaagtggcccggccctgggcacccctcctgaatgaactccagcgaggacccgaagtgcaatttcctagttgccactgcgtctcagggcctaggacgtatgaggtgaattagaaaagaaacccaagaacaaatggatgatccttggtttccacatctgtcaaatgggcgcgatcatatctacctcccagggctgctctgaggcctagtggatggacgaaacagatgcaaggccctgaacacagagtgcgcatgtttgtctctgaattaagtccatcaactccagatctcacagccacttcttgggaacctgaatatctctgagaaagcctggctgtgatggaaaagcctccctttcttcccctaagcccgttcaygtgagtctgacacaccagctcgctctggccagcaggcaatgaacgtgcaaaccaacacgccaagaacagagtgatggccttgcgtgtggcctttgggagcccctctctgcctgtcaggccgggtgccaggctctcacgcccaacccctcaaccctccgcagtaggtctgggagcttaggatcatcggtcccatgacacactcacagcgcctgagtgactcattcggggaagtggcagaatccaggggagagctgggtactcccacctctacagtatggtggtccaagcaggccacgtggtgccaccccagctctatcattcattagcaataccacctccagcaagctctttcgcctcagcttccccttctgcatttgggaataagactacctatttcaccaggttgttccctgtctatgaaaaattgtactcacataactaaataacacctaaaattctcaaaaaaggatctggcatattataagtgctcagttaatgttagctcttactgttatttccacgggctgcgtaaacatacagctaaataaataggccatcagttcccactgagtcgggagggacatcagaagggctgtggtaagaaattacctccagtcttccgaatgggaattctccacccaggccacactgtagaatcacctggggagtgtctacaagctgggacgtccagcagtccacaggcacagctggtttgcattttcatgaaccagaaccacttgcagtattatcagctttccacaattagagttgtaaaatagctcaaagaaaacaaaaggtagaaatagctcggatgagtgagctagacaacacacccaggaatctttctccacccatttcaaagtcgttcgcagtatttcttgacagatatgagctcacaaggagatggatggagaacatattatastaggaaaatttaggaacaacttaaatgtccatcaacaggaaagtagcttaatacattctggtatacatacgcaatagaatactccacagctattcaagcaaatgatgtcggaataaaaaataagacgtctgagccccatacacagcaaatgaatctcaacctctgggggtggagtcaggcatcaggacattttttaagctcctcaagtaattccaatgcgcagctcaagttggaaactgctgctctaaactcgcccaagaaagccttggacagaaaaaaaaagaggttttcaggggyaggaggaggaaggcaggaggggagggagggaaagaggcagggaagagggtatatctgagcagaccccactcctaggaaggggataaggacagaggaataaggaagccaagagttaaatgaatgaggacacccgggcaggcaaagatcaaaggtagagtgaaccccacactcgtttcagaagcccacctggcatcttccagccccatccagagcacgccgagtactggatgcgcacaatgtttccatcgcttagcgtctacaggagtcccatcaatggccttaaactagccgggtctgtgcgcaccaactgcagcagagagccggagatgattacccaatgaccccactacaaaaacccactcctgcctcaagtcccccaccctcgtggcccaaggggraagaggagatgcttgtactgggcggggaggttggttttgcagccaggtgatcgttctccaccagagtcaaaatggagcccaacctgcaacaccctgcgttcggcgcccaacccgtctacccttcgtcggggagacgggttgccatggcagccacacatcccaaacctcggccagagccagggctttctgagctgcaccaggcctccttcacaggcggttttggcttcccgtgcctcccagaactcttcctcgagctggcaagtggaactccacccagctgctgtggccttttcaccaaatctgactttgccagaaggaatgggaacgggcgaggtccgccasggaagggcgacttccacctggtgggcccctgagctgacctggagttggtggaaaaagatgatggccaaggacctgaaactatctcggtgacttggcaaaaacgctatctggtttgtccgccaatgaatctcacatctcgcagaaaccccaagacacagtaggtgtttaacaaatattaactaatttattaagcttgaaatgattacatacaggattgaactaaactggatgccaccttacacaagttcccagtttatgacaaaatatgttgggtggaaaacataaaatgcagacaattccatccccttaatttcagtcctttgatttggataaagatcgccactatctgcctggacagataacatgctgcaggacgggttgcgaaattctagaagcagagtttataaaccactgtgctatataaatagcaaaagccataagtgaccaacactgaggatagctggaggaggggatggccgagaaaggtccccagactggactgtgggcaaggctgctactccaggcagcaggcctcaatgggcccaatcaatccccacaaaacagtgggcagctgggggagggtcagggagagggagaggragaggaagaggaagaggaagaggaagaggaagaggctgcgggagggagagaggcaagccaggaggcacttcggtcttcagagctgccactttcctgaatgtattagagcagacacagctctctcctctccctcagagttaacggccaaagttcttacaaggccctacaccatctgaccccactagtgactcacagagctcacctcctgccaccctcctcaaggcacattctgctccatccacatttacctccttgcattcctagaaaaaaaaccaggtaaattgctgccccagggcctttgcacatgctgtggatggctcctttacctcctttagccgctgccccrtggcctttgcacatgcacagcttcctcccttaccttttccaaacctgctcaagtgtcacctctcatccagattttctttggtcaccctattccaaaggccaccacacacagacgccacaccctccccattcataccaatacttctgtcctccctcgtctgatggtttcctccacagcacttagtggcagcagacaagattctatatttccgtgttcattttccyctcctccagtagaatgggggctccaagtaggccaggatgatgcctgctttgctccgtgcctgcaatggtgcctggtgcacagtggacgcgccaccgccatctgctgaacggacgagcaagcaggcatgcctgtgcaccaacagcgtcccatgacctgcctcgctgaccccagggctgaccctgtgagtcaggccctatctcacccccattttacagttgggaacgggctcagcttaggatgtggtggagtytggattcaaacccagccccagtgactccgaagcccgggtttgtcaccttctccagcaatgggaagatgcagcctgcatttcctgcccaaagcacattatgctcctagctctccctcttcctgtcactgtgaaagggaagctcctaggtgggggargggcaggggcttccccaacacacaccgtcctcctgggacacgcatgtccaccaggctcaagtgggaacagaggtcctctctccagaagctacttagcaggtgaccaactcccagtctgccccatgacttaaaaggccctctgctgtctcaccctcccctccaggagctcctcctccaggtacttaggcgcccagcacccctccaaagccaagcacccactcacctccaggccttagattgcctgcccaccagcctcactctcccctgctatrataggcacaataatggccctaatcatcctactcccttcaacctgtgactatgtggcctgacatggcaaagggacccttagagttgcttaagctgaggatcttgagacggaaggtgcccctgaatgatctggtgagcccagtgtaaccacagggtccttataagaggcggcagggacaggcccggtagctcatgcctataatcccagcactttgggaggccaaggagggtggatmacttgcggtcagtagttcgaaaccaccctggccaacatggtgaaacgctgtctctgctaaaaatacaaaaattagctaggtrtggtggcgcacacctataatcccagctactcaggaggctgaggcacaagaatcacctgaacccgggaggcagaggttgcagtgagccaagattgcgccactgcactccagcctgggtgacagagtgagaccccctctcaaaaaaaaaaaaaaaagagggaggcgggagggccagagccagaggagatgtgaagactgaakcagaggttggastgatgctgccacgagggaaggaatgcgagcagcctctagataatggaaaaggcaacagacccttcccttaggcttccagaaagacaacacctcaactttagcccctacgagactcactgtggacttctgacctccagaactgtaagataataactttgtgttgctttaagccacaaagcctgtggtcatttgtcatagcagccacaggaaactagtgtacccatccccccaagacctcagttgaaacagcaccctctgggagccgctctggccctggcatggccccatcccacgcagatgctccctggacttcctctttcataattatctgtcagtgttacttagtcaagctctgaagccatcagctcacattcaatttcagtctccgcttctcacaagctgtgtaacgttgggaaagcttctcagccttcctgagcggccctgtcctcatctgttacacacagtcgctcaaggccctcacctgtacacctgccatgaggctggaatgagggagctcatgcagagacagggcccggcacacccagatgagggtgacacaacaatccgtaccacctgccagaccatgaggataatggagactgtgcctgtctcatcaccgcatattcctaagagccccagacggcgcccagctatcaggyctcaacaatatttgttgaataaatcatgagtcccacagccatcaaaaatctcaaacgcaaataggagggacaaaccatgtgcagctgagggagacagccgggccaaagccctgaggtgtgcacagcttctccagctccattcaatggcccaccactagttcaaactgggcagagcagctctcaccgatgtcaaagccatcccgtgaaaacactgcattcagcctcaactttggaccccaccctgacatcacacacaggcttctytcccactctgcttcagctgaggtccccaccaggagggccaaggggagactccctccatgataagtgaggcaaaccacccccgtcctttcccaacaatgttggggaaactgatgtcatcataacagtccccttgcacaaggtggctgtaaaggtaaaatgagagaacgtgaatcagtgcctggcatacagctggcaccccataaatcccaattagatagtttttaattattttaccccatagcaaacacataagtagcaacaggtgccccttccaaaatcacctgcaaaacaacagagggaggctggagcagcagaakgggtcagggctttggactcagrtggagattttattattattttttgatacagtctcactctgtcgcccaggctgaagtgcagtggcacgatcttggctcactgcagcctctgcctctcgggttcaagcgattctcatgcctcagcctcctgagtagctaggattacaggtgtgtgtcaccacgcctggctaatttttatatttttagtagagatggggtttcaccacgctagccaggctggtctcaaactcctgacctcaggtgatctgcccacctcggcctcccaaagtgctgggattacaggcgtgagccaccaygcctggcctcagatggagatttgaagctgagagagcttgggtaagttacctgacctctataacctgtttccctatccacaaaatggagataatattacctaccccaaaggactgctatgacccaaggaaatactgcctaccactcactctcatgttagaatcgctcggaaaaggctatggcccagacctcccccagaccaaagccatcagcgtctctggggtggggcctgggttttgggggttacgaagawccccaggtgatcccattgtgcggccagggctgagaaccacacatgcttatgtggacctggcacaaagtaggcactcaagaaatccaagctttcatcattatttctcagctggccaggattttctttcattcattcagcatacatttgtagagggcctaatatatgcaaatgcaaatcaaatttaaagtcatatgttggttttcaagagccgggggtagggggaaagaggagtgactgttaacgggtacaggatttccttctggggtgacgatgttttggaactagacagaggtggtagtggctaaatatcactgaattcttcactttaaaatggttgattttatgttatgtaaatctcacctcaacaaaaaaagcaaaataataataatcataacccagacacgaaaaagacaaatcctatattaacccattcatatgtggtccctaaaggagtcaaagtcatagaaaatgaagagagaatggtggctgccaggggctgggggagggggactaggagttaacatttaatggggacagtttcagtttgagaagatgagaaagttctggagatggatgggggtgatggttgtgcaacaatgtgaacgtactcaatgaactgcacacttaaaactggttaaaatggcccattttatgttacgtgtattttatcaycatttaaaaaaaggtcacatgctgacagtccctcaagacattcattgcccacctcagctacctgtagcccccacctccttaccataggagatgacatcttcccagtttttccaggcgagcaacttcragtagctgaccgccctctttacaaacaggatggaggctacgcatgtgttttctctgtggggcaaggccagattaagcaaagaaaacacagcagctccttccccctccccccaggaaaaaccctgtccggtcaatagcagaactaaagagctggtgcacactttcacttcccactcgagtgcctgmggacccggcttctcctaggcgtccagcaaagcccagacttaaaggtggcaggtgctgtcctctcaccctgcttcgggtgaggacgggtctccaactgagctccaatgaacaagacgaggctgggctggctccaggaggcaatttctggctgggaggtggggaagaaagacccagaagaagggcagggtgtgacagagggacctgaatcccagagccctgggtctcctgctcccctccctgagtgcctctggatatggcgcttccaggctggccctcaacgtccacacctataggaacaagagaactgaattcaagtgggaaaagcaaatgggtttatctcaggtgccaacttcttcccaccgggaggctctggggtggctgcggctctgcagggcaccaggaggaccaacaagggctggagggtggaggggaccacacatggtctgtgcattcaccatccctgcatgagatcccttccataattcctcaatggaattccatgaatgtgctttctggatctagaacgcactcggtggcctccctgactgacacatgtccatctgacctttgcttgcacacctgctttctcagggagctcactatcttctccggcaggctgctcctctccatacaggacgccaaaatctckgccctacaaccccttcccaggagctgctggcgccatgcagaactgtcggctccctgttctactctacggcttgctgataccttaccactccctctgcccctgtaaaagccttgcttccttccactgtgctacatgtgagtggctttcaaaggatggcctgttccggaagcttgagggaatrcccacgcaatgtgtctccctgaccagccttcgccttcccaagagtgaagtggagactggccctgggatactttctggggtgsgggggaagggcagtggcagagatggctagcgtggcccatgccaacaccctattctggcctcctctcccttctcwataataaaaatcctgctgtggggtgggattcatggctcccacttacatttcccagatgctcttgcagccggggatgccacatgatggtctggccagtaaggtgaaagcagaagtcwccttaacagggcagaagtccttttccactcccctgccactcccactttctgctaactggaatgcaaacgaaatggtaagatcccatttcccactaactggaaggcaggcaaaatggcaggaacttgagcctctcttggcccatggtgctaagaacggaggagcagccacatggaggggccctaggccctcaaagccacaggccagccacggcaaccctcacacgacttagaccctagatttcctttatacgagagaaaacaaacaagcttctgctgtgtttaagctgctgcatttttaaatattatatgatcccggagtcttacatgcaggagcaaggagttctgagtgctgatgacgacagtccagccgccttcacacagggagggcagccattgccttcagtgggaaaggaggggacctggatgcacagtccataccctgccctgtatctacsccttaagaattcaggctaggtgcggtggctcacgcctgtaatcccagcactttgggaggccaaggcaggcagatcaactgaggccaggagttcgagacgagcctggccaacatggtgaaaccctgtctctactaaaaatataaaaattagccaggcgtgggtgtggtggtgtaagcttgtaatccccgctactcaggaagctgggacaggaaattacttgaacccaggaggctgaggttgcastgagccgagaccacaccactgcactccagcctgggcaacacagcaagattccatttcaaaaaaaaagagttcagggccgacatttccaagcccratgtgtatcttcaaaatcagaagatagacacaaccagctgccrtttttcaagcatcaaccatatgcccaggtgctcagctcaacgcggcatgaattagccccacgagataaaaatggtcctactatagatgaagcccaaagaggtccaccaagttgaggctgaaacccaggagccctgacctccacgctggggctggggtcttttcattcatcttcaccgtctcctaaagatccttagggagcctgagaagctgaacttggctgacgtcgsgaagtaaggacaaaaggaaagaaggggtgggagggagaagaaacaggaaatgggagaaactcttggattcctgtaaatggagattatctatgaagatgttcactgtggcattgtttacagcagcaaaaatctagaagcaatctagaagaccatcaacagaatgcataaataaatatgccacggcttcttcatacaatggatctcatatacagaaagtaagcaaactaaaaaggcaagttgcacaagaaggcccaagtaatgatactatttatatgaaactttacaatctaggaaacatggccactctgcagacaccggcgccgtcgggaaacctgttctatcagccatggtcaaccccactgtgttctctgacatcgctgtcaacggcgagcccttgggccgcatctccttcgagctgtttgcaracaagtttccaaagacagcagaaaactttcacgctctgagcactggagagaaaggagttggttataagggttcctgctttcacaggaacattccagggtttatgtatcagggtggtgacttcacacgccgtaatggcactggtggcaagtccatctatggggagaaatttgaagatgagaacttcatcctaaagcatacaggtcccggcatcttgtccatggcaaatgctggacccaacacaaacggttcccagttttccacacgcactgccaagactgagtggttgaacgcaagcacgtggtctccggcaaggtgaaagaagacgtgaagactgtggaggccatggagcactttgggtccaggaatggcaagaccagcaagaagatcactattgctaactgtggacaacttgaataaagtttgacttatgttttatcttttttttttttttttgagaaggagtctcactctgtcacccacgctggagcgcagtggagcaatctcagctcactgcaagctctgcctcccgggttcatgccattctcctgcctcagcctcccaagtagctgagactacaggcgccccccaccacacccagctaattttgtttgtatttttagtagagacaggatttcaccgtgttagccaggatggtcctgatctcctgacctcatgatccacctgcctcaacctcccaaagtgctgggattacggcagtgagccaccacacccagcaacttgtgttttatcttaaccatcagaccgttccttctgtagctcaggagagcacccctctgccccatttgctcacagtatcctagaatctttgtgctctcactgcagtttcctttgggttccatgttttgttcccttccatgcctagctggattgcagagttgagttaagtttatgattgtgaaataaaagctatataataacaaaaaaaaaatctaggaaacattatggagtgttctataagagtatgtagttgtacaagtacaaaaatatgcacaagaataaacatcaaagtcggggcagagaaaaggaagggtttgaaatcagagaacgrtacatcaggtattgcaactggaatggtttatttcttccgctgagtggttacactgaaatattattttataccctgctttgcatggctgaaacagatcatcattttaaaagcaaagggagaatatgcagtttattgcatgtcaactttatctgaaagcaattttttttatgcacctagagagaaagagacagagagagaaagagacaggagggagggagggagagaagggaggaaagggttaaggcctccagacacagcatcttctcctcatggcccaccctcctctccagagggccagccatgctgaccacagcagctccattcatgaagccacaaggccacggtgaagagggccacttaaactccatgttgctgaaggctccttaagtgaagtgacatcccaaaccttccaaaatgagttaccctcaggcctggccacccccagaaccacattcagtccaccagcagttctgcaaagacaagcactggtcgactccctccccgccygccccccatggctggaggcagggcagccaggctggcagggcctaggcacagagactgtcctgggctggctcccctggcaccaaggaggcaggaagggcgtgcaggagaggcaggaccagaggagagggagccccaggaggagggcgccatgagcacggccaacactgaggcycctccgcaggcggacagtggttcctccacttcccccatcattccccttccacagaagtgcggtgacayggaagagaccacacagtaagaagacaccaggggctggggctccctgctcctctgacctgactcagttcacccctgggatcctcacgcagcaccycccaccagaggtgtggtctgaaggtagggagaagccaccatgaacccctcacatgaagcagaagtagtgtgcgacgtgcctacctggtggcccccggtaagcaccagatgaatgggaggaagggagtgaaggaaagagagagcggagaaaggaagggggaagggaggaatggaaaaagagggtgcaggagaaagaagggggaaagagaagaatggagacagtagggagagagggagggagggtaagtcagtgacagacaactcaacttaaggagcagcagctggactcccacagtcaccttgccctctccaagcccgrggggtacaaagtccacgcccacaagctctgagcaggggrgaacctgagtacagtgggctaggaggctgggggagtggagaggccgtgcccagcctgaaggggtggccacacaggaacatgggcacagccaggagtgcccggttaaaggcctgcctctgcttctttagctgtagaatggggatgatcacaggaagcaccacctcrgaactgtctggggatcccaggagcaaagggatgggagtcgtctagagctgagccaggcctgtggtaagtcacatagaaatgtttgcttctgttgttattattagaaaatggatatccggaactttttaggggaatgctcccaactttaaaggcagacaacttactgaagctttaagaaaaaaaaaaaaaaaaaaaaccactgtgtggsccaagtaaaacacgtcagcagacttgacttggcccatgggtcatccgcttgcagcttctgctcaatgcgtccctgcgtccccgcgtcccccaaaggcaggcccaagtcctacaggggtcgaaaatcatgagtgagatttgagatcaccccattccaacacaagcgtccaagcccatgaatcccttaatgggaaataaatatttaagtcaacccccgcccaactcccacaccaaaaggacaggaactgctaattcttacccactacaaccaagtctccagttttatttcataggatggaaaaaaaaaaaaaaagacctattttaaaaagaagaagaaagggaaaaagaaaaccaacaaagacaaattcaaaarcgcaccactgttgacttgggcaacagcctctgccgggtcaaagaggaaaacagctcagtcctgaaatccgtcccagacatggaaattacagagcggcccctgctgacaccccctgccctttctgtgtcattccctcatgaggaatgcaattatatgccccccacggcaaacacgaaggaagacacgtcagtgacagccgcagcctgttcacgtcgtcctgcagagacagaggccgacataagcacttgcaggcggtggccaccagtgcagcaggagctgaaggcactgacctcagaggaggccgggcaggaggcaggggccgcaggcaggctggtggtgtggctgaaggtgctatattcactcccattttatagatcaggatgctgagggtatgcagaggagatgggatctatgtaagcttggcccactggatgcaaggcgaacaggctctcctcgcaccttcagggcaagcagttaaacagaccagcccctcacacactcactgggcagctgcggtgtggccaagccccgaaaggaacaggacaaagtactgggcgcaggctgcagatcaccacagatgccacgatgtgcccctggatgtccctccagcctccacaccccactgtgcacctcagccaccccagggcctctgcactcaccatcccaacggcctctccacatctgcacaggatcagctcctgcctccaggccacctcctgaggggcctcccatctctccaccccttcaccctgcccctctactgtcctagcacctgccacctctgaaggggctctggtgattggctgacacatttgcgggtgccacccccagtgaatgctcaggttcctgagagcagggcccatgttggggcaccctaggacagggcatggcatgtagctgacactcaacggtgtcaagtgagtggctgtgatcastgcctacaagacccaggggacccctggggagatgggccactcctccacgcatggggcacgccacacacaggataccagaacgggcggccagatgagccaccatgaaggacactggaaatacgaacagctcatcttcacgaagcacttctggggttctgagccttgctctcaagttggttcatacatcctctcatggaatcctgaccacaattccaggtcataaacactgctgctaatctcatcttatagacgaggaaactgaggcagagacgtcacacaacttgcccaaagttacatatacatcagaaacacaaatgcaataagtgagatttcaaagatggcgggtgaggatgtacctgtgtgcacgtgcatacatgtgtatactgagagcacatgtgcatgtgcgtgagtgtgtgtgtacacggcatatacattgagtgcatatgcatgtacatgtccgtgaatctgtgtgtgcacctgcagcagtgccccctgagctgaggtttcactttctgcagtgtcagtgacccatagtcaaccgcagtctaaaaagattaggtggaaaattccagacaattctttagtcttcaatcccacactgtcctgctgcatcttgtccaggacgtgagtcctccctctgtccagtttgtccmcactgcatgtcctagctgcctgtgagtcactcagcagccctctctgtactcaattccactgccatggtatcatggtgcttgtgttcaagtcamccttattttatgtataaattaaactttatcaccagtatgtacgcgtaggatgaaacagagtctatgtagggttcagtactctccaccatttcaggcatctactgggaatcttgacacatatcccccaaggatgagagtggactactgtataactgtgtgtgtgtgtgtatttgtgtatgcatgtgtgtgtgcacatgtgtgtatgtgtacactggtatgtgtattacatgtctgcacatgtgtatatgtatgcctatgtatctgtgtgcatgtctgcatacatgtgtatgtgtacatatgcatgtacaaatgtatgtgcatgtacatgtatgtgtgtatgcatttgtacgtgtatatgcatatgcacatgtatacacatacatgtatacatatgtgtgcacctatacatatttatgtgtgcatatgtgtgcgtgtgggtacatttatatgcatatattgtgcctgtgtgtacaagcaagtatayatggtatgtgtatatgtatttctatgtgtgcatgtatgtgtacatgtatgtgtgtgcgcatgtgagtatatttatatgcatgtattgtgcctatgtgtatacgtgtatatgtacatatgtatgcatgtatatgtgtatatgcacaagtatgtctacatgcatttatgtgtacgtgtgtgtgcatgtgggtatatttgtatgcacgcattgtgcctgtgtgcatgtgtgtatgcacatgtttgtgcgcacatgtgtgcctgtgtgcatgtgtgtatgcacgtttgtgcctgtgtgcatgtgtgtatgcatatgtgtgtgcctatgtgtatgtacaccaatcataacactcccttttctttcccaagaaaggatttctttttgtactgatctyaggagtttcagggctacagcgaagagatsacatgaggaagtcaagaattgtgtttacttacaaactatatggaaccaatatttaatcattttctacttacaaaatcccaattttggctgggcacagtggctcatgctcgtaatcccagcagtatgggagaccaaggtgggaggatcccttgagctcaagagctcaagaccagcctgggaaacacagcaagatctcatttataatctttttaatagcttttttaaatctcaatttcctatggctccagccagtataaccccaagactccaccttcgtggtggactcsaacctccaggtggcctgtcagcagcgcctgctcagatccagccttatttttagcactttctccagacaacccaagggaaaagaaagctgttttgaggtcaaacttctgaaacatctgtctctgtgacccggcctctgtgcaaacgccactactcccaggacatgaaaagcaccctgcagatgcccagaaccccagccaccacagccagcaggctgcacgtgcaaagaaggctctggacccaagctgcctggacggggcgcctggatggggcacctcttgaaccrctggggctctctcccagcatccctgcggcgcctttgtctcaaatgtggaagcagcagagagctgaggccaggggccgctttatttccctattgctttcaacatcttcttttgaaattctctttaaactgaaactgtcaaaagttgtgtctgataaatctgaaggttgtagaggaagtggtttgttcttcctcctgctcatgatttctgcacaagatagtacacagtacttggtgaactgtcaggcaaggcaagagctcccagtgagggccagaggaaatgcaggagatcactgaggcctgctctttacctgctgctgctgtcagacaccagacaagrtcaagggtgcagcagacaggaggaccccaaagaaggccctcctcatccctccccatcccatcctccaagacattcagggaaatgttcaaacagaactggcctggtggctctgatactcccacggcagcctggctgtygggtgttattatcccattttccaggtagagtttaactaacgtaatcagaatgtaaataacatgctcaacttaatttcaataactaacttgcccaatgtcacacatagtragttctctgaagaactgtgaatccacagttcaggcaaagcctgaacttaagaaggtctgactccaaagcctgacrtcacctgccctgggaagccctctctggcccctcagaccttgggtgtagtcaggtcccctcctctgtaatcttggtaacagtagcaatgacagtggtaacggcagtaataagagccctctgtttttcctgtatactttctctgtgtcagacacaaggctaacaccagatgtgcattatctcactgaatccttcacagaagcccatggagttggtaccgctatctgccccattgtactgatgaaaaacaaaagctcagagaggtgaagttacttgaccaaggtcacacagcaggcaagtggcagagcccaaggtagaacttccaacatgctgttttgattactggcctgggctgatcccagttttcctatacgtgacaattctttgcattatcttgggtctagatgcttctagtccagaatgaccccaagggctgccagcccctttgggtttccccaccaacgtcaaaggttgagggacagaggacatttccctgttggcaacgaactgggccccacactcctgatcagctcagccattgccaggttcttgggcctaaggttgatccaaatcggggcaaagaattaggtcctctcaaagcggagtaggaaagaacaagacgttcatggggccttcctgtaattcggcttccatgttgaagtccaaagtcccaaggccagcatgcaggcagctcactgcgtccgccctccacaattccaccagcccccagcccactcaatacacctgaggcctatggagcgtgtgccaggcctcaccaggcccctcggactttcccaatgctgtgttctgcccagaaagctcctccctgctttctcctcctggcctgagcggacccattcttggatcagcagccttctctccagggaccctgctgcttcccacgagtgcccaccctgagtcaccctcgtttgcgggcactggaaccgattgtccataactctcttctcccatgctgttgtctccacactcccaacccttagcacaatgcctggtacccaggaggtgccccataagggcatgcttcaggcacgatgcctaactgctgaatgagagaacactctgaaagcacagagggcacggcacgcgcaggcccctgcgagaggcctggggcatatctgctcacttctcacttcgttctcaccctacaaggtgcggaaggttccatccttgccctcaatttacccgcaaggagagggacactcatgcagatggggccgcagagctggaattccagccccggcctctctctgagtttgcgctctacttccagaaaacggacacatcacctgggggtctgagtgggcagtgggagagtgagcacactttacagtttatcttgaagacaggcttgggagcctgagatgaacatagagaaccatggccttctgcctccccagccctctggcccctgcccaggaaagcccgctcattatcttgggctccaaaaagctacccaaaaggttgcccctgatcgtgcatttcaaagacttgttcacctggactagaggaccacaggagccccacattagaaacaaaggagcaagggccgggcatggtggtgcactcctgtgatcccagctactggggaggctgggatgggaggatcgcttgagtctgggaggttgagaatgcagtaagccgtgatttcatcacygtactccagcctgggaaatacagcaatactctgcctcaaaaaaaaaaaaaaaaaaaaagaaggccaggcacggtggctcacacctataatcccaggactttgggaggccgaggcaggtgaattgcttgagtccaggagttcaaaaccagcctgggcaagatggcgaaaccccattgctaataaaaatttaaaaagtagcyaggcatggtggcacatgcctgtaatcccagctactcgagaggtagaggcaagagaatcgcttgaacctggaaggcggaggttgtagtgagccaagatcatgccactgcactccagcctgggtgacagaacgagactccatctcaaaaaaaaaaaaataaagaagaaaaagaaaaaaataaaggagcaaaagagaagaggccaggaaaagtaaaaacactaaattcctcttttttccagaccaaacctggggtataaatgccatttttgagggtggcgcattcaaatcctctcatcttctcacaggaggcctttacggggtaaagagaaactgaggggagcctcacagagggggagaggcaccgctgctgggggcactgctatagaggctgctctatgttaagcccctgcctcactaggcaggctttgtcccaccttcccaacggggcagaaggttgtcaagcgcctcatctgggatgggaacacmaggctggggcactcagactggttgcgggatgtgcccaggtcccagagtgagtgttagggaccggtgacaaacatgggtccacgtccagcccaagggcgtgggcccayatcacacaacctcgcctaagccccttgcctggtgggatggaaactcgctcaactaaaaaaaacttctagagcccaagaagatccttgttcctgcccagcgaggatggacagcttcaaagggcagtttgggggtttctgtttattttcctgtatgttctggtcacctcaatcatctaaccagaagaactggcccaaaattaggcacaagaaaaaaggaaaaagtctagccctgccacataactcctggaactggttgcagaaactgaactttggctttctaaacttggtgaaggaacaacagcctctttcaagcaaggcccttttgttcctagttcccagggaggaggcagaatctttggctgaacaaattcggttcagcccaagtctcccagggaaacggcgctgtgctaagccccccatggtcaatgcattaacttgctcctatcccaggcagatcaccaatcaattggatggcattggttttgtaatttcaaaagcatgtagccatcagattcattatgcaatcatggcccgttcgtaagtaataccaataagaagtgcttcctgagcaatgtctcagttatgcctcatgataaccctgtgatgtagacacacccccatctttcgttacacagacaaggaaactgaggctcgccaagctcaaaaccattgccaagatcatcactagtaagtggcagagctaagattcaaacacagcaactgcacatccctggcctccaatcaaccaagaaacagccaaatgaagtaatttttttaaaaagggaaagaggccaggcctagtggctcatgcctgtaatcccaacactttgggaggccaaggcaggaggatcacttgatcgcaggagttcaagaccagcctggacaagatggcaaaaccccatctctacaaaaaatttaaaaattagctggatgtggtggcacacacccgcaggcccagctactcgagaggctgaggtgggaggatcacttgagcccaggaagctgaggctgcagcaagctgtgattgtgccactgaactctagcctaggtgacagggcgagaccctacctcaaaaaaataagacaaaataaaaagtaaaaaaaaaacaaatgaaaacaagagagaagaaaagaaaaaggaaaggacaaggatgtatttttcatcatcgacttcttgccacctgaaattaccagcttcttctctgcaagggttgtctccccgactggaacgaaggtgttctagtggggctgtgtttggttcaccccacagcccagccctcagccgggcacctgacacccagaagaccctgagcgaaggtctggagcgagsgaactcacagggccctgctgtctgagccagggccacaggcacaacccctgcctttcccacaggtgacagcaaggacagctcaccgtgctgggtcactctgcccagtcaccaccacaggcgaaatggtckagccagagaggccctctcacggttcagctgagccaggcccaaggtcagctcgctggggaatttctctcattcgttcattcaatcgatcatttcttattagctcattcaacaaatacttattgagcactaaccacaaccaggcattgtgcgaggcagccttcttgggacagtgagtgttagggactggtaacaaacgtacggggtccagtctggggacagagaacaggaaaaggaagcaagcayagcaggacacagcgtcagacacggggtgcatcctgcccctatcaaggacgcaacctggtggtagtgaaagtccagctggcatcccctccctccacagcagggcctcaggcctggtttatatatgtttctaaatgaagatccagcccacaacaccaaagactgtccaggtacagcatcatcaagtatggatggaaaaaacggcacatgcaaatgaacaccctacaaaaatgttaattatcatctctggctgtcggcattctaggtggatttggttttcttctgtttatttgcgttatctaactgtgctacaacaaacccgagttctttatgtaatgggtaaggggggtgaacatctttaaaaaataaatgtccgctcgtagatgtatatccaaaagaaccaaaagcaggggcgataataaatacttgcaccaatgttcacaggagcgttacccacaacagccaacaagggaacaactcaagtgtctgtcgaccgaagaatggataaatcaaatgtggtctatccagtcaatggaacattatttggccttaaaaaggaaggaaattctggcatgtgctaaacatggggggaacgtaaaaacctcacactaagtgacataagccagacacagaaggacaaataccgtatgattccacttagctcaggtacttcaataggcaaactcatagagacagcaagtagaacagcagtgaccaggggctgggacgaggagagaatgggtacagagtttgtgctgggratgatgaaaaagttctgggtgtagacagtggtgactgtgaatgtatttaatgccactgaattgtacacttacaaatggataaaatgataagtattgtgttatgcatattttaccacaataaaaaaatttttttaaaacctcagaacttcagctgccaaaacgaatgaatgaatgaatgaatgaatgaatgaatgagaccttcactcttccctgatcaagattttcctggttgcatcatcaaatagacaaagtgagaaaacagcatgctgtaccggggtagggacagcgactggggcagtctctctacctgggcctcagtttcgccaactgtgaaatcaaggcayctgccccatcggaccagatgtggagcctgtgaccagatgtcatctttcctctcttcagtctcacagctaattctaggaaggtgctggcactaggaagagctctggcttagccagccacctctcactgtgcccacgccacttcccytgggagactccttttctyacctgtgaaatgcggagactaatgacaaagctactgtctctacccctgcttcccttacacactggctgcggctccctcagargatcacaaaggtgaggtggatggagccctagcttcttccctgagctggctgcctggaaaaagccaccccggccaggtaactcaagggactaggaaaatcctggctgcactcaagcttggcaaggaggctgaggggcaggagaaatgaaggagaactctccaaggcctgccttgttgtccaaccaacacctacttcatttttccttaggtggaaccatacaagagtgggcacataaaggacacctgggaagtcccctgaggtctcaggaaaagcagtggagcctaggaaaagacacacgagctcgagtcggcctgacctgggtttgcatcgcagctccacaacccacagccatgtgaccctggaggccaagggcctggggtacctgtcccctctcttgtaacacggggacactgcccacccagggggctgaataagtgcctggcacatcataggtgcctgagaaatggcaggttccattatttcacccggtccagccctggcaatcggtacccagctgggcagagagccggcttgaatcgtcctacaaaatcctcagggaggagagaggactccatgcgcacagcacgctcataaaaacaaatctgagaataaaaaccacaaccgccgtcccgccaaacgtagtgggagtaatgaagcaaacaaaagggaaagttcaactcctttttttggctttagaacatgcaaatgcaaaattcagtggcaaaggaattatcccagaaaaattccatgtctaaatctgaaatggccccaaggaactctgtccctctctagtcatttaagtgamgttttgctctagggtgtggctaaagatcggggccagccaacctggggagaaacaaagacaatgaggaaacttgtttattggggtccttaaaatgttaacaaccaaggaaaaccctcagcttctcttagtggtgcttgcttaccattgctgaaggtgaagtccttggtatccagaaggaaggagcccattagacctgcactcatcgtccactgctccattcacatcagctgaatttgccaggtagcctccatgatagagactcagtaaaggatccatacttcccaaattccaggcgttcaaatgccaagactgcctttgcctctgtggatactccctgggcatattttctcatgcttagtattctttaatcgttggtcatcaagggtttgtggtcactctgtccctctgctttacaggtcagggaggtgaggcagcccaaggtcacactgagagccagggcaaagctgagcagtgagccaccatctgcctgattccagcagaacagccctcggactcaatcacaacgcagctccagtgatgcactacaccttatcagagagtgaagaactgctctaaatcttaaaacaaacattttaggggcaagaagtgccaaccttgaaactccagactgggataaaagaaaaaatatttcaccataaccaagaagactaaacacagctcaagcaagtacagaaaacgctgcagggaccagccccacacttacctggccaaaggagcaaaactctgaataaaaaccttgatctttctacttaatgaaacatttttttttttatcacttacatgtttatttctgtgcaaagctccatttcctgctggggaagcgtcactgaccccctagcctggtttattgccctagagagggaggtgtccatgaatccctaagaatgcctatattatggatgctaaaaaacacatagttgctaagttttataagccctgctctgtcttaccattttgccagcccaaggatccatagctttcagcacattttcaaagggagtatgtcattcccaaatctagacccagtaccccagaacatccattcagcagggaatagtctgtcattttgatttttggtgactgtgacaaaggactcactgaccatccacccagacacaagaatggaaatgagaccaggaatgaaagaaaaaataaatcacttcccaaagcaagtcatgggatgcagaaatggaccaaaatttaagtggatatgacagaagagaagtaaaagataatgatgacaacacagttccatgggtttccgagaaggaaagaggaagaaaactagcctcatctttatgagggcagccagctccatgagaactgcctatgcagctcaccgcaacacgcaatgcctagaacggtgcccagcacatactgctgaatgttggataaatataccatgtcatttactctcacaatcctgggatgtagggatgggaatttcagtttccaagatgagggtcagagaactcatgtgatctacccagagttacaagcaacaagaggcattgctgggatgtgaacccagatccaggcactgctttgcaaacccaggtgctttcctctataccacactttgtttaacccaaaatcatctcttaagagcgaacaccctggtgtggagaaggcttcaaaaaaatcccactggctcccttgagggtcatttaacgactctgggccttaagttcctaatctatgcagtgaaagaagctgggctacatcaagaatggcaaatagggtccccgttgcatgccaacaacaattgattattagtggctgtctctgagctcactgggaagactaattacgctagggttgattagcaatgtctaccacggtcaaggcaatgaggagtggcagcacatgtgtcacttatttgccatcccagaactagatgaacttcaagttctcttccaactatggctggctctgattctaattataaaaacaaaaaaagggggaaggggcaaatggagaaggaaaaataggctaacattttccaacatgggccatggctgaattcagtcaaatcaaggctgtctgcccagccagcccctcatgctccatgcacacagccctgccacatgggaggaagtggaaaacatcagatccactgcccacatactcaacaagacacccaatccaagccagaagctgcagaacaatgggttttgcctggcttggccttagttgtaaaacacctcaccaggaagcgtggtaacctcgcatctgggctcaaacctgggcgggacctcttgcccatcctgagccttcacagattactccaactctctaagcctcagtttccttcatcattgaaaaacttcacaggattgtcataacgatcacatacaacagggcatcaaagttcttcacaacaaggccacagtgggtaggcaaagaaatggccactaccatcatcaccgtcatcatcaccaccaccattttgctttgcagggggcaaattttcagaaaagagtccaagtgcaagagattcttttgtttctcccacgttcagcatgatgcccatttggttgctctgaactctaaagggaagaggctctgaacaccactccatctcctcaagctcctggtgcatcagccagggtcctgggaggaaacagatggcagaggaaattttcacaaaaggacaatatattaaggcatgggcagcgtacaggggaagcacaaaagatggtttttctacctagggtgaccagccgtccaagtgtgcccaggactgaggggcttcctgggccacaggactttcactgcaaaaacctgggacagtcctgggcaaaccaggacagcagtcacttcatttctcccccatgtatttctatccctgggcctgacactgcaggggaaggagcagttacagaaaaacctgggtagagggagtgacatgactgcaggagtggctgagggacgccacccacccatggcaaccgctggcaacccgaaggaaaagggaggagggaataaatagcccactcaccctcctcccatcctccatctcccccaggctctccactggccagacccacccagaaggcaggggagcagaaaagaatggagggtggggtttccaaggcaaaggctggaaagaatagaacatgggcccagaggcaaagaaaaacacacaggccctgtgttgactctggggtggccaggggagccaaacctcacctctcagagcctccatggtgaggccttgtggggactcagtgcccctagccctcacacaacaggaaggaaaggaacttcccttccccactggaggggacactgggatgtggccaaagtccccttggtccatgggtttggtttgtggcattcaaaggtgagcccagcagggctcggaggaagaagaccccttcagctggcatctgacaaggccacctcctaagagtgggaaaggctaagacaattccccaaagaagcagcagcctcctgggcttggtctaaagcaggtgctctgtcactgcagacccgagtgggggatcaaaggcagggcctgcttggggtggaagtctataaaatccagagagcacacccctggaattgctacgcagtttaccccacgggtgtgctcagaccggaggccaccagtcagaggcagtgcatgcgtcaggggcaatatcgtttagaaaataaaagcgactttcaattctgtttttaaatcatattttccgagatcaaaatcttatttcccaagcactgctgctgaaagctgaggtgaaaaccaccaataatatcttaatcctcccaacggcgggtttccatcttgcttgggttgggagcttggtggctggggttaggacaggggctgagagcccattccaaataatggtgcctgaggtcacggagcgaggtcacggagcagggtcacggcacggggtcacagcgcagggtcacagcacagggccacgggcacacccaagaagagcttcccttgactccaaggtcaccagaaggtttccaagaaaactgtgagactttcctgtcccttcacagcctggatgccaaggtcccccaccatgcaacagacaaaggcctttattgacatcgggtattcctggaaaaacggacccaaaccctgccttcaagctcacagtcctgcaggaagcaggaaggtatacaggtggcaaacccaacacaagagaagcggtagccacagtaatgacagtgatggtgacggtgacggtgacagtgatggtgatggtgatggtgatggtgatggtgacagtgatggtgacggtgacggtgatggtgacagtgatggtgacagcggagatgacagtaatggtaggggtcatgatgatgatgatgatggtagcaaacatctgttgagcacatgccacgtgtccacactctactaagtactttccatgtattctctcctttattctcagaattccatgtattctcccctttatcctagggagtggctactcttatatccccagctttcagatgaggaaactgagagctggatcacaccactggttaaatggcctcatatgaaatgtctggatcaaaaagcctggccagccctcctaatcamcctgcccgatcactgtcctgttttagggaaggactgacctgggcaggcaggggatttaacgcctccacctccctgcaagacgtaatggggaaacagtgtgcgggtttcaaagtggaggcagggggtttcctccttcctgatccccttcaagcaaagcttcccagaatggctgagcagggagggccctacgcaggagcacccagtggaggccagtgggactgagatcagccgggatcccctcctctagtcatgcccccagccagggctgtgctggcccagagagggtgccctgcttaccactgggggcaacagaagaaccccagactgttcgtctttgcagtgctccctgacccctaccccccttcaccaagcctgcgggtagaacctgcatgccaactccagaaccttgctttttaatagccttccaggtgatggggttcagctataaaaaggagagggacccactgcccagccgtggatgggtctggggtcaaacagatgaaggcctctttagaagaggtgagaagccagggtccctatcccctctcctccccacttcctcatctcccccaaaaacctgcttcaattcagacagggcacaagaagcaggttttgaagtcatttttccttacgccaaaactttctaatgctaatttctccccctctctcttattggcatgatgtaattccccttttcaacaacccagatctctgaagtcctgagtcatcagggcgaaggcagggacagcgagggggaggtcagtcgggagggatcaaaggtaggggggagcttgccaacgcccaggccagctgggatttccttctgggggcctggggtgccgtggcccaccggctcttggccccacaccatgccagacatggggacagggctcctaaggcccccacattgtttttcagacctcctgtgggccagttctgaagagacgaggtgactgtgggacggtgcaggagttcccagctctgtcacatgccagcccgggcagcccctgcctgctccagaaaatgggacctcacgaggtaggtgtgatgattaaatgaatgaacacagcagttctcaaccaggggtaatgtggccccccggggacatgtggcagagcctgcttgttacgtatcacgggttgttacaactgtggggagcagtgggccagcacctggcaggtggaggccaacctagaataaaagctcctcctgctccctgtgtacctatgycacacgcactcatttaggagaaagggtagatggctccaccccacatggttaatacgggtgatttccaggtggtgggattctgggaggatttttttcttcttgattttgtaagattgtcgtcagccctgtatgatggcttcagttttgcttttacaagagaggggaggtaaatgtggagtggagaaggcaagaggcaaaggcgacctggctgcccagctggggtggtgccgcgccacaggggagcaagccctggctccaactggggaaggtagccctggaaaaccactgactggcgggggggtcggaggggttccaagcagaaagaagaggcrtgtgccaaaggtcagaggcatggggaagctgaggccagaagccagacagggcgggasgctcgctccacagtagactttgaacttcgtgctcactgtgatccagtcctcaccaccggctgtgacagagcgctctgcagggtcaggtggtctcaggcgaggaggctgaggtgaccaccccaggttcaacgagggcagrtgagaagcgatcctctgccacggctcctccggagatgggtctgcaggaagctggcccaggaagctcccggaaggggccccagtgcagtcagggtagacccttctgctctgtccacacgctctcccttccacaaggccctcctctcagctcacagccagcctggccactgtgggcctttctgacattctgctttgcagccccaaaactctgcttaccagccacaggcagtgatactctggagccagacagcctggggtcaaatcctcgctccacaattacaagctgggtaagtagggacctctcctctccgggcctcagtttgctcatctgtataagggggacaatgacagcaccacctcgcaggggcatcgtgaggattagatgaatgtacatctgcacaaagggctctagtagtgtctggcataaaacaggttctgggtaagtgctcactatccttaytgttgccttgctggtgattcggcccttgctgccagggttcctgtgctcacaccccaccagggactcgtcgtgacatctggaggccactggctctggagttaggctgcctgggttccagctgtgtaaccttgaactcktgaggtctccatttcccctgctaacgyctcacggggctgatgagaggacgaaatgcgcacacgcctaaaggtctgagaatgactggaggaaatggtcatgattaccccgcggtcccctccactcaccttggacatgactatcatctggctctgggctctgtctggccctgctgggactccccgagctcagttgccaccagcctgctgggacagttcgagctcttccattttcctaccctgaagcaagcctcagtcacagggtcgtgaaacatgaaccaaccagggcgacaaacagatgtcaacaagtcatcattcccctttccaatgggcagacctgcccctgtaacctgccagctgagaccccactgcacttcccccactgcagacaagaggcagagtgccactcctgcgtcgcctacaaggtgcccaactgtgtccctggccctgaggtccagcctgatgggatcaccttcgagacagcacaggcctaggcagggccttcccaccaggcctccctgaagggaaggttcaagaaaggggtcctgtgagccacagctcaggcctgggatttggagtagcaggggtctctagtggaaagcccaccaggagctcaccaggctgagcccagcagcctgacgccattaccaccactcttcacaggccacaggggtgggctcggaatcctagggcctgtgtgcacaccgagaaaggctgtgtgcaccacagctgggccatgtgttggagacaccatgtacgcaatcccctgctttcagtacggacagagccctgcagcaggggagtggtagaactcgcacttacgcagagggccagaggcccgtggggttacaaggaagtggaggggtagagatctgggcttgcgcctccctctccgtgggtccctctccccttccaacaggacggacctcccaactaggcaagctgttcattcawccaaactatgtctgttgaggggcagtgcctcagtgtccccatcggtaaaatggagagagtaacagtatctaactgggttgtacggatcactgataaaacctgcatagcatagmccctggcaagaggaaacacactaatcacacgagtggccgctgcacggtcactactgtgactaactgcctggtcctggcgactcggagatccctgcactcctaagccttccaatctgtgacatcccgggctcccggctggccggccagtccttagtctctctgcatcgtaaagcaccacccgccccagggtgcatgggtttacccagcattaatcaccccacactggtagactctgctctaggaggcaaacccacctctatctttaattcctatgccgtcttacggtgtccaccccataaaaactgcacagactcccggaatgtgcccagccgctctggcctgtccctttgctcactgttccctctgctcattcccacctccgacctgccaccctcatctccatcagtctccatcctacctctccatccagatgcctgtctcctacaaagaagtccttcctgaaactccccacccccatgatggcgtctcttcctccgtccaaacacaggacaagacataaacctctctaagcaaygtgctttgttcaatggtgtatcataattgtaatacccccatttaactatgagtcccttgggagggaagagtatgtctgactttccaagtgccatgcctgagagcactcactatgcaagaacagtgccccagaacactcaatttgcacaaataatatatggtgttcaagttatacacctaatgcttaccctttacgaatagctggcattcaatttcccacatcggttcccttaacttttttgacaaaatcacaaaggaatgtccgccaaccttggcaaacactaaactgaaaagctcacttatttctacctaagatgtttctgcaggaggctgaaatagtttcatgtgcatctaccaggtgcatatacattgatggacccacacagacacggggtcagacctggctttgacactaaactctacttcctcccagctctctttatctgagactccattagagcatctgtaaaatgggaataaacacctaccccacaggattgttgtgaaaattaaatgagcactgtgcccggcacacagtagggatacgataaatatcgttgcaaccaggaacatataggtccatctcttacaacggatttgctcaccctactttattccccaccagagaagactgcaagcttggccgaaatgcccccaacctcaaacccaggaaccagatgagatcacggtcatgtgaatttcctttctagggaagcagctctgctcttggcaccctggagacctcaagatctgctgctgcatcccaaggatgctggggtgggagtagtcatcgcttccatgcwctcctcttcctcccagacgcacatgtaaaccatgttcccaagtcttcccctgcactccgtgtggccgtgtgtctgagttctagccaaccaagcggccagatctacaaacggcttggctgtggtgctcactctttccccatccccctgacaatgaaggacctaggggagggcagacccatttcacaagaaaaagagggggcagaaccctcgggagacccctgcaggactgcaagaactgggctgcatgaagccacccagatgccagggctgcgtgttacggcagctagcctgcctggggaacacacagccccttccatacccgtggctctccttccctgcagagcctcgcaccggtgtgtgtgttggtaaacagggtcacctagtccacacagggagccaacatgcgagggaggagagccaggcctgggtctgctcagactgtgtgctccaattttcagatatcctggacctctaaggaaactggcactggcccaggacacccagagaagctagcagcagtcccggtgtgatcttccttctccatatgaccccacctgagctggatgcagccagcccagcccaagggaagcacccagatggctgtttgattccatacactcaaatcctatatccaccagggaccagacgatccagaccacgtgcttccctccaaaaagagttcgcccagcacaatcagtttagtcgctccgtccaccctaccatttctgacagtagcttgaaagcagtagagccacgaacaaaggatgccatgggaaggcaggagtctgggtttgaatcccaggtgggctgctgagccagctgcaagggtctttgccgacacacttcccctcaccccttcctcgctggcaaaaccagaggtgaatcagagcactagtgtgttctagatcctaggatccttagagtgtagttatggacaaagggagttgcgttttcaaagttctgctgggctttgtcatttaagaatctcttaaggcactgctaccagggctattcttcactatttattgggaggcagccaggtttgcaaaaaaaaaaaaaaaaaamcaaaacaaaaaaaaaacaaaagaaaaaacacacaacagaagcaaaagaatggaagctttacggggcaaggagctgcctgtgtgtccatcacctcgcacattctacatactcattaattttttaaacagataataacagctccacagagcaggaggaaggaaactgacaatcatagaacatgtaccaggtgcaagccactttactgggtgatttcyacagatgatctcctccctcagggcctttgcaattgctgttccctctacctggaacgctcttccccctggaagtcctatcacccgcttccctgaccactawgtacaaagcagcccaccactcgccccaccctgcttgcttttctccacgatccctgtcatcggattttataattacttgctcttaacttagttgtttgtccactcccaccaacacaggctccacgagggcaggctcctgttttcttccgagtgcctagaacggtgacacttaactgctgaatggaggcatgaaagcaccgccaggcctcacctcatttaccctgacatcartgctaagaggaagtttctctgatcctcgctttacagataaggacacaggctaggggacctgcccaaggtcaccacctgggacactgcagaggcaggattcaagctcccctgtctgatttcaaagtccaggtcctcactcccctactccactgggtctgccgtgttctcttcctgtggcctcactgcacaccccaaatgccaggacgagcgctgtgcacatgggaggggtaacgaaatggctactgaagtcaggaaccaatttcagcaccagaaatattttctctgccatctcctttgcctcaatacacacagcaaacacctcccccacacgcacgtctcatcacccttcggttagggctctgctgatgtaagcgaagcttcctttcaaaatgcgcacagtctccctcggtgcctgttgaatacactgggtggttcatcaccagagccaggagcaaggaagagaaactctcacttcctctcttcctccaccatggggctgggtggcctggcttccatcctggggaaagcaggaagtcagggaacaaaaagcaatgccctcaggtggagctgcacagacccttgttctgtgggtggaagtcagcgcatccttgtcagagccccctggtcacctatgttccttcagctgcagggaagaccaagtggccagaccctctgagggggatccctggttggtgacctttcagccagaacaaagcatgactccaggtagcaataaccccaggaaacactgcccttccctcttcaaaaggaggctcagctcccccatcccaaagaattaagcaaaagaacatcaaaatagagacaactccattcagtaaaaatagaaaatgttttctttcaaggaacaagagtgtattagtccgttcccacgctgctgataaagacatacctgagactgggcaatttacaaaagacagaggtttaatggactcacagttccacgtggctggggggaacttacaaccatggtggaaggtgaaaggcacgtcttacatggtggcagacaagaggagaatgaaagagctaggcgaaacgggtttccccttataaaaccatcagatctcgtgagacttattcactaccaagagaacagtatgggggaaagcgccccatgagtcaattatctcccactgggtccctcccacaacacaagggaattatgggagctacaactcaagatgagatttaagtgggaacacatccaaaccatatcaaagaggctgggactaacctcaatgcccatcaacaggggagggtctacctacattactgtgatacacttctacaacagaacactatgcagcaatgaaaaagaacaaggcagctgcacacgcatggagggtctccaaaatatactgtccagtgaagaaccacggtagacagctgtgtgcatgcatgtccagatacacaagaaatgagcagcagtgcttgcctccaaggagggccactaggggctgtgtggacgtcgagtaagggaagcttcatttttcattaaacaccttgttatactaatcaaatctacctgatgcatacatgagtatttcaatttttgtaatttattttaagaaactagactacgccccgcaaggaatttttcttaaactgctggcaagaatttcattgccttcctacctatgagacctgctaaacacccctagctttccccaatgcactattcatctcagggaactctctggaggccacccatttttaggtaacaataatcccttccatttgtgcagaaagtcatgaagctctttcagggcaattagcaaaacaggaattggaatcctggtcactgtatgctgactatactagtaggtgcttatctatcctctccaatccttacagcaaccctagacatgaggtgctctccctaaggatggaggaaaaacaaggcccagcaagggaaagcaaagcaccaaaagtcacacagccaggaaactgcacccttcaaatccagatccagcgccatgagaacgcaaaacccaaatctgttctcccccacagaggagatgccccatatcaggctgcctcacctaatctcatgtattcctttaatcaaaggtgtaagctgaccccctgcaatgtccatgccaacaaaacaccaattgggtaccttcaagacgagtcagtcctggctggcagcagttgaggtaccctgggacagctttgccttctaccaggtccccctgagccctgcccaggacagtgccccagaaatgccctctcactgcccgatgagacactaaggagcaggcagggccgccacatcagtcaatctgtgggccaagcagcccaagccagcagcaactgccacctctgtcacccacttgcaggaaagctcagccacatgcagtgaaattccttccacctggactggcatgatgttgccgtggccggaacaggcatctcagattgcaccaggcaaatgcgagcatcaaaacttactccttccttaaaatgcacttacttattacagcctgggaaaggcagaccacgtttgcaatttacagagaattttgactttttctcctctctgtctcagcccctcccctccaccacctccaatcagacaagttgtctaggaaacaattttgatacactccaaaatcctcctatgacaaatggcatggaaagggggggggggaaatctgtgtgtttactgccacaaaaaaacatcaaataaattaaaggcaggctaggcacatggggggaaggggggtatgtaacaaaagtgaaaaagcaattaacatgcgtgcatgtgggcacagatgagttctcgtgggatctgtgactaccctggaggacatagattttaattcttaggtagaaaccaagccatgtggatgtgtaactcttagctcagcaagtgacacacagyaggcatgcagtaagcctgtgctaaacaaagtccaagttcagaaaacaccagactaaagaaaccaatgagaatgaaggtggcttctcctttcccatccatatcaagatgcccagaaacattgcaatcaaacagcagagtggtgaaaatttaaaaacaagccactgatgaattatggcttgagaataaagaacactactgtcacctgtgccccgacccctgaataaaggactttctgagtggatccaccattctgaaataccgtgtgccacattctcttaaaagtaagatgaaataaaaggtaggcagcttatttgtacttctgtggtgcagaagaaacaaagcctacagacaaagccctctgcccacggacaaacatgcctagcaggtgatcaaattcaacccacagacgagagcagcaaaatggattctggtcctgccgaacccggccgcttatgcagaacccctggctgccctggctgtcatttacaaccaacacgaccatcaccagccatgaagagccagtgaggcccaggaactgggaagtttgggtacaaagagggaatggggcaccacattcaggccacagcctgggcagacaggcccttccccacaaaggtgcagtcctgggtccccaagggagggggccctggcctccctatctcccctcccaagtcagctgtcgcctatctgcttcctcctttgtttacgagcatttcggatccaaagtctccaagcacagggtgcatcagacctggcggccgtcacaagccacattaggcacgctgttggctctgcaaggatttaatcagtaactggcccaggagaccagggcagggcaagctgcgacctgatcccacaggaggcaaagtttacaggcaggccaggcgggtgaggctgctggctccaccggtaagacagcctggagggctatcaggtcccttggaccccagactaaaaggtgtacctagccggtgtcacccagcaggtgggactgggagcccgagtctgcctgcatcccagcctgatgcagatgtgctcctggaagcacggtcttaaatctctcagattcggttaattggatcaatggaaacagactgcaaaaggtttgggcaaaaaagagtatttggcttgtttattggtttgaatccctatcaatcactctgggtcttgttcctgaagcccatacaattaaccagataattaccagatgattctgagttgggctgtgtagatggcttaaaatatggatgactgatatttcaagtaaggatatgactctataggaaacatacttggaatatcgggagctcagggctgggccagcggctgctgcgaagccacaggactgcaaagggtttttgttctagggaactgcactcaaattcacctttgttttatttgggctcatatttctcaatagagtgcttgggccgcactataaaacgcagacagattacataatgtccaggcctcagggaaaccccacaggggctccgctgcttccccgagagcctggacaccaaccaggtgtctcatgatgggacgagagccctggtggcagtcccaacctcacctctacccgggaggccagcgctccagccaggccagccctcacagccccacctccaggctcacaggccctgaggcaaggccccctggagcccaccagagggcaagggtaagacttaaggacaccccctgcctgtagtgcttggtgacgaaaggcagcggaaaggggattatgccagtccatcaaacacttccttatagttcctcttgccacatttcctaacaccagagcatggctctgccaagagaatcttgctccatggataagcctcagtccccagtactagacaggtgctttccggaaaggcccacactaccgatggtgccacctacctgggctggccaaggtgagcgaggggcctctggctattcaggtctttcttccttccctctttctctcagatatacctcctgagcaatcggaggtaagtggggaggcattagcctcgagagctggctttccggaaacaggacggtagcagcgggacactcactcctggcttctcccagagggagaaggggctcctcctggccttcccatggcaggtcactgttccttctaaccattttcctaccccaccaccaacaacccttcattttgtggagtgtaagaggaaaaaaaaaaaaaaagcccaataaagtccccctgagccaggtgaaaattctgaagccagatctggggtctccagaatccaggcagggggcaccgcggtcaccagttcctccccacatcagaaacactccgtactggcaaattttcggaggctctctcccgcctccatccattggaaagccaaatgctgcggcctgtggcgcgggacgggcttgagaacatgcaccagcctgaccggggactgggccgcctccccgcgaccagcaatcctccctgaaaaaggagtctttgcagatattgcaccaacgtgcccacaggaaagagaaaataggtgctctaagcatgtcggaccccaaattaagaataaaagtcctcgagggctgcaacgctctggggtggggggtgggggactggttcaaagagtaggattcttcagctaacttttcccccctccccattccttggggcatgtgtcatggcctgtgacacaccgccaagggaacatggatgccagggaaatgtctacacacgctacacgtttgtgacatgccatgtaagcgacaccctatttcctggctgggttttcttggcacaggtgtgggcaggcagtggattcggccccctcccactgcgcttagtaaacaggatcacggtggccccagggaggagtgtgcattctggggaagacaagctacmcccccaatgaggatgrgacccccacggcaagcctcaggcccaagccacagccggtatttgaaactgtccttgtttcaaaacacaaagcatcctgttcaggctcctacccgccacccccactctcccctcgaccccaccacagctgtctttctccacgtacgaagaaggccaccatttgcagatctgatttcagaaacagatcaatggtttttcctctccgactcatccagctgacccagtcctacccatgtatttaaaaacaataacaaaattaaacctccagcaacaaaacacacacgtatacacacactctacagacaatgccggaccagggctccaccaagcagcttctaggctagaactcgaccaccgctgggtcctgagatattccaggaccactgccccctccccctccacttccaacctctcaatgtgcgaatgagattttcagaaagggaagcaccccgttctgcctgccagccctggcaggaaagagaataaaggacgggtaaaccaaacagagaaactggcttctggaaattctttgggtttgggggtttggaggttttgttgtgttgtttgtttttttttttaaatctgaggggtggtattttgttttcccctcccccacccctcagatccagatgggccagggcttccagagagaacccccaccaccatcagggcccagcgtcgggtccatcctcgagtcccagccaccagaaacacaagagctgggggcagaaggtcccaggcacccagcctggcggtgggccgagtctccagcattttaagggtctctcctgagcccggtcggctggtttgggcttcagactccaaaatcgagccccgcgagcaggccaggagcgaggcgccctggttctccccgttcccccggcaccccccaccgccccccaggccctgggctccaggtgcagcgccagggggcagccagggagggcgcatctcgggccccgaggagaggcgggggtgcagccgcgcagagcactcaccgtggcggacgccaggctgttgtcggccagcgttaggtggtgcggctcccagcgcctcaggaatttcgaggtgaggatcttgctgagaaaggtccgcgggtgccggatgacacagacctgaatgtcgccctcctgcagcagtttgtacctcatcccgttcaaagcagaagacccggcggcaggcacggcgcccatcttcgtgctcaggagacgtcgccccccagcagcggcttggtctcctcgatctgccggggtcgccgcgccccgagctgctggtcacatccatgccgcgccgggggagggggctgggggcggggagagggggctgtnnnnnnnnnnnnnnnnnnnnnnnnnnnnnnnnnnnnnnnnnnnnnnnnnnnnnnnnnnnnnnnnnnnnnnnnnnnnnnnnnnnnnnnnnnnnnnnnnnnnnnnnnnnnnnnnnnnnnnnnnnnnnnnnnnnnnnnnnnnnnnnnnnnnnnnnnnnnnnnnnnnnnnnnnnnnnnnnnnnnnnnnnnnnnnnnnnnnnnnnnnnnnnnnnnnnnnnnnnnnnnnnnnnnnnnnnnnnnnnnnnnnnnnnnnnnnnnnnnnnnnnnnnnnnnnnnnnnnnnnnnnnnnnnnnnnnnnnnnnnnnnnnnnnnnnnnnnnnnnnnnnnnnnnnnnnnnnnnnnnnnnnnnnnnnnnnnnnnnnnnnnnnnnnnnnnnnnnnnnnnnnnnnnnnnnnnnnnnnnnnnnnnnnnnnnnnnnnnnnnnnnnnnnnnnnnnnnnnnnnnnnnnnnnnnnnnnnnnnnnnnnnnnnnnnnnnnnnnnnnnnnnnnnnnnnnnnnnnnnnnnnnnnnnnnnnnnnnnnnnnnnnnnnnnnnnnnnnnnnnnnnnnnnnnnnnnnnnnnnnnnnnnnnnnnnnnnnnnnnnnnnnnnnnnnnnnnnnnnnnnnnnnnnnnnnnnnnnnnnnnnnnnnnnnnnnnnnnnnnnnnnnnnnnnnnnnnnnnnnnnnnnnnnnnnnnnnnnnnnnnnnnnnnnnnnnnnnnnnnnnnnnnnnnnnnnnnnnnnnnnnnnnnnnnnnnnnnnnnnnnnnnnnnnnnnnnnnnnnnnnnnnnnnnnnnnnnnnnnnnnnnnnnnnnnnnnnnnnnnnnnnnnnnnnnnnnnnnnnnnnnnnnnnnnnnnnnnnnnnnnnnnnnnnnnnnnnnnnnnnnnnnnnnnnnnnnnnnnaagaaggatacccgagggccgggggtgggtggaaggacggggactggaaccctcgacccctgacgccccctccgctgtccaggctgtccagcgggctggccagatggggccgtgggacggggacgccttcccgactgaaagtgtccccgcggtgatccggaggatgagcccaccctgccctgtctcccactgcgggacccagccggcctcgaactcctggcctttgacgtctgctggctttggccttgggggtcctcaaaccttctggagagaggggacggtccgcccatcccccttctttcttctgcccagggaaacagagcctcttctaggaacccacttaaagcaccccccaacctacacagccacccctcttgtgcgcacccagcagctccccctacttcaccttccctgggaccccacctggtcattttatctgagttcacaggcccagcaccagcccacgagagaaccatattcgattctcttgtgacccagggtatcaggaactgcagcctggatgcaaaaagctccctttctgccatcacaagcagccggcacctaaggccacctagcaaatgctcagctcctcagccaggttttcttatctccacgtgctcctgcagctaataacgttaaaaccctagatttttgcctttttaagtgaaggcgcctctgtagtgaacacatgaatgtgtgcagcgtgtgttgaactgcgtcgtgaacactgcggaatatccacagcatctgtgccgttggtggaaattattcaccccccctctcccaagaacaggcagcatgaaggtgctccccagaggaccctctccccgagcctggccagggtttcaggcaggggatgaaaggcaggtcccaggctgcatccctcaccaaggaaagaagactcacatccagcctgcccaggagatgcctccttggggaggcacaattagattagaaagttagaaattccttagctccccacaatttgctgccatttccttccagttttgagcttgaacagccttgagaaaaccaccaagcatgaaggggcaagccctagatatgtgggtgttggggggtggttggggccaagaaaccccccagtccattaagcgggtgggattagatcctttgttcaaatattttcattgagctcctgctgtatgctggtcacaggccaggcactagggtattaatggtaatgactataataaccacagtggccagaggcttcctatgtgctaagaattttgtacgcacacatcattctcttctcacaccctatgacataggtgctgtcctcatcctcaaccacaaagcatggaggtcagagtccagaacagtaacagacattgtgcttggtgctccaggaacagaaagggggatgtctaacccagtgtgggggaccagggtactctaagagttctttaggaatcaagtaaagaaggggataggtgctccaagaagacgaactggctcctaccaaggcaaagagatgggaggatgctcagcttgttcaggaaactgaactcacttgccatggggtgcaaggtccctggaggaggtggagcagagatgtaggcggtgagcaagcagcaccctgaaatgcaaacccagggactagagcagtggggagacaccacatgggccatgcaaaggagtgacttgtacatggcttcttcaaaaggctgcagtgtggcacagatgagcattgcagaggagaaacctagaggcaaggaggccagtgaggagactttcatgctcacctaccccccacagaaggaagcaacaagggctagcacaaagtcactgggtggagtggcccagtggcaagcaaagcagctgctgtccacttcggggacatctgtggacacgcccctacccatacagggcacaaaactccagtagaaggaggagatttagcaggatgcaaatccctgatatattccaggaccattccagacatcctccatgcagcccagtacagtggttgatttgtaaacattaagtaggacataccgtgataataatgaccggtacccaagcaccagataccatgctggaggccttatgtatttgttctcgtttattcctccccaccagcctaggaggtaggaactattaccatccccatcttaagtgaggaagttgaggctcagacagggtcagacaactatcaggatccagccgaggtttgaacctcagattctgttcgacctcaaattccatgtgcttcccactcctctgggaatttaggaggacattacaaatgtctgtctttgtaatgttgtcctgagcaggcattcaggaagaaagtattgaattcaatcagtgtcctctttaaatagcagtatttcttgaatatagtttcaaatcagtgaaatggagcccccaagacacggcaaagaaagttcctgagggcagaagccagaagcgcctgtctggcaacagcactagctcagtgcctggacaaagctggggtgcagcaaatacacagggattgattgtcaaaaacatactccttggtgcttagcaaaggtccagccacaggactgggtcagtaagttgcgggggatgagctgggatggcgttagtactcagtctgtgacagtgtgacagttgagtccacagcctcctagactgggatttggctaactcattgcagagcccctccaccttccactatcccaggctcccaacctagaaaggaatctgaatccagccatcagattccatcagagccccatccctggagctccccaaattataggaaacatgagcccgtcgagctcccgtggatggaccatgtccccgagttgtgctcaatgccctggaactccagaccctccaaagaatggtccgagcccctaagagcctccccttccaacactgaacttgagaagcttacggagtagcaggaagggcacggcggttcacgcacccttcactccccttgggctctcgcaggctcgttcactaaccagaggccagttcaccagacaaacctgtcattttctgcattctttgctggcggtgtctccttgtttgagccaggttccaaaggatgacgtgtgccctcacctgaactaccgctttcgttcaacagcccactgtggggtcaccccgggccacactggtggaggacccactcgatcaactcaatgctaggagctgggatgccaaactgaacagtaaagtgccttcatgggcacagtctcaactcgagttctctgaggtgtcccctgtagctaactcagaagggaaagacacacccgctacccaggctgccattaaggaatttgatgaggtggcaaagtacctgttggggaggagagcagtggagctgaggggcagcctaggagaggttgagctgaggcgccttccagcagccacacctgtaagtggatgttccccctgctcccatgagggcagcattttatgtgctatggatctgtagcacccagcaccgtccccagccctcaaataggtgctaataaacaggtgtttaacggaattaaataaaagaaagaatgaatgaagcgggcaaagtaaatgcatagtgattttcggttgaatggctggatctcgctgcgatgtcaatgtcctcacccctgagctacgtgacactgcttcattcattttcttttatttgattccattaaacatctgtttattagcacctatttgagggccggggacggtgttgggtactacagatccatagcacacaaaatgctgccctcatgggagctcagcaactattgtcatggggggtcagcaactatagtcaaggggccagattcagcccatggactccaaagcctaaaatattcactctctggccccttttcagaaaaagtttggcaacccttacaatagacataaataacttcaagaagagagataccggcaaaatgtactaaaataattaggaaacgatgagttgtattaccttttaaaaaatattattcatttaattgtaactttacataacttaatcttttttttaactggctgtttaacaaccagcagtctccagtggagatccactccagcctctgcacagctctctctccttgccccaccccaccatgaaatggtgcacaaaccccaatgcactgcactgtaccctccaagcgggcagggttcattctggttttgctcaccactgtatccagggtcgtgttcaatagtcagcctgctgaaaaaaggaaagcctgatctataaagtttgacaatttccctggtgcaaatacaaccaccatggccaattattatacaagctaccaacatgtgtccttggacatggagttaggaagacatgcaccccacggcagagtttccaccacacagatacaatacaccagcaaggggccagattcagccatggactgcaaagcctaaaatattcactctctggcccctttacagaaaaagtttggcgaccgctacaatcgacataaataacttcaagaagagagataccggcaaaatgtagtaaaataattaggaagtgatgagttgtattaccttttaaaaatattatttacttgtaactttacataacttaattttttttactggctgtttgacaaccagcttgcaaaatttctgaaaaattaacaatcagctgtcatgagccattacagatcggcttcaggacaccgctgcttgtttctccagggcatgtcacaaagtaaatgcaccatgattatctgttgaatggctggatctagctgagacgccagtgtcctaactcctgagctacattaccctgcttcattccttcttttatttgattccattaaacacctgtttattagcaccgaattgagtggcagggactttgccggatactgcagctccatcacacatatgatgttgtcctcatgggagctcacagtcatgtgggaaagccagacgccctcaca

SEQ ID NO: 96693 - DNA, 45223 bp, Homo sapiens
catttgaacagatatatgggaattctgtacaatctatgtgtatatatgtgtatagtgaatgtatgtgcttagtggtatgagttactgtcaaggagaagggctacctagatgctaacacacacacacacacacacacacacacacacgtatgtgcttagtggtatgagttactgtcaaggagaagggctacctagatgctaacacacacacacacacacacacacacacacacacacacacacacacacgctttgggtggtgggaagttggagaaaacatttggggcaagagaaaacaatgaaggcggccaggtatggtggtttgcgcctgtaatcccggcacattgggaggctgaggtgggcagattgcttgagctcaggagttcaagaccagcctgggcaacatagtgaaaccccgtctctacaaagtatacaaaaaaattagccaggcatggtggtgcgtgcctgtaatcccagctacttgggaggctggggcacaggaatcctttgaacttgggaggcagaggttgcagtgagctgaaatcacactactgccccccagcctgggcaacagagcaagactctgtctcgaaaaaaaaaaaagaaaacaatgaaggaaaaggagggtgagttagctggagtagaatagaggtatagaatcgttcctaaataaccggctgcattggtttcctggagacttgctaaaaacccagattcccaggccccacttcttggtgctcctaattcagtagcatcacagtagggttccagaagcggtatttttaacaagctcccaggtaattctgatgtgcacctagatttggaaatcactgtgttaaaaaatattgtgaggtaagttggtcagttaggttgggcagcttttatttcattgctaagggatttggacttgatggtgtaataaagcattaattgaacaaatatttatggagcctgtactatgtaccagatgcagactgtgctagcggttggggatacagtgatgacttggtctgcctctaggtggcagggagccattttgggttttcgaacagaaaagtgacataatgaatgctgagttcttaggaagattaatccaggagtagtctccaggatgtactggaaggagagaagctgaaagcagggaggctgctgtgtttgcagttggctgcccagtgctacctctgcagagacaatcaatgtcctgaaggtagctggtatgtctgtgtgcactgacacgagccttcctaccaagccccaggggctccatgctggagaatgcacgtagggctagggtgagcactaacttcacttcaggagagcaaggaacagtgtggctcttccatttttcagttctgtaagcacatcacccttttctcctccccttgagctgtgttctctgacagctgtttgttggtaaagccagcagcccctaaagcacgtcccagccttgtctcctctgtgctttcccccaccactgctgctgcacgcctcatttgctgggccactttagtggtggaaccattagaggctgagtgacttaaaggagattgagtctgtctcgaccccgagagagagtgggatggatggatgcatcgtctcatttagaaagtgttgcctctgactctaacacactcttctctctttctttacctccctccctgtcttcctcccttcccctcctttccctaacccccttccctccccctttctccttctctctcacagtgtaggcaccacttctcttacaatttaggctttctctctgccttgggctgagtgaggaagaggagtgctgttcctgccttcctagcccagctgggtctgaccagaggctactgtgtacccatttaccatgcgtgattgttaactcagagtggggtgtagccaggtattgactgaatgtatgttcttgctgacctgtgtttttttctgtagggaccaaagcagtatccttacaataatctgtacctggaacgaggcggtgatccctccaaagaaccagagcgggtggttcactatgagatctgaggaggcttcgtgggcttttgggtcctctaactaggactccctcattcctagaaatttaaccttaatgaaatccctaataaaactcagtgctgtgttatttgtgcctcatttccccaggaatagtcactgccttgaggaacctcatccttttccctttttttctgcttgatgtctgctgtcttccctgttttctttttctgaaatttaaaggataagagggtggggtggatggggacttaggcacaaaatgttaatttgttaatttcacttgggttgtaaaggtacttaagggttttagctgtgtggaggtgttaagggtccctccttttcccatttacagggtcaaggaagaaatgttcctaactttccaagttggaacaagatttatttcacataaaaaacctttctagtctgggtctggtagctcacgcctattatcccaacactttgggaggctgaggtggaaggattgcttgaagctcaggactttgagactagcctgggcaacatgacgagaccccatctctgcaaaaaaaaatttcagaaaattcactgggcacagcagtgcgcgcctgtggtcccagctgtgcagcaggctgagctgggaggatcatttgagcccaggagcgtgcagtgagccatgtttgcaacactgctccagcctgggcaacacagcaagaccctgtctcgaaaaaaaccttggcatggcgtggtggctcagcctgtaacccagcactttgggaggccgaggcgggtgaatcacttgaggccaggagttgaagactagcctgactaacacagcaaaaccccgtctctattaagaatacaaaatattagccaagcttggtggtgtatgcttgtaatcccagctactccagaggctgaggcaggagactcccttgaacccaggaggtcaaggttgcggtgagatggtggcactgcactccagcctgggcgacagagccagaccgtctcaaaacaaaaaaaaacaaaaaaaactccttaataatagtggttacttggaaaaaaatgtgctctaacgtgtttcaagtatattacaggactgataagtgtttttgtcctgtctgcctaaggctgcgactgcctctgatcttatttccgttataagaatattccttattccaaagcagcttctgaatcatagcttcttaataagttgacattacctgtatttatgaattggaggacagtcagtgagttactactgaacatgttcatagctttgattacttttgatgactcatccacactcctataacagtcttagagaaaaactatgtttttgagagtctatcattcatctgttttttgttttatttagagataggatcttcctctgttccccaggtggaagtgcagtagcacaatcatagctctctgtagcctcaaacccctgggctcaagggatcctccttactcaacctccctagtagctaggattactgggatgtacgaacctaagtttcttattttttgttgaggtgggatcttgctatgttgcccaggctggctcaaactcctggcctcaagcaatcctgcctcagcttcctaaagcactgggaatacaggcaggagccactgtacccagccctcatgtctatttttaagtgaaccaacccatattcctttggggacatattcttaagttacagtatattgccggaaaacctgtcccatagaaaagcatacattttatgtgaccaaaagaagcaagttcattcaaattagatgtggagtcttagttgtgcaggcagtgagagaccttttgtgaggtcagggagtggatacttgtggaatgctattctttgaaggtccccactggctttttatctgtcttcattctctatagcatttgataatcatttccttaacaaacacctgtgtgtctaatatgtatcaaacactgataagccctggagatataaaactgagcaagacaaagtaatcaccttcaaatattacataggagaccagcagttataatacaaagtgaaaataattctttatcattattactattgagacagggtctcacgctgttgcccaggctgcagtgtagtggtgtgatcacagctcactgcagcctctacctcccaggcccaagcggtcctctcactgtagcctcccaagcagctgggaccacagggatgcaccaacacacctggctaatttttgtattttttgtagagacagggtttcaccatgttgcccaggctggtcttaaacttgtgggctcaagcaatccacctgccttggtctcccaaagtgttgggattatgggtgtgggccactatgccaggccaaaaagaattttttttttttttttttgagacatggtctcactctgtcacccaggctggagtgcagtggcatgatctcagctcactgcaacctctgcctcccaggttcaagtgattctcatgcctcagcctcccgagtagctgggattacaggcacatgccaccacgcccagccaattttttcggtattttttggtagagatgtagtttcaccatattggtcaggctggtcttgaactcctgacctcgagtgatctgcccgcctcagcctcccaaagtgctaggattacaggcatgagccactgctcccagcaagaattcttaagaggtgtgagttgagaaagtgcacttttaatttggcttaatcatgtcctacccgaaactgtgacttaagcttctggttcaaatttctttaggagtattccatcagtaactcttctgcctccttctctcaggtttagtttttaaccctgtttacttttcctcaggcttcattccctgttgtgccagctaagaagttcaggaaatacttgagtacttagtaggtaggaagcgtgggctaggcacagataatgcactgaattaccttctgtctaacttcaaaattgccagatccacatggaagggaactggagtcgtgtcacaatgagttgggctccatcatgataactggccccccatctttggaggtgtatcaggcaggaatacagagaattcatgcgttaagcataagtttctaagatttaaagctgcctacagaattttttttttttttttgagatggagtctctgtcacccaggctggagtgcagtggcgtgatctcagctcactgcaacctccacctcccgggttcaagctattctcatgcctcagcctcgtgagtagctgggactacaggcctgcaccaccatgcccggctaatttttatatttttggtagcgacggagtttcaccatgttggccaggctggtctcgaactcctgacctttggtgatatgcccaccttggcctcccaaagtgctgggattacaggtgtgagccactgcacccgacctgtctacagaacatttttatttggaagtggcacaatttcttcaacataaaaaatacattatcggctggaatatcacctgtgttcttgcagctccagaggataacacccctcctatgttcctcaaatatttcaggaagcccctggccctgtagtctcaccctccatacacttatagcccttaattcaaccaagttttgggcaccagtttctgctgggctgcagtgcaacactcactgccatttacagcctcgattgctttttacgttttcaactaaatggattccactgagggctcctggggccagggccgggtcttctcccgcttcaatacatagataatgagttagtattttcccttttcagagactggccctagagcctggctcaaactgaatagaccagaacttactggtccagatctgacccgctgcgcaatcacagggtaggtgagggaggcccggttaaaagctataatcctgtttggaaacgttctccgtgggtctgtcagtgtctcgggctcggcgcccgcggagcgtgtttccgacggtgccctgccggggtccgcgccgctttggtcctccgcagccgccgtccacagcgcccggctccgcgcgagagccctgccagaggagcggctccggccgccgcgcctgacccttgtccggggtcttccgcacaggttggttcgccccgccggtctggggtccctggtagcagagattgcgctggggacccggagcactgctcctttctcggcagagcgcggaggggagcccgcttgctgcggagcccccggcccgcgcctgccctgcccgcgggtccgggcctcgggggcctccactacgtctacccttgaattggatccggctctactgtccctgccgcacgggaacccccagccggatgagggtctccctgttcasygctgccttgcgccttcccatccgccttggtcctgacctggcccagccgaggccgtccggtgtcgctgcgtttgggctgggcgggaaggtctgtcattgctgaccctggcgcgccgcgcttcggcgacagcgggaaagaggctgtgctgaccgtcctccctagggactggactgccaagggtagctggtgccctcctgcacggcaggtctgtcgagcatttcattggtcatctccccctcacgcccccatggccaatctgaccccagcgggggccctttttttgtgaatagatgcctcttaacaatgtgaattaagagcccattttcccagttcctagactgtcagcgattaaaacactttctagggtttacttgcgactagtacagtggttagaaatacgggctcttgatgctgatgggggttcacatcccggcctagccagttgtcatctctagaaaatggggataatcatagtacttacctgataagaccactgagagaattaactgagatatgcacatcaaatgcacagctgcttatcgcagctcctatttttgttgttagggaatcttttcccagaaacattaaaatggctgtgaccagcaggtggcactggtgactgtatagtagagtgttgagctggtcacagaatacgtgatagtagccacaagtgtttaaaggtgctttggaaatcttggcttaatgggcaggcttaaactttcttcacgctagaaagtaccttagagattaagtaatactatctcctgtttttgtaggtgagactgatctgactatagcttactcaagcaggtcacagtaggtcccaagctttctcctcaagttcagtgtaatttttaaaaatcatttctacctgtttgctagcctgttgggatgggaccttgaatatacattggaattagatcagaaaccacagagttaaaatggatgtccacattcgagcttttaccrtatgccagacattcgtttggaaactagttacaacatggtgaacaaaagccgacacagtgtcagctctcatggagcttgcatattagtggaagagactgacaatgtcaatataaataaatatgtaattataaattactaggaagaaaaaaactgaggctttttgtgattgggtagttcacttatttggggaagtaagctgagcccagaaagatataaggagccagtcatgtcgaaagtgaagggaagagcattcaaagtatagggaacagcatttgtaaaggctctaaggaaggaaaatgtcaggaaattaaaggctagtgtggctgaagcacaatgaatgagaaaagtattaaaagatgaagttgaagtggtaggctggagcctttgggcagggctcaaagaagtttgaattttattctgtgtgtgatagaaatcattgaaagattttaagcatggaatgccaaaatcattttttattttagaagttcactcctgctgctgtgtaaagaacgaattgggtaatggcttgagtagaaaggggatagctagttgggaggttgttggagtactccaggtgagagatgatacaatcaaaaaggctgttggcagcgaaaatagagaaaagtagacagattgagatatattttggaggttaaatcagggagactaaatgatggattagaagagaatgagggagaaggagggatcaagagggattttcaggcttctgggttgagcaattgggtggatagtggaaccatttaccaagatgaaaaaaactggaggaagaacagaagagattgtgactttgctcctttctgaaaaaaacaaataaaaaaagaccataaaagatggtagaatagagaactccattttagacagactaaaatgggagttccctcccccattaagtatctactatatccaagtgaaatatttgattggaaattgcgtataagcagctgatcacttgaggtcaggagttcgagaccagcctggccaacacggtaaaactacgtctctactaaaaatacaaaaattagccrggcatggtggcacatgcctgttatcccagccactcgggaggctgaggcaggagaatcacttgaacccaggaggcaggggttgcagtgagctgagatcgtgtcactgcactccagcctgggtgacagagcaagacttggtctaaaaaacgaaaagaaattgcatataagaacttggagcttagaggagagatttgtgatggtgatataaatttggggatcatcagcatatgggtgctatttaaagccaaggaaatggacaaacatcactgagagattgtctggtttgatggttatcaccactggacctgtggtagccattgtggttgagtatcatttgaggtttaaagcattacatttcagtaattgggtgaatgaactatctttagatctgcagatggtcatgtatttgtcactctgtgttgccctgaaatgccctatcttgtgatggagaaagacaaacaagaactcttgtccgcagatgctccctggatctggctgttaagtttgctggtttctattttcagtgggctgagggccatgtcagttttctgccacctacaggatagaccatgaagctgaaggaacttgagcggccagctgtccaggcatggagcccagccagccaataccctttgtatctggccacaggtatggtgacactgtgaattaggatccactgggagtacataagttgaggggaaacttagtatctagaattatttattgaacatcagagaaagctctcagatcatagaaagatagggtggctcacagcataagcaaggagatattaggtgttttgggtacctgagggctgcctaggactatggctcaaggttaggtacgtctttttttttttttttttttttttttgagacagagtctcactctgtcgctcaggctggagtgcagtggcgcgatcttggctcactgcaagctccgcctcctgggttcatgccattctcctgcctcagcctcctgagtagctgggactacaggtacccaccaccacatctggctaattttttttgtagttttagtagagacagggtttcaccatgttagccaggatggtctcgatctcctgaccttgtgatctgcccacctcggcgtcccaaaatgttgggattacaggcgtgagccaccgcgcccagccaacgttttcttgcttttgtggagttacctttgagaaagggtatacccagccctcttctgttccttctcttcttcactccttaaccttcttatacctgaaatccatgcatatattgttgctcatatgctgccttttcttgtgcctaggaacatctgcccaacagctagattcctccttcagcacaaatggcacattggaaatatttgaggttgatttcagggacccttctctggacttgaaacacagaggagtcctttctgccttgagcaggtattgtctgatctattgatgggtatacagggtagatactgacgtggaatcctgggagcagtgtgtgtttctyagggctcatgaggagccaagtgagggaagaaggagctttgccaagttggagaraagttaattctgggcttattttgcaaaaggatttaaaaaacaaccacccccsccctttccagtcagcagcaatagcagtgtcaggctgaatgcatgtgatagagatgcctcagacaagcctggacccacgtgtacctggtctgtctttgaacccagagatattggctccttcctcccttggctcttgtgaagataaacaccttacacaatatcaccctctctgccaacaaggaagagaacgaatgatcctctccttattgcttttagacactgattggttctcatggatttcatggctcttgcaggcttccagcgctagatactatcattcattgagcacatgtatacatgccagacactgtgctaggggctctgtacattttatttattcctcataataaacctaagtgataagtaccatatttccattttacataggagggaactgaaactctgagaagctaggatttaagtcaaggcctatctgtgtccaaagcctaccttctttccatcattctgcccttcttctaaaggtcttgtaaagttgaggcttacaatctgaagcaatggtctccaaatgtttatatcatcagaaaaaatgtgaatattcattatactcaagttatatattcaatataaatgtatacatgtactactataccgtttttgtttttgtttggaacagggtcttactctgtcgcccaggctggattgcagtggcacgatcasggctcactgcaacctccacctcctgggctcaagcaatcctcccgcctcagccccctgagtagctgggactgcaggcatatgccaccacaccgagctaattttttatatttttagaagagatggggttttgccatgttgcccaggctggtcttgaactcctgagctcaagcgatcagcccccttggcctcccaaagtgctgggactataggtgtgagccactgagccagctggctctactattttttttttttttttttttgagatggagtctcactctctcgcccagtctggagtgcagtggggtgatctcagatcactgcaacctctgtttcccaggttcaagggattctcctgcctcagccgcccgagtagctgggactacaggtgcgcgccaccacacctggctaatttttttgttatactactaataaagtgtaatttctgttaattttttttatattagaggttactggtctagaaggcaacattccttctgatgattgatgaactccttgtgcatttcttggtccctctaagagattagttaaaatattgaggtggaagtaccctctttcttttcatagtttaacttcataatgaaaagttagttgtcgttttccctttcttgagctcctgcatcactttatgagagcatctcttattttgcaggtttttttttttttacatctctttgtatttccagtacctgtatcctttgaagagcaggcacttgaggatttactgatgatgattagatactcttagcccctaaccaaacatttcagaagggtcccctcaaaggggtgagctaattcaagatgtttatatgctagagcttaaaaaaggggttcaacctgagaaagctaataggaaaagaaaaaagggtgagggggcactagttctaatcctcagcaagcaaagcaacagcttcagcgtagtagtggctccttagggctaagggttcttaagaaagaggcagtataatcttataaactgaattttgagatccatgtgggcagagattttaatggctttttgttttgttttgttttctggagacagaatctcactctgtcacccaggctggagtgtggtggctcgatcttggctcactgcaacctccacctcctgcattcaagcagttctcctgcctcagcctcccgagtagctgggattacaggggtgcgccaccatgcccagctaatttttgtattattagtcaagatggggtttcaccatgttggccaggctggtctcgaactcctgacctcaggtgatccaaccacctcggcctcccaaagtgctgggattataggcgtgagctactgtacccggccgagattttaatgttttactcattgctgtatctccaggcacttagagcagtgcctggcattatatttaataaatatttgtatttaataaatatttgttatatgaatgagtgatattagaaacttttaggttaccagccaggtgcggtggctcatgcttgtaatcccagcactttgggaggctgagacgggtggatcgcttgaggccaggagttcaagaccagcctggccaacatagtgaaaccccgtctctactaaaaatgcaaaaattagctgggcgtggtggcacacacctgtaatcccagctactcgggaggctgaggcaccagaatcgcttgcacgtgggaggcggaggttgcagtgagccaacaagatggtaccactgcactccagcctgggtgacagagcaagaccctgcctaaaaaaaagaaaaagaagaagaaacttctgggttaccaaacagcattcaaatccagcacttcagttacagttagtcttagtgtcttaagggtttttcaagctgttagtttgaatttgggagtcatgaactttacctcatactcctgctccactctgtagggatttggggccagtaatcagaataaatagcacagttaaccctactgataagtattttatctctgctttcttttcccacctctgtaactgtgttggaagattaaatcacattcccaaagacctcaatcccaaagggattacctttgacacagccctgttggggcctttctgaagaaatcatcttagacacccagggtctaagacacccacttcattctgttccagtctaggttaggtcacatgctcaacagtcagtatcataaactattgacctakatgatyagggaagatagagggacactcgtcctttgctttctgtcttcctctctctttttttctgtgtcttctgcatgctgtggcataaggcacagttgtgtggggcagtagcattggccataatactaatagagctgtgtgacttgggcaaatcaagtcagttatcttaggttccctcacttatgtataaagaagagattgtaccagataacttctaagaaactagctgagatctgaattcaggtttcatgttcagtctcttattcccttttattttctagtagtcttcctcatttttccatttttaaacctcttcctatatctcttttttatcaactaaacatgcacctttcaaaatcttccccattctctgcctgctcttttctccaaacccatgcctcaaccaaatttggatcctgaagatccccttatcctcaatctttgatgcatcagagaaatattatctacctagaaatatttgactgaaagaaaaatgttctgaaacaccagtatgggtatagataagggacagcctcaagctataaatagactgaagagagtgcatggataaatgcctctggatgcagtcagaatcaatatggattaacatgtgcagtgaagcaaacagtgttgggtttgttagatgaatttcactcaaaaagaaaggtttctgggagaatatcacactgtttatatcatcgactgaggacatagctgctgtgggtaaatgaggtgagagatcaatgtgtggtctgctgtaccttaccctctctatacactgagtttctagctctctggagtggcccccataacctctggaagaaccatcctcaagtaacatggagaaagtagaggatctgtcttctgtcattctacctttatctcaattctagttacttggggagcactgtgtcctctctttgggggccttctgtaagggacaacatcaagcagaaaaaaatcatttgtgtacttctctcagttttcctgttctcaagacttgccttctttctagaggcattaagataatagagcatgggttagttgttggatagacctgagtttatatcccagctctgctacttgctgtcctcttggacactttaacttctctgaacctttttttcccactgtaaattgaggattcatagtagatgcgtaggcattcagaaaagtagctttcctctcaaacaaccaatgctccattcattctccagcttggagtactgccttaatcactctgtttgacttctagggaggcttgagtttcccaagttattttggcttgaatgtggacaaactcttttcactttagttcactaacatgaagctaggattttttttgaaaagaatcttactaagaaaatgaaataatccaaaccaaaggaatgaataaatcatggaaacaatttatacagcagatatttctttcttttttaaaaaaatagacatagggtctcactttattgaccaggctggcttccatctcctgggcacaagtgatcctcctgccccagcctcctgagtagctgggattataggtgtgagccactgtgcccagctagaccaccctttttgtttttcaacttcttattttttaaaaatccaaacttacaggaaagttgcagaatagtacgcacccacccatctcttgttcccgttttcatttgcagagtagagatgggaacactccctgagcaccctgaaccatcaagtctccttcctcacttaactccacctaggtgttaagcccattcgcccaggtttgctctctatcacaacctattcaggcgccagctttacccttgctagtgatgtggttaaccacagaaatgtgctttctatatgcatacagaaagaaaatcattttgtcacaccctgtatgtggcaaactgaagtaactgccactctgaagtaactgccctcttttccagccctttggtgactcccccttgaggtctcaggtaccttttactgtgctctgtatgtcatgtgttccgaccatgctgaggtcgctgcaccctctgcatcttcatgtgggtttttcactgcacataccctccgctggttcctgtgtgacctactgtgggcttctctagctactcagttgacatgccctctacccctgctgagctccagtccctggatgacatggcagcctcttcagcctgtatggaaaaacatccttctgctgtattaagatcattgcaaccttagaaaacagcctttctggcagtagcctcttagctagcattgtgttggctctgctgttttgcttcagatgctgacctggtctgagctggttctccatactttgcttctgaccagttggctctgctccagtgactggcctaacaagttcctgcctatcacctactcagttgctttgctgactgttcgcagggaatatttctttgcagttggagatcttgtaacctcatttggcgtgatatctggcttctccaaagggctgtggaaatgtccttggctagcagctatgaagtgagagacagaccacctatgaggcttcagggatttcacatgtcttccgtaggggctttgcagaggacccaaacttgtctagaagggatccagggatccaaagggatctttttctctggggcaagacattggcattatcttgttagaagcatcctcagaaatccagaaaagtatttcctgagtgggagtgtatcctttcatgcctctgtctccaggtctggccctttgcagccacatggccactccagtgggccagccacatgggagaggcatggggtggggaggccattgggtcttttctcatttccagtttgagagtgaattgttggtctagggagcctgcttctaatagttacagaagagtttgaatctttctctcaataggagacagtattttatgatgttaagagctcaggctctgsaataagatgggcctgactttgaaccttgaccctgctacttcctagcatttatcctaaaatggggataaaattactacctctgtgtatagaaattttataacttctttgtgcctcagttttctcaattgaaaatggaaataatagtaatacttcatgaggttgttaaatgttcagacagctaatacacctagagcacttaaaacagtgtctgatacatagcaagtattcagtcagtgtaagtggttgctattattacctgactatttgagttgtgaggattatgtgaagtaatctatttgaagtatatatcaccagcctatataaccccaatgttaacttaaaaatgtacatatatatgtatatatatacacctccacacaactcagaggcagtggcttcctggcttctggtgtaacgtagatgaaacattttttcagagaaagggcaggactgggcggaggatacatcccttctgtctgggaaatgaaggagacaggcaagttccagctaggggtggggctgcctgcataatggcagaagctgacagagatgcccatcctgtgcttactgacatgaacctaagtttgtactgatgccagttcytcctctttataggtttcacaagctggtctgggggagctttggcagtgggcttctggaaagctccggggttattgytggcrgcggggacaatggcatgcktattctatrcaatrtgacccacatcctgtcttcggggaaggagcctgtgattgctcagaaacagaagcacacgggggctgtcagagccctcgacttkaatcctttccagktactacatttcagttagtcaaacatggccaagccagggagcaacagatctgagtggaagcattcatttgtggcctccagtctgtaactctgacccctttccaggctgtttcaggggaggcttttgatagccccaaatttgggcttctttcctcctttcttgctctgtttcttcctagggtggtatgtctccaaacactttttattcatacagggcaacctcctggcttcaggggccagcgattctgaaatcttcatttgggatctgaataacttgaatgtgccaatgaccctgggatccaagtcacaggtgagcagcacccccactacccaaccctggagtgtgcagctgattctcctaagtaaaagtcttgagttctggagccaatcagagctcaagagatatcaaactttaccactggagggcaataaagctccacagactaacatgctaccagccagataagagttaggatggctggtgggtggagggtgtatatggggtagttggtttgtgctcattactcgttctaagagtttctgggaggcagatgaaagttggggagagcaaaagacaccacaagaagggatgggagtgctgtttatcacagtagagctttcgcagggttgggtagggcattgggccyagcaaagagggaggaagagtaggaccccagacataccattgtcctttttatggaggggggggtcagctttgttctccctgtatgtggctctgccatgcagttgggggtctggtcttctgtcttggagaggctgtctgtcaatctgtaactgggcccatctttttgcttcctggccttttctctttcttctgtgcttacagtatcatgaggtaagttaagtttcaatttgatagcatcttgtggtttttctctcggcctcactctctcttggggtcttgggtatctgttttcctccctccctcatcttcctccttctctccctctttttttgtcctagacaagagggctgttttttaaaatcttgactctatcctcttagtaaaaccttgggtaggagtaaaacttagatgtgcctgccatcccctctgcttctacactgataccctaaaggatcctccctggaaaattcaactcccagcttcgcaacactgtcttagtttgggtagccccatgtctattcttggacttgctgtgggtggctgggagcagtggaacagcagatgtcactttgtccagggggtgacaagttgtcatctttctgtccccatcctgccttagcagcctccagaggacatcaaggcactgtcttggaaccggcaagcccaacacattctgtcttctgctcaccccagtggcaaggcagttgtgtgggatctcaggaagaatgaacctatcatcaaagtcagtgatcacagcaacagggtgagtattggaggccagaacacaggcttgggctctggcttctctctcctgcctagcagttagagctgctctgccccaggccagagtcctgctttcagctgtcggacatgtggagtcagccgcttagcacatttcctrttgagagtgaaaacttagggaagctaaacagagctgatctggaagcttctgccattccttacttattcctggccatcactctctgatgcctgtggtgttcccagtcacaaaagagacagaaaacttgctctcagagtggtcccatttcaactgggcaaaagagtcaggttacagcacccattgggatctgctttgttcacagatgcactgctcaggcctggcctggcatcctgacatagccacccagttagtgctgtgctcagaggatgatcgacttcccgtgattcagctgtgggacttgcgctttgcctcctcgcccttgaaggtgctggagagccacagcaggtagcatctcagacgtcatccatatccttggggggatggtggatataactgggctgggtaggaggcaatgtatccctcactttagctactaaacatcctccctggctttaaagccattccggtcaacatatagtcacccaatacctactccagccttaaccaagaggaggcccttagaccctgaggttatggagaggaggctgagattccatctaaattccagagatgggaatggaatggggtaatgagaaatactggaaccagtgtttagcctccaggctctgatatgaggataatgttcatttctttaggtgatgagcttgcctcctccaggatttcttcataaaaacaacttgactcctgtctatcctgtggaggcctctatccagcctccacaatctcttctttctaaccaaagggccatggtgcctttgtatctccttgggtacctttatttttttagaccagttcttgctctgtcacccaggctggagtgcagtagcgtgatcaaggctcactgtgacctcgatctcctgggctcaagtgatcctccccgctcggccttgcacagtgttgggattacaagcatgagccactgtgcctggcctccttggggactttagatggttaggtctttactacctcctgggctaaaagcacccatagtgatgagtgtttgtgtgattcatactgattcataatctctactgtctaatcagtgaaaagaagcaggtcatcctgcagtgatctaagagaggcagagtggtacattgcatagtgcacaggctctgaggtttggtttgggttctgactctgcaactgttggaaagttacttaatttttcaaaacctcattttattcatttrtaagataatatcagaccatgcattttatagggcatggatggtctgatatgccctataaaatgtataaaagacatataaggcaccctrctcatagtaggcattcaacaaatgctagttcctcttcccttctctttttagggggatcttgtcagtgtcatggagccaggctgatgctgagctgctgctcactagtgctaaggacagccagatcttgtgccggaacctggggagcagtgaggtaggctggcccttctgtgggcatgctgggatgggagagagagggtagaagaatctcagcwgcagccatgtgttttgggtttcatggactgtccctaatggtgtgttccctcatattaggtggtatataagctaccaacacagagcagctggtgctttgatgtgcagtggtgccctcgggacccttcagtgttctctgctgcctccttcaacggctggatcagtttgtackctgtgatgggtaggagctgggaagtccagcayatgagacaggctgacaaggtttgaagggcttggtagagaatgctggagggaaggggctgtctctgtttgtgggagagagacatatggcttgagaagcggagatattggagattgggagaccagggcccggggtttgggagggctgcacctttgccctagtgcccatcttcctgaaaggatgttagtttctgccacaatgtgaagaaggccttcaccttgactcttgttattggatgggccctgtagtatttcagggaccgtgggacccctttgctgggacagttatttcaagagtatgactcttatctttctctcttctatagatccattttgtgccacactccattgtagactttgaatgtagtagtctttccaagagcctacttgcatgggagtcccaccctcgctaccactcacttccccatcccctggaatatgggagtctgacctttctaggtcaaattgggtgtctcaaggattcctccyaaaatggagtttgtaggtggagttcctgactaaactgccactttaggatggcgatgcaggtgtcttttccccccagatctcctcttccttcagcaaaggccagcctctcccaccactgcaggtgccagagcaagtggcacaagcaycactgatacctcccctgaaaaaaccccmcaaatggattagaagaccaacaggtgtttcatttgctgtaagtgtagtggatgtataggtgtgtgtgtgtttgtgtgtgtgtgtgtgtgtgtgtgtgtttgtgaagcctaccatgtgcccagcatggagctaagttttgtagcagacgtattcccactgcctctgtctcagaatggatcccactttacctctcaaggagagagttactatagcttccttctcttcacttcacccattctatatcttctgccagtcctgtctaaaaggagctgactgccttagaactcttggttgtggagaaatagcctgagattccatcttttctctaacccttacgtgtctggactggtagtaaggaactacaaagaaggcaaaaaaaaaaccattttattctgtcatttctctgttcaaaacgtttgagcctcccattgctttatagacaaggctaaatttgcacagggctccacttacctttccatttctgtctcattctcatatgttctctatgttccagttacatatgacttctttctgttttgtaaataactcctcaactcttcctgtctctgcttgtaccctaaccttcagcttctctcctgggcccattgaatgctaccacagcctttcaaggcccctctcttaaatactatctcctccttgatgcctgtctttaacccaagtcaaaattaacctctctctataatcccacagacttatactttggtaacgatacattctaactatactaaagttatttatatacatatatgcatattaccctactaagtaatagactccttaaggatagggactatgtcttgctgatttttatatccccaaagcggtgcttcacaaactattaatgtgcatccacatcacttggggatcttattaaaattcagaaactggttcattgagttggaagtaaggcccaagattctgatttttcagcaggctcccagttgatgtccttgcagctggtcggaggactagcactttgaatgacaaggccctgaagcacttggtacaatgctttaaatattaggtttgaattgaaaacagatgtataaaagcggaagttcttgttttcaaagccaacggttttactggggaggcaagactaacacattcaataggctgtgagcttaaaragaaaaagaagtagggaggtaaagaattctgaggtcaagaggcctgaattcttatcatagctctgtcatttattagctgggtaaccttgaacaattcatttaacctctcaggacttaaccgttcttatcggtaaaacagggatagtgatgcctgcccagaaaattaacatgaaccacaaataagaatatatgtacacactttgtaaaactatcaagtactatataaatcaaaagttaaaatggttttgtttagcactaatctgtggtgtagattttgtgctgcagaagtcacggtaaataagaattctgactgggagagttcattargaggtggatattgggaaaagaaatggtgaatagttagggagtaaagcaatagttatcaacgccaaataatctgtacaacaaacccccatgacacaagtttaccatataacaaacatggacatttactgcattggattgaatttttttaacctaaagtaaaaattaaaaaaaaaaaaaagttgtcggccaggcgctggtggcttactcctgtaatcccagcactttgggaggccgaggcaggtggatcacctgaggtcggggagttcgagaccagcctgaccaacatggagaaacccctgtctctactaaaaatacaaaattagccgggcgtggtggtgcatacctgtaatcccagctacttgggaggctgaggcaggagaatcgagtgaacctgggaggcggaggttacggtgagccgagattgcgccattatactccagcctgggcaacaagaacaaaactccatctcaaaaaaaaaaaaaaaagttgtcagccttggatacacattggaataacctgaataattcaaaaaatactgatgcctagtcccatccccagagtttctgattgtattgtctggggtgtggcctggcaagtctggattgttctccatgtggttttaatatgcagccaatgttgagaactgctggagtaaaaagggtttttctaaggtcctgttttgtgccagatgctttatataaggcatctaatttggtgagacggatactccaggtgggggtgttgtgggtaaaggcacagaagcaggaacacaccaggcattttagggatgtggagcaattataataaacaagcagggagagagatgctgggaaagataggtttggccctgattttgcagaggtttgtgcactgcaggaaggggagcttaagctctttcctgtggccttgtgaaaccacacaggctcctgaatagcagcaggttggtacaagcaatagagggatagtctaaggcttaattagaggagggaaaagaacagaaggctagcaaactattttagtaatctgggggtactggcactgggaatgggatggaggggacctgcatgaaagacagtgaacaagaataggtaggactttgtcgttgcttggctatagggggtatgaagactttgctaatgctgaggtatttagcccaggtgactgggagaatggtggtaccaggacaggttagcagaaggtgagtcttgtgtggtgaagtttgaagtgggtggtcctaagagtgcagaagtggttttggtagggagacgaattcaatactaaattcctgatcctattccaccccccaggaactctcttattttatttatttcctagcctagggtcagccattagatagccttctctgtgaatctgacttagtgttactttttgacttgaaggtataacctttacccttcttgcttttcctcaccagtttggagggaagctsgttacttttggcctccccagcacccctgcccatctggtgccacagccttgcccccgcctagtcttcatcagtcaagtcaccacagaatctgaattcctgatgcratcagctgagctgcaggaggccttgggatcaggaaatctactgaattactgtcagaacaagagccagcaagctttactgcaaagtgaaaagatgctgtggcagttcctgaaggtgggaagcctgaaggctagcwgctcagaagtgtctccccaaagcctggaactccaacctctgtcaactgcaggagaagcacaagcacactgggacccagatcacagaggccttaactcccattagtttttcccccacactatacccaccatctagacacaaaacgttcaccctttaccagaggctcaaaggccatttgggaagaggctaggaaagatggggaatacacgagatgttttcttttgttgctactatggttgatgtcctaggtattttaccagggccaaggcaaagaccttcacggtatcatgccaaagggcagataaggtaatgggaaggaagaaaaaagggaggaaagagaaaaagaggagaaaggaaaaacattagttagaaggacatattgtcataagaaggctttgagttggtttcaagtaacccaaggcaagtccttggagtgggtcctagggttcaggtgccactgtacactggaggcatgggttcagttccagttctcatttaatttcaagtttcctgtgacaccaggaggagtactatacctatcaaaggaaatgagcaagtgagagatctgaaggaagaaaggsaagtagctgactggtcagtcagtgggatgattgtgcaagtttttggaattgtttagaagaaagcaaaaaggattgggcctgtaccagggcatctgagaggracttgaaatttgagctttaggcatagtaragctttatgaaggtggacatcaggaagttagagaaagaggatttgagaaagatcttgactatacagtgaagccagagaatgatgtgggaagaaaagaataagaaatgatgcttttgtcataagcaggatacaagttccaggaatggtgagatggtaaagagagggagtggtcaggagttcagcctttactccgctaaacaaaggagacagtggtacctataggacagagggacctataggacagggcattctgggtttttttgtttttgtttttttgagacagagtttcactcttgtcgctcaggctggagtacaatggcatgatcttggcttactgcaacttctgcctcccgggttcaagcaattctcctgcctcagcctcctaaatagctgggattacaggcacctgccaccacgcctgtatttttttttagagacagggtttttttttttttgtattttttgtattttttttgtagtagagacagggtttcaccatgttggccaggctagtctcgaactcctgaactcaggtgatccacccacctcagcctcccaaagtgctggcattataggcgtgagccaccgcgcctggccaggcattctggtttaaaagctacccaagagctgtccatcatgatggttcctggttgggtgtggtgaacatttccaagggaagggcatggaaggagaagggtgcccagagagactatgagaaaggtatggttagaaatcatgtttcagtgtggaataaattaagggcctgggacagctaaccaagattacgggggcttcagaaaggtttgctccttggtatttgggacattgagtgggaagctgactttgtttactgtacctgtgcaacttctaccagaggtcttctcaaagaaacatttagactcacaaggctgggtgcggtggctcacgcctgtaatcccagcaatttgggaggctgaggtgggtggatcacctggggtcaggagttcgagaccagcctggccaacatggtgaaaccctgtctctactaaaaatacaaaaaattagccgggcgtggttgagggcgcctgtaattccagctacttaggaggctgagacaggagaatcacttgaaccctgagggtggaggttgcagtgagccgacatggcgccactgtactccagcctggttgagacagcaagagtctgtctaaaaaaaaaaaagaaaagaaacatttagactcacaagactactgtaggctacacttggcagcagtctcctcggaaggatatgggatagggaccacagcagggtagcatcaggcaggtgtcttctgtgggagccctttcagcagtcatgcagtaattcagagttctcttcttcagcccgccagagacagctcaggtgcaaggagatgagactatacatcaggcaggtatgtaagttgccctgacttagaagcttcttgcccacaagagccaatatctcttgtaccaattctaaaagcatagcttccggagtccctgcaaggaatctgtccagttacaagagccactgcaaacagggaaatgcatagcatgttgttcacattaattmtttctaggttacatagttccagtccagatgcaagttaccaatcacaagcatattgcctaggaacagctgacattttactctcaccagactaccagggtaacagagctaggaagtcaatgaaaggtcaaattctcatgygcaaagggcagggggctatgttaacactgctgatagcccatcagtaagtcagatccagggaggaaaaagagatggcattggactgctgagggcacttctagtagtacaaagaactatattgggtatactggcacagatacccagcttgttgtaggaagagmgtcatttatgttcatttaatggaatcttttctgtgttctgtggtttcttaggtgaccttagagcaagactccasaatgaaattcctaaagcttttaggatacagtaaagatgagcttcagaagaaggtaagctgcttttcacatcagaaacatgtacttgttgaagagaagaagagaatgttgccagagkaaaccacctcagaatacctcttcctggccttattattgcatatgtgagcattttacatcctggagtttgtttttttctcagaaaaaaatagatcagggatcttagagagtacagttggtggggtatggagataggaaaagaggataatgcttatttgatcttacgcttgaaagagcrgttttcagaggtctctccctgcaggtggccacatggttgaagagtgacgtggggctaggtgagagtcctcagcccaagggaaatgacctcaacagtgacagacaacaggccttctgcagccaggtgtggtaggagtccagtcagcctgacctatggtaacacaggaaacctgccttttgggcatctttcccttcctggcccttttctttgctgtctgtaagtgtttagcrtctgtagaagtcttcagactcctcactctcttagaaccagagtgagacacagagtccctaagcttttgggctgggagtggagagctgtgtcttaaccatgaactatggccctccccaaaccttacctggctatttttttagttttacccattaacggccaaatagtagagctctcagggctactaagccagctctctgtcygtcttgggttcatccctaagtagtcacctctgtccttcctcatacaggcctccaaacacaccacaaaggaagcctctgcttcctcagccttctttgatgagctggtccctcagaacatgactccttgggagatccccatcacaaaaggtaccctgaccctgagggagagrgagagtctctgcttaggactaggtgggcacggaggttttggacttgagacattcccttcttgtcccctgcctcgtgccttcctcccaccgtctcaaatgctgagtgagtcgcttaccagttagagctctctctggttgtagattttcatggatacgtccttcctatggaaggccttctaccaacagattttcttctatccttcttgctgaaaggactgtggccctgcccactgtgatcaagcacacctcacactgtgctactgccacatcagttccctcccttgtcttgggccctgtctttagacctgggcaccaaaatacattttattgccaaggagtgaaacttgaggatttagtttggagccaagcacactgagtgatatagagatatagagggtgtgctgtgggccctgcagggggcaggaagttggggtttgagagcaactaatgcacaggggatgcttctgcctgcagatattgatggactcctaagccaggctctcctgcttggggaactgggtccggccgtggagctgtgtctgaaggaggagcgctttgctgatgccattatcctggcccaggctgggggtacagatctgctgaagcaaacacaggagcgctacttggccaagaagaaaaccaaaatctcctcggtaactgcccatcatgcaggagaagaagggaggggattacttggaccttgtgaggtggatacccacaccttgggacccatgtttgagtatctgcctgcctctctctttctactctaaccacccccacctcatcccttgcccctactcagtgctctaacaggaggcctgtgcaggaatcctgctgcctatgctggatggatggctgatggtctctttccctctctgcccattacagcttctagcctgtgttgtgcaaaagaattggaaggatgtggtgtgtacctgtagcctgaagaactggagagaggcactggctttgctactgacatactcaggcacagagaaatttcccgagctctgtggtaagtgtggtcccaggcttcaggatgaaatggtgtgactccagcatggagtcaaaggatgcatgcaggagggaggtggaggagcagactgagctgtgggaggcgaggcaatgttgtcagggctagaatctggctcagccaggaggcagggaccacagtgcatgcccctattttcagaggggatcctttgttgtcctgttttaccttgtcttgtcacaccatgatgtgagaactttccccttctctgtacagcaaggtgagtctcagtkttgtcttaaactgcagctacttgtcccaggctcatggtcctctccctgtttccaaacaggagaaggagaggcacacagggcagctgtgccattaatgaaattaccctctstctgcagacatgctgggaactcgcatggaacaggagggcagcagggcactaacctccgaagccagactctgttatgtgtgctcagggagtgtggagcggctggtggagtgctgggcaaaatgccaccaggctttgtcccccatggctctgcaggtaccccttctctgcagggtactggccactccacaccaggcccttaggaggctagtggtggagatgtgcagagctagcagaggcgaatcttctgggacaggctggaaccacggtgttagggaggagcgaaaggtcctgaatgtctgggatcttctcctcttccctcagagaagactaagcagcagctgcttcagtgttagtcttcataatttttttcctatttcaggtttggttttacagatgtattcagtacttgagtaattgtggcttggcccttctattagctactgtggaaagttctgtggatctaaacttccaggtgttctgtgggtgaccacagaaagtgggggtcacagactcatggagagacaaaagtcgcacatgaaacaattagtmtgacagagtctgtggttggtgatgtataagcagaaagggtaaaaaagcaaaaggaagaggtagagatgtacaaaaatctaagacccagatgggtccagttaaatccaatcctaacagcttgggaggtgaggccaggtggcccttctctgtcacagttcttacgtgtcatcatctgctgccttcacctaggtatggtcaggtgccctcatctgtacccatagtgggagatccctgaatgagctgcgtggacttagagagcaggatatgcctcattgaaggcttaccaccctcatccttgyccttacaggacctgatggagaaggtgatggttcttaacaggagcttggagcaactgcggggtcctcatggggtgagcccaggccctgccacaacctacagggtcactcagtatgccaacctcctggcagcccagggcarcctggccactgccatgagctttctacccagggactgtgctcaggtaagtggggccatgtggagagagcaaaccatttcattcagtcatctaacattgattgagcacttccatattmcaggcactatgctaatgctgaagctcctaggatagataagatggaatcccttaagcacctcacaatctactgggggaagatcagatgttgatgacttatagtgccataacagaagcttatactgagcactgtgggagtccagggaagrgactgatttttgcctggagaagtcaaggaaggcttctcaatggttaaaacagctgagctggaccttcaaagagaagtagcttaccagcagatatagagcattctaagcagaaagaatagcaaggagggaggcatgcaagtgtttggcagggattcaggaaccttgagtcatctctaagggggctagagtatagagcgggggtgtccaagggtcagaatacagtcgtgggtgcttagtttctgtttctggttgggccagtaaagccccttcctcatccckgttttccacttatcactagagacaaaccaaaaaccatggcttcaggctgctaaaaacctaaaacaaaacaaaacagaacagaacaacaacaacaacaaaataacacaggttggacaagcttggtgtagagggtcagctgaaatttgactgctacctggggccttgattgttttaatttcttgacacagctcttcctcattaaaacttatagccaccagttcagcagctaagagatcggctttttcatgctcaaggttctgctgtcttgggccaacagtctccccctttccccttcccccggattgttgtgggagctaccctccactctaaagagacatcatcttacagattgggatcccagccttctcaccaggtaagacctcgtttgttcattcatttgttcattcaataatacgtgccaagcatggttctgggcacttggaatatattgtgaacaaaactgatgaaaattcccaacttccatagaacatagattcagttctttttataataaataactgtttattgaactactaggctcttaggacataaaggtgcaaaaattgtgatacttgccctcaagtagctcatagtgtagtcgaaagatagatatgtaaaaaatagctacagtaggcctggcgtggtggctcacgcctgtaatcccagcactttgggaggccaaagcgggcagatcatgaggtttggagttcgagaccatcctagccaacatggtgaaaccccatctctactgaaaatacaaaataatgatctgggcatggtggcacgtgcctgtagtcccagctactcgggaggctgaggcaggagtatcacttgaacctgggaggtggaggttgaagtgagcccagatcataccactgcactccagcctggcaacggagcgagactccgtctcaaaaaaaaaaaaaaaaaaatagctacagtaaaattcataaataccatgattggggtatggcaaggggctataagatcacacagatgaaagtagtttactctgtatggtgaggttgtgggggcagtccagggagtgtttcagaacaagtcggatgtttgatcagagtttcaaagattaaaaggttttaggcaaagggatgagcaagtgaagactgtttcaggcacagagaatagcatgtacaaaggcactgaagcaagagtaagccgaagccttttgagaattactattatttaattggggctgcaacacaggtgtttgtggctgtgaagttagatgaagctggaacaacaggtaggagttagatcactaaggacctagcattctgtgctaaagaacttaaacttgacagggaggagctattgaacagttttaggaagagtgacataattagctgtatgttaggaagggccaggctggagggagttaggctatagtaagggatgatgaagacatgaaataactaaagctagccagtgaggttggatttgaaatacttagtacttagtagatagaactgacagaattgctgatagtttggagaggtgtgtgtgtggttgggggtactgagggagaggaaagaggttctggccaaagtgcccggggggattggatactgttaagatgtgaggccagaagcttgctagagctgccggagaacagaatccagggagatttggatacagttaccaggcagaagctctgatggctcatcttgtcccaccttcaatccccaccctaattccttttctttttttccctccctttcctccctccctttcttccctcccttgtctccccttttccccttcccctcctctcctctctctctccctctccccgtctcttttcatttaaaaataaccatagattcacaggaggtggcaaagaaatgtactgggatgtctcctgcatcccaacaacaccccgccccgtgtcggcatctcacacaaccacagtacgctatcaaaaccaagaaattgccattagtacaatccatggattcagatttcagattcagtctccaccagttttacatattgttaggtgtgtgtttatgtgtgtttatgcagttttgtcacattgtggtgtgtaaccaccaccaaaatcaagatactcaattttaccatcaccacaagactctcttgtgttacctcttttatagctgcacttattctgcctccctcatccttggcttcaccaatatgttctccagctctatcattgttatttaacgattgttacttaaatagaatcatggcaatatgtatccttttgagattggcttttctcccttagcataacttctttgaggttcattcaagttgttctgtgtaccagtagttcactcattcttattgcagagtagtattccatggtgtgaatgtaccatggttttaattttttttttttttgagatggagtcttgctttgttgcccaggctggagtgcagtggcgcgatcttggctcactgcaagctctgcctcccaggttcacgccattctcctgcctcagcctcccgagtagcttgtactacaggcgcccgccaccacgcccggataattttttgtatttttagtggagatggggtttcaccatgttagccaggatggtcttgatctcccgacctcgtgatccgcccgcctcggcctcccaaagcgctgggattataggcatgagccaccgcgcccggccccagttttaatttttttagccattcaaactttgaaggacattcggatagtttccaatttggggtattatgagtaaagctgctatgagtattcaaatacaagttcctaactgacatctttactaggttcagtctttcagtccatgaatgtggcatgtttctccatcagcgttttataatttttgtcacaccaatcctgtacatattttgtccaattcatacttaagtatttaattttttatatcacctgtcagctcatgcctactaagtatttaatttttttcttcagcagtttaaaatcaaatttcttggtttccacttgttcattgtgagtatatagaaatgcagttgatttttatgtgttgatctggttatatcctgtgactttcctgaatagttatagaagttttttgtggattccatggggttttctaatagacagtcatgctgtctacaaatctgcaaatagatagttttctttcttttcaatctatatgcatttaatttctttcttatgccttattgtagtgactaggacttccagtctctgttaaataagaatagtgaacataagccaggcgctgtggctcatacctgtaatcccagcactttgggaaactgaggtgggtggatcacctaaggtcaggagttgagaccagcctggccaacatggtgagaccccatctctactaaaaatataaaattaaccgggcatggtggcgcatgcctgtaatcccagctactcaggaggcaaggctggagagtcgcttgaacccgggaggtggaggttgcagtgagctgagattgtgccattgcactccagcctgggcaccaagagcgaaactctgtctcaaaaaaaataaataaatagtgaacatgaatgttcttgccttgtttccagtcttagaggaaaaacattcaatatttcagcattaagcatgatgttagctttaggtttttcacagatgctctttatgagaccaaggacatttccctctattccttgtgtcttaatccattttgtgccactataacagaataccacagactgggaaatttataaagaacagaaatttatttcttatggttctggagtccaagatcaaggcaccagcaggtatggttccagcaggtacggttccaccctctagttgcaagatggtgccttgctgctgtgttctcacatggcagatagcagatgtgcaagagaaagcaaacccactcctgcaagtcatttttgtagtggcattaatccattaatgagggcagagccctcatgacctaaacacttacaaaaagtcccactttcccaacactgttgcattgaggattcagttttcaacacatgactttggggagcatattcagaccataacaccttgtgtactagatcatgaatcggtgttgaattttgtcaaatgttttttctgcatcatttctgtcatcatgttattttcattctttagtttgttggtataggggattaaattgattggtttttaaatatcttggatcagctttgtatgacctggaatcaatcccactttcttgtggaatattattttttatatacattatttgatttgctaaaattttgttgaggatttttgtgtctaagttcatgagaaatattgatgtgtagttttattttctgctatctttttctgttgctggcatcagggtaatactggcctcatgaaattagttaggaagtgttccttctattttctggaagagattacataaactttgcattaattctttgactggtgaaattctccagtgaaaccatctaggcctggagatttcttttttgggagcttttaaattacaaactcaatttctttaatggttataggactatccagatcttctttcattgtgactgagttttggtagtttatggttcttgaggaatgggtccatttctgataagttgtcagatttatgaatgtaaagttttctgtagtattcgtttatatttttaatggcttcagggtctgttgtaatagtccctgtttcatctctgatgatgatttatatcttcttgctttttatctttatcagtttttagatgtttatcaattttattgatttttttcctcaaagaactagtttttgtttcattaattttccctattatttttctgttttctattatttacctttctctttcctttccaagagctgatgtttttttctcttcataggtcccaactccatctccaaggccaagggttttcacccctcagtcatcaccagcgatgcccttggcaccttcccatcctagcccttatcagggtcccaggacacagaatataagtgactacagggcacctgggccccaggccatccagcctttgcctttgagccctggggtaaggcctggtgagtgagtcactgaagatctatctgggcagagcacagaggtctcaggaaagcaattggcatggccagcatggatttgggaagctgtatgtctgtctagtgagaggagcttggaagttgaagtctgaattcctaatgctatcactggcttcgtacctttggcaatataccaaagtgttgtgttgcttatttcaatgctatggrattgttttgaaggtcaaataaggaatatagttaaaagtattttgtaaattatagatttccatatacatgtattaatcatttattatttttttattgcaatcctgtttctccctgatatgctctgagttgytcctgaaatgaagtttagtgacaaatgacctatttytgttctgcttcagcttcatctcagccacagctattaggagggcaaagggtgcaagttcctaacccggtgggattccctgggacatggcctcttcctggttcccctctacccatggcatgcccaggcatcatgcgacctggctctacmtccctgcctgagactcctagactgttccctctgcttcctctgagaccactaggtcccggccgcatggtctcccacaccccagcccctcctgcaagcttccctgtgccataccttccaggggacccaggtgccccatgctctagtgtcctcccaaccactggcatcttgactcctcacccaggtcagtcttccttccatggatccctcttctgggttattgcctcccctgctcctctcactactttgggagtctttcctcaagtcagagggctagggccctgttgggtggagggtggctgggagtgtagatggtctgcagagggaggtatggtgaactccaactcaaagaatgcttccagccttcagataaaaaacttccagtgtttttcactatgcgccgaaaaacctctatctttttattctataggacctcaagattcctggaaagaagccccagcccccaggggaaacctccagaggaacaaggtcaatgcatctttccctacccactccctcgcacattcaccaatgaccacgttctaattccttggaggattcagtcagtccttccccttctcagactgtccccgccctcctcccacttactcttctttcctcagaaccctcttctttctctttccctcttacacacatacaccagtctcctcacttcccagtttcccacactcactcttctgtctccttgttcactgtcattcctgccactccccaaaaccagagccatggagtctctcaggttagactcatgtctttccttctgtctctttagctgccagagacatttatgcccccagcaccaattactgctccagttatgagcctcacccctgagctacaagggattcttccctcacagccccctgtctccagtgtgagtcatgctcccccaggagttccaggagaactcagcctgcaggtgacaaggacaatgtattcccctcccttgggaaaccttccagccctccttgggtgcasgtcatggtagatgggcctcattcctcaaggcatgtgctgagggagactgggggcaggtaccaggtrtccttactgcagagaaagggaggctgctcatctccccaactctgctgtaatgggaacagtgtgactgtgagtcactggggactagtccttagggaagccatgagaaggacagcttgcccctctggcctttctccctgcttctttatcagcagcttcagcacctgccacctgagaagatggaaaggaaggagctgcccccagagcatcagtccttgaagagcagctttgaggcgcttctccaacgctgctccctgtctgcaactgacttagtaagtctgaaccttcttcacagtgccctcctcgcacccctcgctggctccaggacccctcagctgtggaccagttccttgtgtgactctcttctcactgcccctggacatgctgtctctatcttgtacttaattgacgtccatgtggagctggggagagacttttgagtctggtctgaagtccagctccttggtggtaggacccagcagcaytgagacctaaaggcagcaggggtactggaaggagggtggagccaggagtgaggaagtctgccattcccctgctggctgtgtcggcttgagcaagtcacttacccttcttgggccttcattccctcctctgtgaaatgaagccattctagctctaatatgctgtgattttttttttttttttttttgagatggagtctcgctttgtcgcccaggctggagtgcagtggcgcratctcggctcactgcaagctctgcctcccgggttcaagccattctcccgcctcagcctcccgagtagctgggactacaggtgcccacctccatacccggctaattttttgtatttttaatggagacggggtttcaccgtgtcagccaggatggtctccatctcctgacctcatgatccacccgccttggcctcccaaggtgctgggattacaggcgtgagccaccatgcccggcctaatatgctgtgattctttatggccctgtgtggtgttagacttaggggctggggttggaatccatttctttycctgcagaagacaaaaaggaagctggaagaggcagcccagcgtctggagtatctatatgagaagctctgtgaggggacagtaagtacagctagctgtgctcccactgcctcctacacttccaccatcaccatggccaaaggaagcccagtgtcttttcttcccataggtgtyactgacctgggttccccacaaaatacgtgcatcttgcctggactgggccccagaacttaagtcttcccttatcccttccatgctgccagggtaggagctgggttgggctcactaacctaagggtcattccctccacagctctcacctcatgtcgtggctgggctscatgaggttgcccgatgtgtggatgcaggaagctttgagcagggccttgcagtgcatgcccaggtggcgggctgtagcagcttcagcgaggtgtccagcttcatgcctatcctgaagkctgtcctcatcatcgctcataagctgctggtctaaaccaggcagcctctcttgctaggaggccacttctgctgttacataactcctccctgcagaagaggggacttctgcaacagattctgtttctttttcccgactcttttccttgctgccaggtatgtgatgctgtaggcttggctccaaaccagctgagtgcctgctttttactcctttatgtctggccttctaggatctgtccaagacactctcaggcctggaggcagggcatagaatcagttcttcactctccctaatactacactctgtaaggacctggggcaggatatcttctcccccagggatcttctatttaagtggcttctgagagggtgaacaggattgttacttttaagcctacctctgctgtgacccatcatgtgggtcttttgtttctcccttctgtggtttatgagcctgcccttaccttttccctgcctctgacttggtatttccaggtccgtatttctctgtagcccagggtctggggtagagctgactgctgttcaccctttgaacaactcatggacgtgagggatgggtgctgagcagaaccaagagaggaaactttggcgctgttaaaatggaatttctcatctgccggcattattaagggtgggctaggttggatggaaggtgaaagggatgaactgccttttgctggaagctgtcttaggctgtgagacaggagcaggggaaccacagcctatggggaactgcccttgactccacctatgttggagccttagcccaaggccattccttctgtgatgataaagcccagttctggaattggagccatattaaggaatgattctcttccagcgctgctcctcaagggttgggggtccttctccctcrcagccaccacatgtctcagggctaccttctccgattggatttgcatttgtggcactgtctttgatgcagtgatgtacttaatggtgcaataaagctgcttcgatttggtttcctctgtcatctcccagtcattgcctcctctgggttctattttgccattacctttctagtcctctttattcttgcttcctgcaccctagtaaggcaggggagaggcttagggagagataaatcaagaaagttaaaggaaggtgtccattcccactgaattaggttctctccttgcagcatttgtggtcactctgctgggtgtgttgagggtggggggattgtctcccttcatccgtgcctggtgttcagttccagggttttccctaccccacttcagggctgagctcagctatacaaagggactgggtgtgaagccaggggatgctagccctaatcctgttgtagatcccatcatgtctgcgggctagatgtgtgtgtgtttgggagggagggattgttaggcagtatttgtttgtaaagccacttgctcttcagataatacttgcactaacttctattgatgaagcagtgtgagccctagcaaagtcctttcccaaagtgtctttgaagccaagagcccattgaagggaagaaaggccgggagaggggattagtttgttcagcagctgtgaatttcagtgggaggttgatgaactccgaagtctttgtttaaattaaagtgggggagaaaaaagccgctgctggagcgagagccccacttggggccctgaactaacacaaggagaagtctgagctgcagggagctgtgtactgactgcgaagacttttcccaaacactttcggaaaaggtgttgtgagaagacaagggggcggagtggcggattagcatgtgaaatgaagttttcattgactccagtgggggtagaaggctattttaatggcattttgttctcctattttctcttcttgagctctttagagatattgttttgctaagacaggctttcttcccccttctttccagtctgaggattgcctctatgggagccaacataaatatttctcctccaggaatgcgggttaattaaaaggaaatgaatgagtggaagcatccaatccagacctacaataggcgagtgccctggcctgccctcccctcccaccaccgccagcaccaccagcgccgaagacgaccccgtctctgtctttgccctaacctgctgctaaggccagttgaggctgcgattcttttcaaaaagaaaaagctctgcctgtgtttaggctcacaggccagggacaggaaggagacagtgttttgcccaccccaaccaatgtccttgtcacttctcagggcctccctctgtttctgtcttctggctgagacagatgggctcctgaagagcacacaagaggtggaaggggcctgtgctctgcactctccccacagtaacttactagttgggggaagaagccagtcatctttctcagcatcagtttaaatctgtaacacaaaaggtttgactggctgacctcaaagatgtcttcccaagcaccagttctggagttgtctactttgtaaagggaccacggccctggcaattgagtgtaagatgagaacttaaactccgtgatgcagcaatggtggttgttcaccactatctctactctggtgtttgttgaatgaacaaatgaacaagtggatattgcaaaaggaagggaaaagcaatacagatccaaggcatctcagtcatgttttcttggtagaactggaatgaatctggtatccatttgggggtataaaacaataacctatgaaataatgttctggcggcatgacgtatttagagtgctgacctggagttaccaaatatgaagcacaatagttctgcttttatgctaagagacctggagaatgtagctttactttacaacattgtgcttttaaattttctagctgccttgccaaactttcttcgtgtacattataaagtaattctgcaaagtgggacaggtaggttagtatatgctgcttcttgattaaggagaaaaggtgagttgggagattcaggaggttcagataaaagcagagggaaggcgtgaagggccttttgctgagaaagctggaaatgaagcactaagaacacctgaaaggaagtgtatccccggtcaggaaggggaaactctctcctcagtaagtgttggtaagaccagaaggtgtgtgggtgaggccaagggtttgggatctgacctggccattgccttagtttggaatacgggaacccttgactcttacaggtgaacccctagagtcttggcttttgttgcctggagccagccacactgcttttcctactctgggagaggaaggttgaggtcgtctagcatctgaccagttctgctctagaagagctgcccagccccagacctgggactgtcctagggcaaggaagctggctgggaagccccttgggctacagagggtctgtcagggattggttcttccctccccaaggtcttgctctgtttcataaacaagtccctgctgtactctctgagaataaaaccagaagactcaagtaccacaagcagcaagctcatggctcttgagtgaatgtattagaagatttaaatagatgatttactaatccttggcagcttagcctcaatccagataactgcttgggccaccagggaagtgaggctttagggaggatggtatcctgccaagatgggagggaggagagagcctacaggttgtatctgttaccacagcccacccgaatatcctcaagaataagtgcagtacctagaaaaagagcacatatcacaatgactgcaataaattaaggttcaaggtgctgaacttcctactaagcaacagtttcattgcaggaagtttactcattgaaggaagatatccagtgctctgaatcctgcctgtttgagaaccaggttagtgagaaggaagggtctcagtttctccttcttaggacctgcctctagaggtgcagaccaggatctgaagaggaaagtggctttatttacctcagtcttggctcagaggaacaaagatcctttggagaagaagaggtaaagttggttgctaggaggaagtaggtcaggagaagggagaagttacctttaaagggtaggaaatgactgtaatctgcccttaacgtatttcctagaccttcggggtatgtatctggagtccctcgggttattgtctaggaaagtcattgccccactagtaaagtccattcatgatatgataccatagggatgagtagcacccttggtgttcaagttagcactccagagctccctcttccatcttcaacctctgcctctaggaaccaaccccaaagacatgcttttccggggccagtttcctcagtttttctgggaaaggaaagggagaagaggagagaaagcattcaagattcctggggaatctggctcagcaggtagcaggggaggagctgtgcagaagagaggtgcagcagtgggtgagccctggtagcagacagtgggcaaaagggcaaagctttgactttacctgggtcctgcgtgtctgagaagggttcttccagcgcctaaggcttgataggctaggtcagacattagggctgctaggagaggggaggaggaacacctgttctcctaatccaaggaagatcagtaactcaaagcctgagttctcagacctaggtgtggctgcgaggattcagacagagctctaggagagcacagaggaattggggaaacaggctggaaagtggcaagctttggagaaattgcagtctctccctctcaggatccctaggtctgggagagcgggttccccattccctaggttccacaattaccggggtctctaaaggaagccaagaaccagtgggaaaaggagggggcagaggaaacccttagggttttctcccgggtttgtgcgcagcgcccccccgcggccgctctgcgcggctacagaagtacttggtgaccctccggcggcactgctcgcagcggactgcgcagcaccagtggaacttgcagttgcagctggacacggtctcggcccggcgctcctccaccgccagcccgcagtccccgcagagccggcggcagctgcggcgttcccagcgacccagggcccgcccgcgccttaggcactctcggccttcggtgcccagcagccctagcgttttgttctccaggcagtagtccggggagtcctccaggtgcaccagctcccgggtagagatggagcgaaaggtgtcggcgatggcgccgcggccggccgcgctgttgccagcaccctgcagcaggtccaccttgagtgctgcgtggtacttctccttcaggtgcgcgcccacctcgcggaactcgggcagctgcagccaacaggtctgcgtggtgcagctgccagacacgccgtggcacttgcacgtgcgtttcatggtgcccttcaccgcctggggagagagctaggagtgagaggccccggattaagcgcgtggcgagtttaactgcccctgtgggagttgcgagaagtctagttagtctactgggccagcccacttggtacctcattttgccaatcttttaaatgaactgaagagttgtccgcacctggagctggtagtggatatagccagcagctgcctatttccaagggctgcgggactcaccttgcggccagcctcgttgttgtgcaggttcatggctgcccgtgcatcctgtcctgtttccagggcatcgacaaactgcttggaaatcgcctctccgaagcccacattgtcactgcagcctccccacagccagccttgtccccctggaaaagtgcagagggaggacaggtcattgagcaagcgggcgcagagcctcctgggctgctgtttctaattgggttgggggtgggggggtccaggataggagaggattaaggttgggcgagtgccctgtatccagatcagttgccgtctagatttgtttttgccacttttacacgcccacttccaggttcagccaatcccctgctcagggctcaacgacgtaagtagttgccgagtggattctttgcaaggtgccagtacactcctctgccaacagtgcctcttcgcatgggcagagggtgcacgtgccctgctggtgattgaggtccagaagggacaaaatggtgccaaaaagatgaggaaagctcgagcattgagggggaaagaggggtacaattgaaatatggaacaacgatgttggaaattggtcaggagggctcaggagattggagacagcactggaggtaaagagtggaaagtagacggggataggcaacacggaaggaagttccccttgtgtttgagagaagcaacagaggaatccccagagtgttgtttctttatttttatatttaaattaaggaaactactcaatgggaaaagaaggttctaagctacatttagcctggcttgtcattgtagggcttgggatcaaactcgttcacccatcttccgcatgattttcttcatatttagaagaatacagctcttcttcacccccaccaggcttttcattctttatgtgcgttggctggcctatggtacccatccctacattactactcacccagttgcccgttgcgggagtcatcacagccacagttatcaaaatctccaaggctgcagtttctagtcagggtgtacatgactccagcagaactgatggcatgcacaaatgctgtctcccgattggctagcaggaaccaaaaatccagagttagagggaggggtttcagcttaaagaaataccagacatgctacctttctttaataaccatcattatatcctctttccctagctccatcctatttccccatctttattattattttttaacttttatttttttgcagagagtcggtctcactatgttgcctaggcttgtctcaaactctgggctcagtcttcctacctcgtcctcccaaagagcttgggattacaggcttgagccactgtgcctggccttcccatctttatagtgtatcttaccctcttgcatggtctgccccatccctggccttagccctgctcttctcacctcctgtctttt

SEQ ID NO: 96694 - DNA, 917789 bp, Homo sapiens
  misc_feature (1)...(917789): n = A,T,C or G
agaccttcaattcaattttttttctagagaaaaattcagtatttagaagttattgtatatgtgtgttttgtacactttgaatatcagggcatcttttctatatgagaatgagaattatatagacatgtatctagtccagtgtataagtaaggcttatattgtagagaaaagaagaattagaactctttattacataatcgcattaaattaagattttttaggctttcttgatcaatcaatgttttgtcagctaaatgatgccccctgacataaatttataagtccgtgtccaaatccccagaacctgtgaatgttaccttatttggaaaaagtgtctttacagatataattaagttaagcatattgaaatgaggaggtaatattggattatttagtgggccccaaatcccatagcaattgtccttataggagacacacagagaagagaagcagacaatgtgaccacagtggcagaaatcagagtaatggggccacaagccaaggattacctggagccatctgaagctgaaagatgtaaggaagtatttttccctagagcctcttggagggatcatagccctgctgacaccttgatttcagacttccagactccagaactgtgagagaataaatctcttgttttaagacaccaggtgtattataatatgttaacagcagccacaggaaacacaagctactcttaattttgatgctctccacattacatagggagtctgttttcactctctttaatcacaaatttttttaggtctgctgtacctgtatttattctctgcatcttttcttatatgctgaataacaaaaatgaatgatgagcactcctttctcagttggactgcagctaccaagatgctctgttattgttatgaagagggtattctgggcttttctttctttacctctccaggtgatgccccaagagcctgccagcagctccttatgctttccattgactctgtctacctggacttccccggtctcctttgctttgtctggttgtgaatcagagtgaggctggagcggggaagatcttgggtccaactgtcatgttctttcaacaaactgccataaaatttaatcatcatcagtacacctatgacaattaatccatagttgttgtctggacaatgcacagttcaggtaacaaataagacatttcaatcttaaaccttttgaatgagtacatcctacaaacatatcatttgtttcagaaatggaaatatttatggtggctgatgatgccttctaacagtaaggtaggatgctgatgttccactcacttgagaagcaagtgttctccttctggtagaaatgaactaattactagaaatacccacattcatactttgctgaaaacacaaaacactgaataaattctggggattaggtaccagtaagtgccatataattacagtgaatgaaaaatgggggaagagtgcagttaggataaggagcagagcaattgatctattgacctataaaatttggagtattaggtatcttctagactttccagtggccctaaaccaggtctgtgacaaattgatcccatgggtcatatcaatccatagatgtgttttgtatggtatgaatttattctttcaaacctggatgaaaaatgtaaaactcatatcacacattaaaattcaaatttatgcctttttttgaaaaattagaaagtgcaggaatactgagtccacattctcaactggcaataatcagctaacaatcaatggagacctttgaggtatgcattcttattgatgttgcagttttcatcactccctccattagggacttctttaaatcgcattgtcccctataatttggtatgttaaaatctgttcaaagcctctgtaactctgatttctagtttagttgcctattcattaaataagtcattttcaaatgtcatatatgaaattaggtaaaaaaaaaaaatccctaggaatgccttgtacacaaggaatcagttctttttccaatattattgaaggtgatttgattttgcatttaaaagaaacattaccatttcccacacttaaattcattttgctcattacattattgaaacaacagtgctaaaatattataaaagtatgtaaatgtccctcttaacgttgtgcatttttttatcatatgagattggcatatcaactgccatttaatctagataaatgttaatttccatgtgtttaaatgtttctgatatttggcttctcagttcctaaaatattgatttgctgcctcaaaaataaaccttttattttttaaaaaattaataactccatgtattgaaaggttgctggaaattatataaatatctttttttttctggtaacctaaattatttccacccaaaagctttgcattatatggtggaccccaacttggagagctgactactacattctagtgctgttgtaatagtgggggtagttgttactgtctctagactaatgaaacagattctcttcttcctctctgtttccttatcccagtttgaaactatagtataggatgacatcacagtattgaactagacaactgattatgattgcaaagggcaagaactaagaaatcaaatgagggtactgaagaggcagcaaataagtgtaaaggctctattttttggtaagcattctttgaatttatttatgggcatattatgtcatctttttattgctttatgataactcaatctagatattaaatttctaatggaaaagatgatgtatttttcttcttatattcttgctaggtacgtaacaggaattctgtaatgtttactgaatagtaattaaatatgaattaattcaaagctaaaaagcagattgtataaacatgtaagtccctgaaagagtgggtaaataaatgtataattgtttaataggttcccattgatctcagaatgaacatgggactggctatattaggactatgggctgcaacatctgctccagccttcctcttcagccttgtatcatttgtcccttcacttactggcttctggctccactgatgaccttcaacacaccatacttctttccaccttgcagtccttatgcacttatttctcttgcctggaaaagtatttccatagcactttgtatgtatggctctttcccattctcctggtcgcagcttgcctattacccccttagaaagctcttccttggtcacctcaccctatatctagtgagattatccagttcctccccaatttatcacttcacaatttttttcctattattaatatagtagttatatttctcaattattttctagcttattgtcagtcttttacatacgaggctgcaaaagccataaagagtaatttttgtcttattcatctctgaatttgcagagcctgccacactaccactgaattaataaatagtaaagggtgaatgaacaacaaaatcataaaacaggctatacatattacctcttaatgccagattctattgtattctgaggagtgtgtgtgtgtgtgttttctaatcctaagaaaagaaatagttgcctttggaaaatgtttttattttccctcagttattttcctataaagcataaagttgggtgattgggtagatggctcattgctattatgggtttagatatgctatatggtctttaaatacaaatgtttcacataacccgttaccagaattttaataaagcaaagtcacagtcagatgggacatagaacaaagacaataacaaatactacacctcatccaagattgtcttttaatgtcatccattcaaaaggagtttaaaaagctcacttgggattgaaatgtggaaacacatttggaattcttagcagaatggcacagggaaaaaaggtgtgggttgggtggtagttataggtcatctatgactaattagttgttaactctgggcaagtcacttaaccactctgagtgctgatttccttttttgtagaagttaaggtgaagaaataggtcagtggctttccagctgtgcgccgttgaaagttgtgagctgtggtggagtgtgtgaaggtattccagttccaacacccacaccaatcagaaaaactctgcttttagccaatttccacattgaaggactgaatacattctgatttttaaaatgagtctcatgcttaagaatatttgaaaaccactagagtgggtttccaatatcataaatttttgatactatgaaaaattatgaattcaatatttgaaagacttaattgaaaacccactatatggaaggcactatgctaaatactggtagatgaagactgtacccaattagtatataatctaacctatagcctgcagccatatgtttgtaaccacaattcaaagaaaatgtattttaaaagttcatatcagtacataagcacagatctataaagttcagaattggggaagttctgggaatgagtgtatatgtgtgtgtgtgtgtgtgtgtgtgtgtgtgtgtgtatttacatatatatgttatgtatgagtagatttaaatataaatgtattgtaggatgcatgaatatagattcatatgtagtatatataacaaatatacaatgttatatataacatatatatacacacatatattcatatgcaacctggctgtaacaaatgaggcaaaattgtgttcattagatatgtgtctagttaatgtgtggaactttcatctttcctcatattccactgaatcacaatgcttttatgctattaataatgagatttaacacgaggtcatagttcaccaatccctgacatattcagtcacaaataattcttgtaaatgtctttgtttttttccaacaaaaattgaaaagattttttttaattgttgtaaatttttcaaaaaatattattaaaattctcttcaaggtttcatttagggaattaaaacagagatgtgttccaatttaccatattagtctttgtcaaatgtagtatttaaactgctgttatcataattcaatacataaaattgattttatgtaatgaacttcatcttcacaaaaaaaattgggtatcatttccactggacaaataccaatgaataatagttgtctaagcatgtaattttaaattaataatttggctaaaatttgatatttaaatttttttagcatgactgacttaactagtcaggtctttttttaagttgtggagtgaatgagaatccaaaaaccaacttaattcagagtaatgatgaattcaagagctgtgggtatcacaaaccactgagatgtgatttacctgaaactataaccaagcttgaattctcagctcagatataatgtcatttgagcatttattcattttgtaaaacttaataactgccaattcttaaaaatatggtattggctcaagtggaaacattcactgttccaaaataacttctgagcatacaaatagattatcttaaaggtgtctccttcatgtatatgagaggcaatgtagtttagtagaaaaaagcacggaacaggaattaggagacttgattaccaatcccaacacactgtaaatcaacaaattagttgactggaactccttaattcacacttctgtaatatagggacaatacttctgacatgtactatgattataactttattagtaactaactgggatgctttataaaggatcaagtactacataaatctgacacaaaggtaattttgctttcaaagccaagaaaagctttaaacattgctgcttctaaattgcaggttaaattttttgtatttttatttttttatttttgcaagagagacaagaattctctttaaaattattctttgattatgtttttggcccttcccctctttgtcatacttggcttcagcctgtttaagctgaatgagtaggcatttaagaaggttcagcactatgaaatgtatgtataatgcgactggactctacatacatattttcatcaaaacattttacagggatctcagcactaagtatgcagtagatgggacaaaagtcacaacaggcaactttattttagaatttgatccataaatcaacaaaataaataaaaggagctgagtctctctctattatgttagtacacaaaataaaccaaaaaatacatcaacatttaccatgagatcatttaaatgtatttgcaaatgatctgataagggaaacatgatttacaacacgggaaacttcttttaacaaccattgacttaaatgcacggcactgtaggtcacctagactaggttagcaagaatgagcaaagtggtaggtccaaaaggcaacctccaaacaccgtcctcaggtggaaactttggcaattatctgtggttaaaaaaacaaaacaaacaaaaaaaccaaactaccrattcctatccttaatcacgttggatggtcatttygtccattcttctgcgttgagtccactgtaaatacttcaattattttgaagacactcaaaatccacagaacaacagactcttccattctgtacatcaaagaaacatgtgttagccagttgagacatggaatataaattagcagtctgcaatttttatactcaaaacaactttcagcattttgagacaaacttcaagaaggctataaaaaatgactagaaaaaaatgctaggaaaaaaactagagaaagagtagaaagaaaggaaggactgacagaccctccagggtactgctcactgggattctgctagcagttcaatttcacacatcacctgcactcaatccctgcttgggaggcctccctgggatttccaacttttcacatgacctgtttgctgtacttattccaagcgagattctttccaaaaataaatccctaaaagatagcaatttgtcatttaagaagctatttgaaagtacccccaacaatcttcaggcaagtccaagatggggtccagtaaggtttgcataaaatctctcatggtgactatgaaggggatagtgcatagttaggtatataaatacttataaattcattaaaaattttatgtactaatgtaaatatacctttataattccacataattatcaaataagtaacagaggtctccctgtgtcctggtcatttagttctctgggactgaaggtacagatgggaccatggacctttttctatatgaggtctgatagtatcctttttctactggggctacatcttaagatgatactttcccagaaaaaaaaaatacatttwtaacagcataaagaggcaagttgggaagcttccactgatgcttgaagctgagccagggtttgatgggaccaagtaggctcctagttttaacatgtttaatcatgggaatcttaaacagatattttggcagatatttgacactaactaatgattgttccaaatcagctaccactccagctcttcatgagctttgaagggagagaatggtcagttttttagtcttaatgacacatgaggatgtctcatgaaaacccctccaaaaagacagggaaataatcactattaatgaaatgctgtagcaagagctgcaggtccccaccttaggcactctgataattaaacaaagcaaaacaacttgagaggacttttttcccctaacattgacagtttaataaaagaacttagaaacttttccaggatgaaaggaagttgactggtttccttccttcctccctctttccctccctcccttccttccttcttttctttctacttcccttccttgttctttccctttctttcttttctttttatttaatatgcatgtcaaaagagcctaagttagtcataattaagccaagaatcacttgtcaaaattatgtagttcaaaggcaggagcaattcttttatttcatgctcatttggaatttgcctttttacagggtgcagctatgataatattcatacatattaaattcctatgagaagtaaatgtatgccagagtttccaccatgtccattgaacctgtgtattcagaaacatcaggagtggacctcctgcaagtgttctctggcaattgttcaaggcttcaatatccgcagaacatccaattaccttgcatttacaggttgtgcagggagatccagccatcgtccacactgagccactaagccgtgaaacaccatagctgtccaggcaagtttttctgatgtcataggtgatgttatcagctaggcaggggtcactgacacagcggggacaacattccccttctaagatagctgtatactcacagctcaagttggggcaagtgagtggccagcaatctacctctccttcctgtagaggaaaagcaaaaaatgtctcattattgttcctatgmataattttattcccaaagtcatagaaggggaaagagagcacagtaattctcatcactgaatatttctagttgacaccattgaggataaagtacacttcctccttgaagacctactacaggtctcacttctttcagaatgcttttgctgatcatctatactgcaggacatagaaagagctaggtgagcttctttgtgtgccaagcacagcctataattattttaacatgatacttatatcataattagcacaattccacattaagttttgagctttcagactttctgcttgttactttctctccatcatgtttagcacagttttggtcaataaaggctaataaataaattataaggtactgtctagtatataaagagcaattaatttctcttaagttcaaaagcagaacctgaagcactgtaatatttcaatcaaatttaaagttaagattgggcaatgtcaagataaccatttcagaatggttttgaatataacatgtgaccactgaactttctagattgcagttcaaatggagyttttgtgtgtctcagcatctggcatctgtggcttcattgagctgcccacaataaaactatttcactatgcatcctcttcctctgctatcatgaattataatctatggcataataccttacaatatatggcaacttatttaattgttcagtcatctccataagactgtgggctttgtgtaggtataggccatgtttatcttgctcactgttacgtcatacaaagtttggcacatgaaaagtcttgaatatttattaagtatgacccacagtattctcaagtaattcataagttatgtgtttaacagcttcaattttcctgagaaatattcatcttaggggctaggatggaagaggatacacttttgaaattctatctatgaaaatttcatgcatcaaattaatactaattcttctggatgcctgatgattagcttcttggaaaagaaatgcaatttgccagtctcatagggaaactaattctacagttgtattgacttttttgtccttgggtgggagttttaaaaaatgactacaatttttatttatctgagtcatgcttctcagtcataggagtgattaagaaagacatattctgttaagattatctgcacattcacctgaagatttaaaaaaatctgatggaaatttagagcataatttatctgaatacttgttttcatacagtacccataaaatgagaatcattcatgtcagcaaatgttaaattacggacacacagctaatagtttccattaccaatcaactcagaatgttccatagttgtgactttacatatgggacatcacattccatgacaatgtgtcctagaagtcttcccactgctagaaatctttgtgatataatttgaaactgaaagaaccaggtcaagaaattaagccttttctctggactttctcaaatctaattataccattagtagccctatattaatatttataacaaccttcattttttcctttttaaacatgtagtatctgaaaagatttttcaaggtaggaagtattaacaatagttactaccatacactaagtaccttctctaagccaagtactgtatttgtccttcttacatatcttgtaatctttgtaacagcccattctttccctcagaggtactcacatacctgtgtccacttgagggccagaatagtcagtaaaatgctaggacttgcccaaggtaatcattttaagctagtatgtgggaggaccacatttagattctaggtctctatgattaaatctctgatatttctactatgttttgttacctcttatattgaaatctttaagggttatggcacagaaatgagagatttagctctgtcaggactacaagcactagtcaaggttttgaaagcttcctttcttgcagagatttttcttgatcttgatttctttttagtaatagctgtaaactgtcattgtttgggtcaaatctgtcccataaatatgtgctttttactttgtacagtatttcaaatacaacctgaatatctttaggaagagaacatgacccttagccacaggccccacagagctccctgtatagtattaygaaaaactgggaactaggtcccacagacaactgaatttgtaacctctttcagagtaaaggctcaacaccytataaaggaagccaacataccagacaccgacactgctgacagctatgggtccaattgtctccacttcgatacagcttgtgaccattttggtctaaacattgacttgtgactctggtgtcacattctgggcaacagaataggtcagcacttggattctggcaatcacaagctgtccgtcggcagaatatcttgccatcctgtttagaaatgaagttaaggaggtttcatcatttaggacatgatggacagctacactaagagaaatgaacttcttggatktttggtcaccccctggccacctctcattctgttcaaaactgaagcacacatgtgtgttcacacaaacacaccctttctttccctgattttgcttgcagagcagaaaaaataaaaataggaacatttttaagtttaacaaaaagtcaacatgttttttgaaaatctttttcaaaggggttcttaaaaatcgtatttctaagtaagaattataagtaagcagctaaaaatgcatatatgatcaataagtcatttgagtggaaaatcatgctcctgtatttccatgctaccacttaacatattcaaatacattcatctaactatatccctgtcccaaccgtgaaaggaagtctgattatgccctttatacagaaaattaacgtagacccagagaggctaaaccacttatccaagatgacatagttaggtagtggttctccaagcagcaccaccaattgttatggtctcaaaatattctttggcaagatcgccttaaagttgtgtactacaggggtgtataataaggtgcctctttccaccttatggcagttccccatattgtaagcacagtacaatttttgaagtattgtctttgaggattcatagctataaaaaattgaaagtcagcagcacttaagcagtaagagtaaacattttgcagcatgtcttttttttatgtctgttgcttacagtaatttcttaaacaatgttcttcattgctgaaaatttaaggtaagacctgtctgtcatcaccattcatgctaataactaatttgctgaatattttaaaaaaccaaagagtctcagggctgcaagttaccttaaagaacatataaccaagcctcctgacctacagttgargtcatattcaactgytgaagtgcttgaggctctcagtcttggattcatcactatggagagaattcagtgtgcatctctgtacatgttataatgtaaaaaatcagacttctcattacttctatccattgacccgaatccataccttcagtaataacagaactccaaacactttgtcatgtttcaattcttcagtttttagaagacagctcttatgtactcactgagatgtttcatctctgggtaaacacctctaacttcttgaccagtccccatcatttataatcctttcactgtcatagttgccttctctttcaatggttttaagtatatatcatcatcatcatcatcatcatcatcatcatcatcatattctaccatgyatttaatacttatcttgtgtcatgcattgtgcagaggcatttacatgcatgatcacatttaatcctgataatttgtggaatgcgaatgtatctctctatttctcaaatgwggtagctgagagagaactaaatagaattattcagcaatggtctttgaagaaagagtgaattgaatttaatgctcaccttgttttaagtgttgtagtttctttaatgcaggctttttttcaataaagtcatgtgccacacaatgaaattttggtcactgacatactacacatacaaaaggtggtcttatataattttaatgaagctgaaaaattcctgtcacctagtgacatcgcagccattatgtaatgcactgtattactcatgcatgtgtttgtaatgatgcctgtataaacaagcctactgagctgccagttgtataaaaatatacacctacagtcatttatagtacatactgcttgataatgataataaatggctaggttactggtttatgtatttagtatactatcttttttaatcattattttagaatgtattcttcctacttataaaaaaaaaaagagataactaaaacagcctcaggcaagtcctcaggaggtattccagaagaaggcattgttatcataagagatgatagctctgtgcgtgttattgtccctgaagaccttcaagtgggacaagacatggaggaaaatatggaggtgaaagacagtgatattgataatcctgaccctgtggagacctaggttaaggtgtgtttttgtgtgccggtttgaaaaaaatgtttaataagttttaaaaaattagaaaaagcttatagaataagaatataaagaaagtattttgtactgctgtacaatgtgtttgtgttttaaactaagtgttattacacaagagtcaaaaagttacaaaaattaaaaagtttataaagtaaaaagttacaataagctaaggttaatttattgaagaaaaaaaatctttttcaaaatttagtgtagcctaagtatacaaggttcataaaggtacagaagtgcacagtaatatcctaggccttcacatgcacccaacattcactcactgactcacctaccataactgctagtcccgtaagctccattcatggtaagtgttctatacaggtataccattttttgtcttttatatgtattgttattgtaccttttctacgtttggatatacaaatactcaccactgtgttacaattgcctacaatactaaatatagtatcatgctgtccaggtttatagcctagaagcaatagactataccaaatagcctaggtgtgtagcaagctattccatctaggtttgtttaaatatactctatgatgttgatacagtgatgaaaaagcctaatgactcatttcttagaatgtatccctgtcattaagtgatgcatgactgtatttacttctttgactatgccatagtgttggctaatattgagcttaatgaagactaaaacctcattaagccttatctcatcttgggcagttggctgtttaggggcagcaagtatacaacttgatgtttatctctgttgcatttcatattgttagatctatttcatctcttcttcctgtcacaatgctttgcaaatgttatttatgtcatttactatagctcaccgtccttcacagcttagtgacatctgaaaacttgatggacttgccctcagggtctttatctactttatccacaacaacgctgaataatcagacaggacttgctgagatgttttgtgtcagctaaagtggaaaccttaaaagctttatattctttaaggagaatggaaaggagacatgccagctacrtatataacaacaggttgaaaaatgtatcgtgtgcattggctcttttactatacaaataacaagaaatcatagtgttccaaaaatatcaagagatgaaagattatacacacacacatatacatttgcatgtgtatgcaaacgtgtatatagagagcaagcaagagactctatattttagcaagtgaattcaatcagagaatccagctagtcaggacaaggaagtgtcctgatcctaggaatttcccaacaataggcctttggtttacagctcatataccattattttaactcagtaatatattttgcttgtgtcaccatggccccaaatgactccctgaagacttactttaaccaacaaaaactaagcaaagtaatgatagctacaacacaaaaccatttgatcagctcagcttccaatggcacactatcactcttcccaagtgtagaaggatcatgccttaggaaccagcatgtctgtgtctgtggctggcatcaaacaaaaggataaattctttcagaaaaggtcgctgcacaacaggctatgagactcaataagaatgtcagttttcttcctatgtgctgattaaaagaatgaataagaataaatggatagcctccagggttagtgcaaaataaagcaatttcatatctcatcaattatgtgaaaatgccaaataggcccctcttagcttctaacrtgtttcagaacaatggcaatgttcactttgcctttgaattacagggtaactgtcaagaaaatcatttttaataatgaaaatgtcacaggtgactccattaatacaatgagaatgccattataaaacatcagctcacagagcacaatcacactagaaactaaatttggggagagtatggagctcactgatgataagtaatccttttatcagagatctttgaggctgtttccagagcttgatctctatcataacttgggtggtttgaacaatccctacttatatgccaaagatgtatttttgcaatcttctgccacagaagctgttttgatgcaattttatactgcaagttcaatgataagcaattaataattattctaatatttaaattgcttctgaattttaaaaagcagggaaataaagtttcctatctggtaaaaaaaatacattttttcttatgccataaaaatattataggttttttgctattaattacaaattttaatacggaatagtcagtatttcagtaatatttcagtatttcagtcaatatatcagtaaatactgatatatttactccagattacataatatcactcattttttttctgccatagagttttgaaacttttaaatcaagaaggtggacgtaggtcagattatttctgtaaaacagtaatataaactttgggttggaaaackgatgcccacggtacaaattcaacctgatgcctgtttttgyaaatgaagtgttattggaacacaagttcccttgttcatttacattttgtctgtgggtctttttcacactgcaatggcagaattgagtatttgggacagaagctttatggtctacaaaacatgaaatatttacaacatgactctttaaagaaaaaaaccttgctgatgcctgatatagactatgaaattagggttggtaatctagacgcacctattctactttctcacacacaaattgagctgtgatttcyaatctttttacaaagtattaattttgccttcaggtcacagcccacaaactggtctcttagtcctaacacctggggtagaaacacatttagcagtcattttatccagttatctcattttaatgaagaggaaaccaagcccagagaggcaaatgccttttccatgtagaaaactaataacaaaacagaaacttatccctaacctgaactttcataacartgattttccactgtgatgcaccttttgtatcgtgaggaggctaggggataggaaaaactaattttagataaagtgatatcagaagtattcttggggcaaaagttttcaaagtggcagtcctcaaaccagcagcattaccatctcctgggaactactgaaaaatgcaaattcttgcaccccaccccagatctactgaaccagaaaatactgagggtagagccagtgatcaaagtttcacaagccctgcaggtgattctggtgcaaagcttcaaaatcatggagaaaaaacatcacccagtcagatggggaggtagcatggtgtaacgttcaagctcctgcaaggtcaaaacagggttttgaacactaccacaggggaaagagtcagggaaatagaaagagacgccctgttcctttacaggacccctagagttttgagtgccaaatgaaacctaccaataagttcctctttccaaggaaaagaaacacaatcttacagcttgcacagctaactccaaccatcaaaaccaccacagacaggaaaatatttataatgctgctagttgggttcaaagagcaaggcaaagcatttttatgagcagtttgctggaattcagaaagtttgcttctatcctggccccaggcacagaccagactgttccctggcttcttcctgtgagtaagtcctattcttaggaaggcagaaccagtatgctgactgctccttgtggatcagattctttcctccttgccagaaagagatacatgagttcttgagagtgtcgctggcatgaccatcttcagtttctgggaataggtttacataaaccagatcagatggccatgattccagacaatctcatgaaaaaggtcttcttcactttgactttcctttccacagtaattcatccctgactttattataacatggaatactgttatrccataaatactggctatttatggtatccctttccctactcatctctaaaccccagaaaaactcaagaactaacactgctcaagtctttagtattactttgttttcacgatgaaggctactcacattttttaactgcaagaaatcatagaaacactatctggccttcatagtttgctctcttcctcccactagattatccagttactactcaaaatagtataggtataagtgtacatgtaggtatagatgtagtagtatacaagcccaacttgcagaccctggttcttactcttatgtaatggcacctgaatcctgttcacctgagaaaatgggcagctatgtctcaaacatgctactcaggagcttttttttgcccagagaatagggaagacattaccacagacactaagtctctagcatcatcagtcatcaggacccatttttcacttctgcattttctcccattagatgttacttctctatccctctttcaggttttcatctttactcctctgaacctttacctcagcctaagtgatttctttctagttagcttctatctgctcaggtcatccatcatgctgtcaatcagaccttgactgggccctgccaattccaaacgtaaaatctcttaggatcatttgctgcccacaggtatgaagtctaaatcccgtggcctggctctgtcttcagccttaatctcctggctcatcataatctcctggctcatcagtgactatacccttcttatactctttttgttcctgatattttgagctcatsattcacttcatatttctaacacaacatatattcttacacttcctcatctttgttcttacagttccctcttgtttgggattcaccttcccctacatctctacttgattaaattcctcatcctttaagggccccttcaaagatcacctcctctgtgaaaggctttccgtattcacttctgcatcttcccagagtagagcattcagtcgtccctcagtatctctgggggattggttcaaggacctctgcacagataccaggatctgcagatgttcaagtcccttataaaatggcatagtatttgcatataactgcatagtattgcaaaccacctatgcatatcctcccatatactttaaatcatctctagattactaataatacctaatagggtaaaaatgaaatatttatattwttaatttaaatttgcattatctttgttttttaaatacttttgatctggggttggttgaatccaagaatgtggaaccaacaaatacagagggcggactatgcttcccctttctgtgttcccacagcaaattgttcatagctctaccatatatgacaagtggttagttgtttgtgtatccattttcatcttcatctccatgatctgcaacataaacacaactactcacactaaaatactacatttcctagaaacgaataagctggggacgtctctaccttcccatgtagcacaggctgaaaataaagatgtcttcctaaagtcctagacaaatttatgaatggaagagccacagatgggtatctatgaaaagacgctgggctgtaaccaagatttatggatcaatcccagagagacaaccacttttcatctgggttcctgtggtctaaataatgctggagggacataagttttaagctgtgcagcaatctttctgtacctaattaactaggtgtctaaagatgcacaaaaacattgtcactgccaaggaagtacatagaatctaaacaaaagcccaaatccatttatgctagcctagcttcatcattgaactctattcatctgtggacatgtttcaaggcctttttatcaattaccatgaaacactagcagctaagctggtgtactgactctcaaaggggaaagtagccttttaaaaattttaactctatttccttcagcagtaagtcttgaccttttgttggtttgtgtaattctgctgttgcataatttgacggcatttaaatctgaaacatcaaggatatgattgaaaagatagtactttatatcccaaccttgattttattacttagcttccaagatgatgccattatagtcacccatttggatgtgtaagtattggaggtatttcttatcaaattgaattgaaacagagcactttcaacttcaaataatagaaacaaggagggccacaaacagttcattttataatggtgacttacagaatctgatttaggatgcttaattcagctcctaaaccaggctgtcttccccctccacaacctctgggaaactgtgctataaatgggcaatgagtacatgtagaacacaaacaaacaaaagatttatgtacagaaatctgcctgtactttattcagaaattgcagtgctttgcagtgaaggtgcatcatattaacaaaattagattacaagaattgctcatcccctgtggaaatttcagtctaattctcataagactttggaaacacttcaggattcaaaacagaagaaatcaatwtacgttgcttggattattaatacagttaattaaagaagctctgggaaattttcaatgattagtaagttccctgcttcatcatggcttaaataaaacaaaaactgaaagaagaattttactctcatactaatcaagactccactaatgtcctttgcctattccagggactggggacctagaaagcccaaaaaggatgtgaggatatgtaatgatcatcctcaaaagtttaataacacaatagtttcttgaaatgacctagcaaagaattcacccccattctgctggctgaatgggagacctaattaccatcctcttccatgaggaattatggaaatattctaacccacaatgagatttgtcttctcttaaaaatttttgccctttgagtcagcaccatgtggttaaatattatacttaataacttcaaaaccccttgaaggaatgtctcaccagtcacttacatacaaggaagtacatggaatctagttgaaagtcaaaagtctgagttgaaagtctgagctcagtcaagttagattaccagttacctaactggttttaaatataccaataaatatcatcgtagagtgttacaagacatctgacaagatggaaaaactatgaactttgagccaagcaagtggagttcaagtcacagcttagacatttatatctttaacatttagggcaagttactttatcccatggaaattcagtttcattgtctttcaaagtagtgctgtaagaagtaaacatgatgcagcttttttgaattatagggtggctgaaatatagcaggtgctccaataagggaaaacaaacctagattggagtgtgggaaactaggtttatgtgaaaggggaaaaaataggtgttgggggtaatgatctagcacttgataatgtggccctcctaactaggtggccccaggtctgtggatgtgtggcagatgaaggcaagtggatgaactggatgatttcttaaggctcatttcagctctgtttcagcagactgggaatttatcaggagacttggctaagaggctactaagcaagtaatttatcttggttcccatgcacayaaagctcaagattaaatagtcccatcccaacagacatagacataccaggcaasagctacagtagagcaataacaaaggaaaataaataggcaagatcaataaaagaagaaataaagcacaaagagatcaaacagtttaatagacccattttgcaaagcataaagcaaaaccaaatgatgacagaattttattttcataagcattaagctcactttccaacaacttaatataaggaatggcccagcactgagaataacargacatcaatttctaagaggcctcatactatcattatcatttgttcaaaatgaaaatccacctgtctcagcactggatgcaagtctgttggccttgcttttctagatgatgtcataaagtgagcaagttcatgcaggtggttattttaggcaaagagtagttttaatcagcaagtttgtataagcgtgggatgagggctcattaaaactctcacccaaccaaccttaaargcactgtaggctttcagtgggaggactatcattggcttttctaccctgcttcgccttccctgcagttccttctcaatctcatacctcactttccactaagaacacaatcaattcaaagcaggcttccctaccccttagcatcatcattagctgtaatgtagataagaacaggagaagcctgttcaggaactacagtcaacagcaagagggagagagctgrggaggtagaaaagtgagggaagaagagaaagaacagtttcaatttctgctgcaccacatcagcctcaccttgcaggagcagacagaacacctgtcttctttcaaggtccacacctggccattgtgcttcagccccccttcatgaggacagtcaccagagcaggagggcccagaggggcagagacagtcaaarccccctgccaggttgatgcaggcagaatcgttccaacaggtrtgagttcttaaggcacattcatcaatgtctgcaatataggaagcacagaagcttagaatctagccaagggaacttagagaacaaacaaccatcatttrcagtagcattaactaacatcatcgaccatttaccttgtgctaggtactgccaagctgttcacatgtattatctcatttacactgcaagtcagttctgctctgtgtgggagatctgtccttattcctattctgcaaataatgaagctgaggttcataacttaaataayatgaccactgtcatagagctagtaagtggctgatctgagacccaaatctacagctagctcccagactctaattactaaaatatccagtagcagttagcaagttcttttaggatattcttaagaacgatttcatccagaggccataaacactgttaattcattaacagtatgcacacaccaccatggagatctgagtcttttagaaaagatgtgaatgtattagccactgagtaggaacaagtgggcaatttgggcaaccttgagacaatcagattgctcctagatcctaccaccaaagttgaaggaagtgggaacaattcttgataggtgtcttttatagtcaaagtcttactatccttatggccagcagaatatttgcccgtgcataaaaaataattgctatatggatggatgctgatgaaagacataaatatattgtcctgctctttattgacagccaacaatggaataaaaacataaatccagtcggccrattctgacatttaaagcttgagcgaccttaacaacatctcaaacacaaacctgtccaaccctggcttaagtccttccccaaaaggcaatccattaccttgcaaaatacctgactccacctttggataactcttttggaaatgtctcccttaaattgagatgaaatatactaccgagtaacttctactcatttgtagaagtactgatacttagtgtctgaggccattgaataagtgtctactagtctacttggttttggtttacctgctatgcacaagtttctttgcacatggtgcaatacaaagcagatgacattaagaaattctaataatatttctagaagttacttttttccaagatctaatttttggctttgtcttaccaattttagctttagtcaagacatttcattagtgaacaatgatttctcctttgaaaattatagaaaagatcccaaattatgatgcctgtatggtaagtcaactaaaatcaagcctcactatatctcctcactgttactagtcatgcccatcccattctcagtgtatttctatttgaacatatggtgctcctttcatatagcctctcttatctcttcaatcttctttcaattctcttattcttctcaactaaaaggagttttaaatgtgggagtctggtgaccaatgtttgaaaccaagctcttactttttagttgagtgcttaccatgtattagtcattttacacgtaacagttatatattctttgacatgttactttgtttttctctcatttatcttctatatacactatacccactcaatgtatggtcttccaaaaattttaaacccagcatagcatataaatgccatctaatactgcaattgttatctcttgtcccctcccttttcattcaaaagcagtgaatacaaaatttcagttaaatagaaggaataaattcaagaagctctattgtcaaacatgatgactgtagttaataacaaggtattgtatgcttgaaaattgagaatatttttgtcacaaaaaagtaagtgtataaggtaatatatatatatatattatgtagcttgattatttagccattccagaatgtattcctatttcaaaacatcatgttgtacaccataaatatatataaaatgtatttgtcaactgatttttttttaaaaagcaacgggagatccacaaagaggccatattgtttcctatgaaacaactgtgtcttagaacatgctttcttttattatgagagtactctctctctttccctactttttcttgtcctatagggaatgaggtgaggtatcaatcaattaattgataagcactttccttcctgtactactttcactcctacgcagtcttaaaaattcaggttaagcctcaccatctcttatatggcaagacagtcactacagattttttgctttctctgtaccttatacacaattctatcctgcattcctctctcaggagttacgtgtttaacttgtctacctccagagagagtgagctcattgagggcagacactaaattttatttttctttctcttcccagtgcygagtataacagaatactatatggatattcgatgtatttattccatttaactttcttaggaaatccacagactgagactattataatgcctactttgccaaaactcggtctttagagtgttcaacaagcataaggcataatcacaaccctgcccttcagggaacacattttgttgttgagttctcatctgtgaaggcccttgggtytaatttaaagtagaaaaaatacagcaaattagcaaccacattgaagaaggggcaatgccctgccccttccccaggaaaaaacttttattttctgtcaaatgcttgagaacaagggcagaggaagcattaacaaatggctccagaaattgtctggaagtataacttcaacccatccaccaccagtggctacaaaagggttggtaatttatggctttctctaaaaaatatctacattgacaactaatgcccagctatattatgcttttaaaatatttggttattttgcatttacaaarttgcaaatatattggtagtgattttctctcataaattaagaaggctgagcataaagataaacatacctattgtgcacaataaaagcagggcgcaaaaccaggatttgctttcacttctccagaatgaaaagatttcacagttgaatataggaccatattgcctacagagttccatgtaattgctttacttatgacacagaaatctaattctgtttccatgcaatttagcagatttatggaaagccagatgttagcaattatggaaaccaacattattcatattcttagtaatacagacctgtttgctctgcacaaagccaacttaatctattatacatatcccaaggcagccaacgggaagaggcaccctatttacatattgcaactgttgttctctgctgagcaaacacaaagttattcacccgtgagacttacccaaatcatcagacaggcctcccaatgacaaacaggcaatgaaagaaaaattacacgaagtatttgagtatttcgtactcaaatctattatcattagaatgtacttgtttttcttattgtaaataatggctggctgtgrtctctctgtgtttcttcttataaattcattatttaaatgcttcatgctcgaatgaaatattttttcaataaaattccatggctaagcttgcattagaactaattttcttgcattaacattttcacaatttctgaaagctgttattattgtactcagttttgctctttaaaacaatctagttgtgccaagtcaatctgctttcatctttgatgtgaggtttttaggttacttgggcatgtaagaaaatagaattcagagatgtttataacagcagcaatcaaaccaatcctaaactagctgcaaacaattttcctacccttcaagccaaatggctctgcagaaatttttaatagcataaccactgtattagtacttgcctcaggagctaatacttctacaggttgatttcagaaatcaaagtaaacattttaccaacagtttggtaacaggtcaaagcagtgaactttttcattaccccatattcctctttcttgaataactttgacagcacatctagtcttattttcaaactcaaaacaggtgatgtgtcagaaacaaaagtttacccagcgtttgaatatacagctgtgtgtgtgtgttcctacctggaaatcattatgagtggctcagaaatgagaacagagcttgggggttcattaatgacagacagtctagagaacagatccctctccaatatctaaagcagtattgctttttttacagtggcagagagaaaattatgggggaaaatatacacactacacgttagcaaaataagtaaaataagtagcgaatctgaagtctgatgtaacttgcaaaataaaaggctaatgaaattttaacctgcacaataaatttcaaatccaggctaagcrgtggcagccatgctctatcatgtgctggccataccacacttggatattgtgttccctttagcacacagactatgaagaatgaggttgacacagttagaacacatcagaagagatccattagcgtgatgaggagctcaaactcatctcactttggcaaaacacaggatgttcagcctgaaaagacaaagactaaaggaagagataagttagagatagcttcatctatttgagatgctgctatgtatcttttaggaagaattttcaatacccctttagcattaactcttcactcactgttccagccccaaacctttcctgagtcaggaagaaaccctttcctatggtgttcccttgtttggtgtataattttcttactctgcaatgactcttcccctttcttttaattaaggagactctcttttgacaaaggaaaaatataacactgttttggctcactatttccttgatccagattttatttcctagtatctacaattagcaactatccgcatttactcattttcattctctcctgaatgtgtgcaagcttccgtgggaccctcttctcgaaggctaaatcttgaagtctctcataaccactagtttgcaaaatcatcacscttgcttaaaaagtattataacaaatattgttattgattatttcagtctaagagctctctctgtgacccttctggaatataatattgccctcttcatcctattatctcttcattatctagtcactagtactcatcaatgaataaatgaattccctgcatatttatttaacatctactctatgccattaacatctactctatgccagatacactgctaagtgctggagatacaatgggcaaagaagccagatatggccctgtaagtattgactttatagttgtctctcattttaaaaaaatatttgtatatcctaagtttccacgtctggtccttgtttctctttctccttagtggaagaagtatagcataccaattgaaagcttaacctttgtaatccagaaactgcggataccagtttgcctggcactgagggagttcctgagatagctgactttcagtgctaaaactgagaaagttccagccccatagggacaagtgagtcaactctgtcccagtccatccctgcaatttattagttgtacgactctaaaaatttacctaacatctctgagtcttggtcccattatgtagaaaaatgtagataaaaatatactccatagaatcatttgggtaaatacataacgatatgcttgtcatgtaataattgctcaaaaatgattagtcactattattgttggtcttgttcctattgtttctataatttttctctcatacatttaatctcatttaatgaatttcactctcccatctcttcaggacagatactcaaatatactcaaatctgtaccaccactcctgatctcttatgatgcaaccagcccacacattcatcgatttgccaaggatttccacgtgaattctgattctcacatgaattcacatggttttgattagtacattggctagccatacccagaaatgttaacattaaaagctttctctgagccttaatctgatgttaagtgaaacatgttgaaaaacataattttcttacactccatgaacttgctttggtcactaattacattttatttataggatgtacaaatttaggtgttttactgtagacgaagaaaagtttcttctaaattaatcaagttggtttactttctgctatgaacaagtcatacttctttaaccagtgattaaatctgcttaaaatcaatacagttctgaccagcagagagaataaataaaaaatccataaatactgaaatacttgctgtttaaacagagttttactgcacagaggctacagtattgatgtcaacaacccacgatttatatgtttttacatatctgcttatgagtaggagggtggtttgtattattgctgcagtctactaaatgactaatacccagctatacacactgtattgttatagccattatattgtttaatgtctttaacaaaatttcatcctttgctgaaaagaattactttccctgtattttaattttatgctgcctatgttggctttatgttttcttgtatgcttagctgtaagcattctatcttttctatcttccttacccattcacatttgtaagattctggtcttatctttatgtctctcatagcagcttttacagtgtctttcacctaataagaaatgcataaacatttgttaagtttagatttggtggagctgtggttgaaaaagaacccttgcttttggatggccccaggcttctctttggtaaaatttaggagctatataaaatgttttctaagatcttgtccatttccaatttgatatgattacttttcacctctgtaaggctgagcttgtaattcaagttttagaatatgagtggtgacagaataagagcaggttagaggtgaaggaaagaactagttttgggataacaaatgcatttcttagaattaaacagttctcttggacattccataattattgaaacatttctgctctcccttaatgagtatttacaagcaagtgccaatgagaggaagcaacaaaggaagaagtatgtttttcctgtctgcactgaagccttggcaatgtaatcctcggtgacaaatacacatggggaatccagccaaggtgaaaaccaaaactaactctctattttgacagatcattctctcaagcaagttctcagatgaggaattatttcttctctcttctgtgccaaggaaaggtcttagtcacagggaggttacaaagtaatttcattcactacaagaagcattctgcaatttacacagaagtcaaaggtctaaaaacattgtcaatacagcaattctcaaaccaggttttaatgtaaacaaaggagggtcagattacaggagctaagaattccaagtcctttcatgcatattatttattatttcctttcactgccctgtgtattgtagttccaaacttctaaggggaagtcaaggcttttccaaaaactatgccctagtaggggagttaagacattgatcaaggacagtaatttgaaccaccattccaagaagggcagcatctgcagagaagaaaaacaagctaattaatgaagctttatttgatctcatggtgtcttttcttggaagattttatccctttgaatcttgatcctctcttcatatttcttctataaaatgctaaacaaacaactggttcggtaaaatagctctggggctgccccctaatttgaaaggaagattctctgaaaagatctgtaaggcttttctggggacaagggaaaaggaagcacaragtaggagacttgagtccactgctctagactttggaggatcaaattctctttattttaaatttgtcttttttttctgtgtttcttaccctaagggaggtaaaatcatataagccaaactaagttggtttccaaggaaaaccaaagtaggtcactaacaaagatcctatccatgactgaacactagtcagactcctctgagcagactctctgataaatgattttgtctactccattcaccaaccctcattaaaagactcaaacaaacattaacttttttattattattattatactttaagttttagggtacatgtgcacaatgtgcaggttagttacatatgtatacatgtgcaatgctggtgtgctgtacccattaactcgtcatttagcattaggtatannnnnnnnnnnnnnnnnnnntccccagagagtgatgttccccttcctgtgtccatgtgttctcattgttcaattcccacctatgagtgagaatatgcagtgtttggttttttgttcttgcgatagtttactgagaatgatgatttccaatttcatccatgtccctacaaaggacatgaactcatcattttttatggctgcatagtattccatggtgtatatgtgccacattttcttaatccagtctatcattgttggacatttgggttggttccaagtctttgctattgtgaatagtgccgcaataaacatacgtgtgcatgtgtctttaaagcagcatgatttatggtcctttgggtatatacccagtaatgggatggctgggtcaaatggtatttctagttctagatccctgaggaatcgccacactgacttccacaatggttgaactggtttacagtcccaccaacagtgtaaaagtgttcctatttctccacatcctttccagcacctgttgtttgctgactttttaatgattgccattctaactggtgtgagatggtatctcattgtggttttgatttgcatttctctgatggccagtgatggtgagcattttttcatgtgttttttggctgcataaatgtcttcttttgagaagtgtctgttcatgtccttacagccaatatcatactgaatgggcaaaaactggaagcattccctttgaaaactggcacaagacagggatgccttctctcaccattcctattcaacatagtgttggaaattctggccaaggcaattaggcaggagaatgaaataaagggtattcaattaggaaaagcggaagtcaaattgtccctgtttgcagatgacatgattgtatatgtagaaaaccctatggtctcagtccaaaatctccttaagctgataagcaacttcagcaaagtctcaggatacaaaatcaatgtgcaaaaatcacaagcattcttatacaccaataacagacaaacagagagccaaatcatgagtgaactcccattcacaattgcttcaaagagaataaaatacctaggaatccaacttacaagggatgtgaaggacctgttcaaggagaactacaaaccactgctccatgaaataaaagaggatacaaacaaatggaagaacattccatgctcatgggtaggaagaatcaacatcgtgaaaatggccatactgcccaaggtaatttatagattcaatgccatccccatcaagctaccaatgactttcttcacagaattggaaaaaactactttaaagttcatatggaaccaaaaaagagcctgcattgccaagacaatcctaagccaaaagaacaaagctggaggcatcacgctacctgacttcaaactacactacaaggctacagtaaccaaaacagcatggtactggtaccaaaacagacatatagatcaatggaacagaacagagccctcagaaataatgcctcatatctacaactatctgatctttgacaaacctaagaaaaacaagcaatggggaaaggattccctatttaataaatggtgctgggaaaactggctagccatatgtagaaagctgaaactggatcccttccttacaccttatacaaaaatgaattcaagatggattaaagacttaaacattagacctaaaagcataaaaaccctagaagaaaacctaggtattaccattcaggacataggcacgggcaaggacttcakgtctaaaacaccaaaagcaatggcaacaaaagccaaaattgacaaacgggayctaattaaaataaagagcttctgcacagcaaaagaaactaccatcagagtgaacaggcaacctacaaaatgggagaaaatttttgcaacctactcatctgacaaagggctaatatccagaatctacaatgaactcaaacactaacattttttctaatgactcaaggtcacatcactaggatgggaattccaaaccccaaaagtttctgcctggaaaaggtaaaggctgccaaaataatttactgtttatttcagccaacacttgaaaataggacccctctcctagtctctgtggaggagttgagtctaacttccctaagtgccacttaacaaattcagatgggcttcatgggaaaaacctaccctttcagctttttgtaaattccactttcctgactcatgttgaagcccctgcctcactctttttccactcttttattcaccctctaaaacacccagtcatttctgcacaaattgaagttcatttctgtttacattgggccctcttccctattgcaataatttattagggattaaaatctgttcttaacactttagtgtccacctttggcaatctttcatattacgtttttaaaatctttaatactgctggtatctttaatgccactcagggtgccagattacaaataaaaagattctggcagttcatccctggttgagcccagcttattaggataaattacagatgggggccaatgtactcattaataagaaaaatgactgcactgagagtctctttataaattcacttttcagcaaatgttgatttgctgtgtcagacaccgttctaggaattgggaatatgacagcaagtaaaacagacacaattcgttctcttggaaggttaagacaataggaggaaacaaacaacagaatcatgtatctttcatgtatcttcctcaagaacctgcagatggtttgctatcctggccaccctaggtacttttattgagttatgattgattaacacattttgatataacagagatttatctttttgttatgcataataacaataccttagtaaactcttatacattatactctttagaattttcaaaaccatttcaaactcatgatctaatttgtccttgcaaaatactcagaatgtttgtatcaacatcattgccacttaaccaaactgagagtcacttaaatgatcactgcttctcaaacatttctaccaaagttatctccatggcaaaaagagtgaacactcacttggaatcttggatattcataaaccctgttatgtattagtatagaatatatttgaagttttatatttctattttaaaaattatttttgtcttctagttaataatatagtcaggattgtttatatagaaatcatattttcctgaaaccatggagtacagtaaaattcctttcctgcttttgtgttatcttgtatgcrgcagcatgctttcagmaatgctaggaccccagtgtaagaggtatagaaagagtaacaaagggtcaagtaacttgccctgggccagccacacaactagaattcttttgtcaggacacaaatgcaggcatcctaacttaaagccaggcttgtcccacctcataaccaatggttgactcccaattctgtagaatacaaacacagtaaccttatgcaaagactagatggtaaatctctgatatggtttggctctgggtccctacccaaatctcgtcttgtagctcccataattcccacatgttgtgggagataaatgaatcatggagatggtttcccccagactgttctcatggtagtgaataggtctcacaagaactgatggttttataaggggtttccgctttcacttctctctcattctctctctcacctattgagaagtaagatgtgccttctgccttccaccgtgattttgaggcctccccagccatgtggaactgtgagttctccattaaacctctgtcttttggaattgccccagtcttgggtatgtctttatcagcagtgtgaaaacaaactaatacaatctccaacatgacaacctatacattgattctccaaatattaatgatacttaatatttataaaaggcaatgataaaatgattaaatcatgcctctatctaaaaaccattacaatttattggagtagatagactctttgccatttaccccatgatgccacttattcactcctctgcatttccactacctggaccatttattacaatggcaccatactgtttgctctgccatggtctcttcctcaaagagaagctaaatgaatagtttgataatgctactctcattatcttgaggatttttttttagcaggaaaatgatccagtttcagttgcgccatgattgtatatttaggaatcggtagaaacttgtatttgaatccaactcttacttacatgtgtccccaaacagttttaggcagtcattttcacaatttctcagctgagaaattgctactcactacgtggcaatgagaaaattcagacctcactgttcttcagtttgtctatctataaagcaggaagtcataccaaacttgaaggttcattatgagaattttaggacaaatttaacacatagtagttgcttgataatgattatgttcaatagctggctaattctgagggcctcactttttcagaagaaagtcatttgaagcaaaaggaacagcagaaacaggtgcagaaaatcacattgatagacttatgatagagtatctgaaattttatgggaagtactactacatttgcgtaattatgtgtcatattaaaaattgtgacttctttacaaatgatcacattttcacaacaatattatataacactgatattatgaaacaaaattcaaaacttgcaactcctcagcttagaacacactacccttcacaatctggtctccacctctattgaaaggctgtggtctaattattcctcacctaagtcaaacccatatagggtttrtggatgaagcacgtgcttcatctacactggaaatctcaccatccttggaacrcaattagattcctttcatgaccacatctataatcaggctgctrtcacgtcctggaacagatcctttaatgagtagttcrcctggaaaaaatccttctcattcaatagacctggtgcaaatatattttctgtgaaagattaccatatacattgccatccccaaatatccccactccatgagaagttagttgcttttttcttagagtcttttatgttttactgatttataatgtagctggtccacaatacaacctccccaaatccttgtccacttccactgtccccactccagactggaaagactgtgtcatattcctctctgtatgcctaagacttagtacaggaactaacactgaccagaccctctcaatgaatgttcctttaacaaatgactagtgattttatgctgacactgctttaattggtctgaatactacagtttaatattccctgctcataaacccacaggtaaatatttcacagcagcttgagtaatctcagggtaagaacaaaaaactattcaatattcatttcaaagaaattgtagataattgtattagtccattttcatgccactaataaagaaatacctgaaactgcataatttacaaagaaaagaggtttaattgactcacagttccacatggctggggaggcctcaccatcatgacgaaggcaaaggaagagcaaaggcacctcttacatggcggcaggcaatagagtgtgtgcaggggaactgccctttataaaaccgtcagatcttgtgagactgattctatattatgagagtagcagggaaaaccctcccccatgattcagttacctcccactggttccctcccatgacacatggggattattgaagctacaattcaaaatgagatttgggtggggacatggccaaaccatatcaatgatgatctctgaattgctgtttagacatgatctttggctctaacacattcaagccaggagtttctgtaatgaaacaattgctcacactgagcctcaaaaaggcaggaagctgaaactacatggaattcaatatcaaggagtgctcagaaactgacaaaggaaagcagtgaatctcccctgagactgaattataaatcttcaggaagaaaatacttataagttaaatcagagtcagagtggtaactggaaacattgaggccggatcctggtatttcaacagtggttctcacattgtcagtggccaagatcccaggaaaaactatggttccatttcctccagaagatgtaggcacagatgtatacacaagcttgcatacagtttcagagtgttctgagggctttcagtgaaaaccccaaggcagtattttcaaaattcagtgagcttcagaatcaaccaatgagagctctcattaaaacacagatcactaggcccttacccacagagctgctgattcagaaggtctagagagtgtggtacagaatttgcatttctaacaagttcccaggcgactcccatgatgctggtctgaggatcatacttctaaaattactgcctgaagctacaaggggcactgagttcacaggaagtaataggatctgaggaaaacctatttttcagaaatgccccctctcattctgttttcactcagttgagactgccagctattcaggaagaaagaaaaaaagacatttaaaacttatgaagaacaatttgcatatcaacttcaaggtcttgttcagaaaactaaaaagcttctcctgttgcttgttttccaaaaaatgtcaggttcacagtgaggaaaggaccctaaaaccataaccacactacaaagcacctttttaggggaacgtattaatcttttccttgtgtattacccaactcttactcttcaagttccagctctccaataaagtctcaaagtccccaacccatgtcttcctttctcagcactcccaccaggccaattcacagaatacaaaattgtcatccagcacttgtgaaatcctgcttcacaatccttttttatccccaaaggcttctgggactttgaggtcctgtcgtctgagacatcacataaccaacttttagtttatcagagtggaaaggagagcaacctcgtaaatgtcattttaaaaaatagagattagcttgacaatgtggaaagaagacaaaatatctgtgtaaaaaagaaatatgtttgtcaaaaacattatgactgggaacatttaacttagggaccaaccagctatacctcaataaaccactagaacgtcactcaataatcaacagttgttttgagtaattcacatttttagtgaccacattttaaaaaagtaatacacaartagacatatattggaaggatatccttacaccaaagttaagatagtagaaacattctgatagttatagagcaagtagtgtwtgcaatcattttttgccacagaacggaaaaaaaaaacctcatctgaaacagctcattattcaatgatactgagcaaataaggttttctataaattcctagaataggaatttatattcattctcaagttttcaattagtgtgttttataataatagaaaccaaatccataagatgcccaggagaggaaagggttatatgaccaaatacatttagaacattcataatataaagtacaggctctttgtccattaaatagagatcataaatatttctacctggtggagttgttttgaggataaagtgagtaaagaaatgtcaagctcttagaagagcacctagaacatgaagtaattaatcttagatattaatatttacttttattattatacctataaaatacctaaacccttccatccttcaggtcgaatcagccccaagaattctgttatgactgttctttgatattctctaatcactttcttccctaattacctatatattttatagcattgaccccatattttaaagtataacctatatcagaaggctgttggttgttttatgtaagctgattatttttgtcttcaacatggaatttaaaagtccctatggtataaattttctgcatcctacctaccacctagcttagtgctaaaaccactgtaggatatttttaaggatataatacttataataacatcccaatacttgtgaaggtttttgtaagttttctaatttttctccttatcattactgcccatgtgaacttcacctgaactagaattgcaattcccctggctccccatatgcctgtattgcttcatgtcatggtccaaagttgtagtttttttctttttctttatgactagtcatagttgccattaggaagatattcaaaagactgagaatgaaaagataatagacaggttcataatggcttacaggacagaccctactgctcatctgaggttctgttagactaactcccagaaatgtttagaaactcctagaaagtacacatagaaaacaacttataggcttgctctgtcagcccagctaggctgtgggtaatgaatgaaccttgggttcatgcccgagtctagtgtaatgcactctattttgatgttactttgtgaagtgattatcatcgaaacggaggaggtgcgcttgtcttcccagagaagtctctaaaatgtatccaatttagcccacatgctaaatagcttcaggcttatctatgtatggcaggactagaaaaggagcaggcaagcttccagagggtctgatgagattcatttctcacctgatttatcatctgccactgtgtgtccactgtaaggtcctttctgggggacccagaagagctttcttttctattagatgttgcaraatgttcttaacctctccattctgcaccctgataatactgatctttttccatatccattccatactgaggtggtgtctgggtcttggtctctctgtccatctgaaacttttaatgacatgtggcaattttgtgtcatgcaactgaggccctctgattcccaaaatcatgcttgcatttacttcatattgattccttacagttccatggttaagtggcatctgccttaagcaaggctcttcaataatacagaatttagtactttgataaaactgtgtgtaaagctctttggaaacaacaattttgaagtaatgagaccacactaaatattatcaaagaaaggtggcatgctatttaaccaaaaaatatcttatgtgtagggtgggtcttattgtttagcatagagagaaaatccatgagtgttctgggattagtgtctctgccttgtctcttaaactttcttagtctgaaataccctggtccactaaggtgcttttccaccctgacatgtctcttccctggaatagaaaaaacagcacacttgagactttacttcttgacgattatgaatgaaacctccttttaaattagaataatttatatactcatgtttcccattttgctctgactgccaggatatttatgaacatctttgataactatcattggttaatataatttctttatttttcaaatatttgtattttaaataactcttgaacatgtgatctttgtatatactattctaattgcttttaagaggcagtgcataataaataagtacatttaaaaaattggtttaaaaatctgccgatcattttctcattctctttatcacccaccctttctttcctttttcttctctggatttacatcaccagaaatgcaaagaaggtaatgacatcagtggatatcccagtagtagtattatcaaggctgaggtgctttcacattaactgtcaaaaacatgtcgcgtagttatcctgcccatcgctcagaaggatggccccagaacacatcccttgagtccagtgaataaaataagtccctagtgctcatcacacagagataatattgtaactgtccatctgggtctcatctgttttctctcatgctccctttttttgtattttcaatctccaactgctctggctaacatctcctctacctatgagcccatcactgttctcctcccttccagaaagcagtgcagtgtgaacatattaagaacagaagctttgggatcaaacacacctggattatggcttctgtgtgccatttatcagctgcggaatttgggacaagttctcttcgtcctcgagctcacattttcttcacctttacaatggggatagtaagagggctttcctcctatggtcattgtgaaattaaattagaaaatacatgaaatttcctggttctgtgtctagcacatcatgtagttgttcggttaatgaaaataacatctattgcctgcttaaaacctaagtgctgaatgcttctttcccttgtttgctcacttaattgtcacgattactccacagcaacccgtatgaggttgatgcttttgtaaattgctgagagcagtgtctggcacaaagtaaaactctcaataaatgttatctcttattagtattactgttattgttttcatgtgacaggtgagggaactgaggtgaagggaggttaaatgttgactatcatataatacttgtcaggaaatttgcatataaaaacacayattagaaaaagttccattgtaagtattatcttaatgcacactaagaaaactaaggctttgaaaggttaaatatctttctaaatgctgctcagctagaaagaggccgatttcggactgaatctaggcttaatgtccttaaaacccctctccattacatcacagtattgcctgcaaaggcttcatagctcccctccccttcagtgaggtttgtcactgagagcatttttacagatagagcacctccaggttctacccctttttatcgccactcctgtgaaaaacaggcactgagcagaagcagtcaaagcaaaatcattcttaggccatttcaattattcctgacacatccaccagataaaatggaaatttctttcccaagggatttcagcggaacatttttggttgtttcatattgctttgcatggtgaccatggtttcagcagtactctgagaagtaaatcctcactgtgccatttacagtggcctgagagcaggctccagagtctaggaaactgcttcacccaactaagtgctataaagcagataayaatggraggccaacaggtattcagtcccrtaagaatagctgtatgtcatcttggagtgtgtctccagcaacaacatgggctttcttgtgaatgaaacattttatatgataggtaaaaataacacaaccaatacaatttaattcaacattaattgataaaaatctatcaaaaaacacctaaattgtactgtaggtgataaagacgtaattaagaacacaagtctaatctgctaaagtctataaaagaatggcaaataaacggctatgaagacaaataagaggggagaaatttttattcttattattagaagaactgaatgtcagtagttctctacattggccaaattgtctctctaataatcacttgtagtctttttttaaatgacttcatgaaataagccagtkatatggtttggatttgtgtctccacccaaagctcatgtcaaattgtaatctccagtgttggaggaggggcctggtaggatgtgattcaatcatgggagtagatgttcccctggctgttctcatgatggtgagtgggttctcatgagatctggttgttgaaaagtacatagtacctccccccttcactctcttcctccagctccagccatgtaggacatgtctggttcccctttaccttcccccatgattgtaagtttcctgaggcctccccagccatgcttcctgtacagcctgtagaaccatgaaccagttaaatctcttttctttataaattacccagtctcaggaagttccttatagtagtgcgagaacagactaatacagccaggcaccgaaaggtaaatatttcatgttctcactcatgtgtaggagctaaaaaaattgatttgatggaggtagggaaaatgatcaataccagcgactgggaagggtgtgcaggttggggaatgagtgttaaagagaggttggtcaatgggttcaaacatacagttagatagaaggagtaagttacaatgtttgakagcagagtagggtgattataattaacaacaatgtactatatatttcaaaatagctggaaaacaggactcgtatttttcccaacacatagaaatgataaatactcaaggtgatagacacctcaaataccctgacttgatcattacacattctgtggttgtaacaaaatatcacatataccccataaatatgcaaaaatattatgaatttataaaaaatacacttaaacaaattttagaaaatggtgtcaatctaggtcccacaccagaccaactgaatatgaatcttcaggatgtgtgatgtcccgtcacaggcatttttaaaaagctactgatatggacaggagacagggaaatactgggtagaagagggcagctccctggcaaagggagccctaaatgggctaaatggccctaaatggccctaaatgggaacaggcattcctgttttcgcaaccaaaagttgccttttggcccaccacaccctatcggtatcctgtacccaggattctgtacaccctatgggctatctatgggtatcctgtacccatagaaaccccaaaccccaggctccacaagcagatgagcagacgaacagaagagcagcagaggagagaagagaaggagcatctgaatgtctagaggagtttggctggggacactcagagaggagtgtctggctgctggacagtcaaactccaggggaagatcgtcttcccagtccatcccctttccagctccgcatccatcccactgagagccacctccaccactcaataaaatcccacattcaccatccttcaagtccgtgtgtaatatgatttttcctggacaccagacaagagcttgagatacagaaagccgtcacactggccctctgtccttgtgaaaaggcagagggtacaatgagccatttactgcctgtacacagcaaagctaacagaacatagtgtaacacacacccacttgggctttaggagtttcaggcacccatccctagatattattgtggggccagagcccaaaagtgcttgccccagctcctgcacatctgtatactctccctcccataaggagtttgggagcacatggcaggtgatcagacaagccacatctttgtcacaagtcctactaagggggtcagggaactctgccgtttcactactccagtgaatctaccatgacacagttttgagaatccctgctttacagagtaagacttcatcaggattttaactaatggaaatggggctatggggatagtcagggaaaagcacacaagcaaaggagtagaggaaagagaatgcaggatttaggaagagcagaataagaatttgagtagtctccagtatccatgcaaagtatatgagagaacaaaggaaaataaagtttcatttgtgggagcaatattgtggaaactgattgacattccgaggagtctgaatcttatttttaaaatatgcaaagtactgctgcttatacatgccattgttaattatatattagttcttctcatttctaaatgacccagataactatgcctagacaaaaaagcaattgctcacaacttctatattaaaactgagaatcactgactcctaccactgcatcaaaacacagagtgcattgtaccctacagtgccaacaaatcactgtcattatcatcttctgcaaatattaatttacaaatttttgtgtactattttctcctggcactataaagatatacaagttaaagagagacagacaaagagagagacagagagagagacagaagagactaactctgataagctcttcaagaatagtgactctatctgcctctgcaatactaggactggccatttcttcaatcatatgttacactttaagagaaaaaggcaaatcttaaacatttcttctcataaaataagaaatcttgcaagcatgctgttctttatgatatcaatattattcaagcttacaataatggataaaatcagtagtgaaggtgctattatcctcatctgacaaaaagtgacatagagtgacatgagactattcttctaaaagcctaaactgatacattttagatgataacatatgccattgtctgaagaaaaaaacatagctgagtatatgctacaaaccacttttaaaaaaaattgtaagggttattttagatgctgatatttcttttaaatgtaagcattagtggttgatattatttagggtttattcagatgtgctcattttcagtgctattaagctatgttattaagatccagagtacgtcaggtcattaatccttcaagaactgacatcttaacttgttcataaccatattcccagaagactcaaggcagtgctggtatgatggttgttctcaataaacatttttttaaataaaagactcatggttttgtgatatttaacatctcatgtcatgcaccacaatctacaccacacaactagttatatcaaacaaaatagaaaataaatctgatttgatacagttttgaacatccatgccttcaatcatttgacatacatgcattgaatgccttctctttgactatattatcttaggggctgcgagtacagtagtaaaaggcaaacaaggtctctgccctcaaacaaacaacttgtttgaggcaagagaatattacacacatgtgcatgtgaatacaaatgctaaaaagatataaaagtattataacaaagtgagtagggaaggattatttcagagaaaagccagggagggtctccatgaagaagcaacatttgtctgagacctaataacatggcagccatacaacaagagaggtgttgagagctccagacagagagaacagtaaaggcaaaggccctgaaattggaatgagctttttgtcatgttcaaggcatgaaaagatcaaaaagccttatatatataggaaatgagtccaagaagcaggcaggaacaatatcatctaaaaccatgaaggccatataaagttagaaatttattttacactcattgggaaggcattagaaggccataagaagaaagtgtcattatctgacttacatagttgtttgcccaagaaatattctgaaccaacagagtactcccaactaccacagaaataactaagtgagggtcagatttctgtcctgatgaaggatcatttacaaatgttttcccaaaagtgtggaaataaaaagaaattcagactactacccaaattaaaaatgccactaatccaaatgactccaactccaaggagtccagttcactgacattttcctttgcaaaacagggatcaggttgtagatgaagaaagacgctccttgagagtgcaggaattttaccgcatccttcagacatgccactcagcatgttagagagaaatgagcaccaggacaggtgccagagacatttatgagggtgatagggctctacaggtaacattgaaacaagaggcataaactgaaactattcctacatgttctcttgacctaggtctgatcctcaacttgtatccaaaccagttatgtggctgggaatgaggtgtcacctttctgagagtgagtgtctttattgatcacatgatatgattgaattttcacatttattaaacaacaaccaccaaagggcctcactgaagaaacagaagaaaaaagcccattcgctgctcaatagtctagtcagagagcaaatatattgtacaagtgaagctactgaaacatacaccaaggaaaaagatagatctagagttagcagaagaaaggagtgacaagtctttggaaggcatcaaagaatacttcatggggacttggtgaaacgtgagctaaatttaggaaaatgaaattcatatgtgaatcatcatgttkcatcccagccagagggacaacgtatataaaggcagagaagtgtgcagtcccatggcaggtccaaacagttataaaattggtttaactatattgaatacacatagacacaaagataggaacaaaagatactgaggactgcctgaggagggaagaaaggggaagggtatggtttggaaggctacctattgtgtactatgctcactaccttggtgacaggatcatctgtacaccaagcctcagcaatgtgcagtttacccagggaagaaacctgcacatgaatcccttgaacttaaaagtagaaaaaataataaataaaattggcttaactagctggtctctaaggtcctttgtgcactaaaaaatctaagagtctccccttttaatgatgtcaaatattatctgtaaaaattaaaattttcttttagccaccatgcttaatgtcatatgttaatattccattttcattcctcaacaatagccatttgacctgttcctattcatataacattgatttacaatgagctgcatatgtacagaagtacctggcagtatgtaaaggaaaagaaatatgaacagagtatggggtagaatgctgaatacacagtgacatttaaaataatagctaacatttcttgaacatttaacagatattaactcaattatcacaacactcatctcaaaaacatataaacattatttctatttcacagatgagatagctgaaatacagactggataaaaatgtacccatggtaaatgacttagaagcagcagagctagaatttgactgccaacatctggtccaaaagtccatacttttagtaactatactgcatgcctctcaacaataatgtcaagactatgggggataattcatgccaygtggccattgttctgtaattcatctttgctttacatcaacatcagtggagaagttgaaaaaacactgactatatctcagcagcagcctttagaaaaaaaacaatataccctaagcagagaaaacaaatattcaaaatcaaattcccactttctaattcagcaagctaaactttgggagcccaaggtcagaatgcttggcccctaggttggtccaaatcagcattaagaattcaactgaggtgacacaacatgaaagaattggattggctaaggttctcatggaaacagttatgtttttgatcagttgtttggatttcatgaaagttgtaaggtcttgaaggtgaataactccatctgctaatttcccgtgttcagtatttaacagaaccacaagaagagacccaataaagcagacttttcaagagatgatggtggcggtaatagcaacaataatgttaatgcaactatatcatatatgtgcatcaattcaaatcttgcaatttttaaataggtggtattcttgtttaatcttaatatatgtatcttgttatcctcatttttacatatacacagatgaaggattagagactatagtgactcttgcagtataagagatgagattcaaactaaactttcttaatctaaatccagtatccagtattatttaacatttcctcatctctacagttgcctcccaaactgtcaaaaatttcagcaagtcatcacggttttccttagaaagaattaagaagactaaggttttccttagaacaaagccataacatatagacccaggttttgttcctctgtcacagtttctatataaaaattctagcaccccactttgcatgatccctggcctaatccctgaattgtagagggagaaaatttgaaaactratgcatttaaccaatgaatggtcatattttaacactgggagctgaacagagtaccaaagcaagccacacctcctgcaaaggtccaagcagttggagggcatgcctgaaagctgcttaccaatacaggactccccggacagtgaataggtcccatcgtcatggaaaccgcttctgcactcacagtggtaccaccctggcaggttaacgcagcgggaatggttgtggcactcaatgattccctctgaacattcatcaatatctgcctcagagaaaaacacaagcccaccaggatattaatttcttttgacactaacctttcaggaaatgcctaaaacatgctcatgtcaacatatcaattaaaactgtttagtcacctacaatgaaagtcactggaagaagcaaatcccatattttccagaattcaaatgaattgaaagcttcattcttggatgttttctctcatattgaacaatgaatgagagcttatggtcacaaaaaaatcctaactcaaaagctgtgttgtctctgaataactaggttgagggtgtttggcacagttttggtattgggtgtatatgactttttttttggattaaaaatttctaaattggcaattccagattttatggtgtgtcctttgaaaatttttatgaacaaataagttcaggacactctggattaaatattattaaactgatttttttaaatgacagccccagagacttgtcataattatatgtcctgcaaagctttgagataagattgataatacacactgtttccgaaatttatttagctaataattaccttttcttgggatacctttaatatcttgcaaaactagtgttgtggggaacacagtttgggaactatcgttctatttcttttaaaactatggattgattatgctagtccatcagagattctcattcttcaatcattcttgaggaaaggaagtctcctaggctttttttgtttatttgtttgtttttgtctaggctctggctttttagaatcaccaaatacccggttcatgtatagattttctagcacaaagccttgcctctgcactgaaggagattgacaccattgcagaaaacagagttgccaatttttaaaccgggttcagttcattgtaacagaatttctccaagtaattatttcttagaatgtagctactgctgcctgggaatcttctttgacttgtcttggaaatatctgaaatatgggactcatrtgaatataaatttaattaacattggaatctaacccataatgaacaaaatgtactttgcaatttcttttaacagggcctataagaagcatcagttcaggggcaatcagctaccattggttctattatcttgacaagtcccatgttgtgcaccgggctgttaatttagtttgaaactgggtaatgtcatctcaaggcattctggccaagtaaagagagaaaaggtgtagttcctcatactgtgcaactccaactcaatggtcaccttcttcttctgtagcatgtattgttcagcccattaaatcttttcacatacatcatcccttagacttctaaatgccctcagtccctagggcctaatatttgtataggatcttcagatattgcagttaggctgtgtgtgtttattataaattcccagaaaataaatttccaatcaccatgtagattgtcatacctcaaattttacaggtccaggttctctgggacatatgttggatcactaaaaactttaaaacttcaagtagagaaatgactaagggctgtggctcctggagggaaagggcttattctaaataacacaatcagcccactgctttttgaataccaggcaagagacacacatataaacagacggctgattatagagatgacttctctatgttaggctgaaggataactctctgtaacaaagcagcaaccaattctacctctgacatttatttccaaagctctcagaaaaaccagtcatgattaacacagaccctgttgcctacaggctgtggacaatactttaggtaatagccatggttagcgttttgggaaatcaggagatacacaaatagaagcatctcaaccaaagcaatcatatgtcctggtttgcctggaaaagtcctagtttatatctacttcccttttactctcaaaacacctgagtttggaggataaattatctgatcaaataaagtaactccttcagccctaaattcaatagaacatttctaggaagaacagaagtgttgaatgatgtgcaaatactttttcaattcacagatatttctattcccaaaatgaaacgataaggagtttccatgattcagcagggcagaagttatctgtatagcacaggagtctttcaaaagcagtgaagacaatcagacagttacacatctacaacttccccagggacactagggaatccctggcttgcatgggaaatgagaaagtagtggagaagcccattttgcctgacaactgtacttttcacagacgattccagaaactcactggaaataatcaggttcacatcacatgctggtgcctaggctgtacatttctgttctctgtgcaaggtctataattaaagccagaaaattcatttttatgtaccatattgtacttgagaggggctcacgttttcactgtgttcctaacactggctttcttctgtgtaggtagtcacagtagtatataaagcaaccatcacagacccaaatatagaaaacacttggaggcttttcagcaacactttggggaatttacaaattataaatgatggtttcttcccaagctaggttgtggctgcctttgtcctcagaggcaaagatttgtttctcccagtcagcactccctacaggcaaacaaacaagacagaagctctaagttcactacagaatcaactctcattcaaggaattctgataaattactgtgagcctggctggctgcactcacaatgtgtcaaccatcccaaaggaaacaaacaaaaagtcacctttcctcctacagaaagtcctaaaatcttgtttaaatctcagtttaatccagcacagagctgaaaatgtgaacaaggaaacaagagaagctgggggattgttgagtgagatactatggagtattcatttctgtatcctcagagtcaaatgtcgacaacacaataactaacatatggcctgggtcacacagcttacaaatggtgaaatacagttcaaaactagctagaactagtttttgtcacaactatcatatcttgttgacaaatcaagaaaggattatttacagaaagataatacatttattcaattctgtaaatatctgttgagctaaaaatatgtgcaaggattatttttgtgttgtgttcaatgcaaaaatggatgaaayatgactccaaaaatccaggagctcataatcaaagggaagaactatatacgtatatgtgtgtgtgtgtttgtgttttgtatttcatactaatagttaaagtttcaaacaaccaccaatatcaccaactccctcccctagtaactcagtatctgtacacacatctattttagtacttatcttgtcctatcacagtgatttcctttttgtgtctatcactcaaatgcaaattttccaagaaaacagacaacattttatgcaggtttaccttgctagggatacctggaagtgggagtaccaagcaatttgaaagtgcccaatacaagtccctgggaatgaatgtatgaaaaaataaatgactggtagattgaatgaaaggaaaaattaaccaaggctataatggagattttcaaaataccccaagatttcctggtgtttgcaagtcacaaactacaatgtcaattcataaaactaaagaaaaagtaaatttaatatttacatgttattttcctctaaaagacattatgtagtttctatttaatactttgcttctacctctaatctttagatattttaagtgggcaaaataggtaacaaaaaagttataattgcaatggtgttattaggagtaattttaatcatgattataattataataattataacaatttctataattgttgcaatgaaaagtcctacgtgtgccatgaatttttcatttacaatgagaaacagacgaatacccaaggtttgttttcataaaatgtatcctaagcaatacctttaatccttttggggcatatggtgaatttcctagagaaagcaatttgcaaacaaatccttgaattcctgtaaaatccatctcttgagctggatggatctcttcctccatctaatctctttcctattggatttgcaatttgacaatttataaaaccaataaaggttttctcaaagcttattttcaaagaggtactttcrtatttcatactaatagttaaagcttgcactgaagtagtggctcaggttgtggatagattatacctttcctaagagtttttagggtgatattgagtcatgagaaaaactttgatattttcattcattcaacaaaagtttattgagcacccaccatgtgctagtacatttgccccatatactaagcactgtattatatcctctgatgcagacatagagagataaggtctctgccctccagatacatagagtctagggggcaaatagaatgtaaaagaaaaataaactgttgttataaatatagactttagagacaaacatgacttcaaattcctgcttaataatgcactaataattatttagatttcacaagtctttgttttctaatctgtaggttgagaatgataaaatcaaacatcatgtgactgttaaacaaaaaaagactcttaagcacagtctggatattaactttggactaaatattactgctataaaacagaagacagaataagttgattctgaaaataaaaatatatataataatatcaacttgcaatcaggaaactggttaggactaagagattatttctggaaccttaaaaataatcatttggattttgagacaagtgtaaccttgttaagcattcaggaatagaatctataaatctataatacatgcctcataaagatttagattctcttggtcaccaaaaaacttcacataagtttaaggaagtaaaatcagcaacataaattgtcacaagtacagcaaacacaaacctgcttattttctgctatttgctgaatgccagaattgtactgaacataacatgcaaagaccctgaggcagaaacaggctagttcttctatctcttgtttctcttgggttcttagggatgtgcctggagcatgcttcctttgaagatatgtaaggtcatgtggctgagctctagttgcagagttagaagtgatataatttcaatatgggtcataaaaatgcctaatatgatcctccagaatatttctacctgctcactacaggccaatttccaggaaaaccttggaaatcacgtattgaaaatagtacaacatttttctgcctggcttcctgcaaggctatgtagaccagggcccttccacagacctgaaactgtcataggctatttaggtgagtaagaaatatatttctattttattgagccattactgcttggagttgctttttattgctagccagcatttcctaattattatgagagacccttttccatattcagggaaaagactgtgctcaggttagaactcatactgatgcaatatctaaaaataaaaacagaaacaagcaaacaaggaaaaaaacccagcactaatcacagattacgtaggcagctaaaggagtggaagaagttttttgctaaaagtcaagagtcaagataacacataaaacaagacaaagctttgtagttagatatgtttgagtttgaattctgattctgttacatgactttgactttgagcaagttatttatcttttttgagcttcactttctttggcttttaaatgataacataactgtcttagtccattctgtgttgctataacagaatacctgagattgagtaatttatgaagaaaaaagatttattttgctcatgatcctrgtgactgaaaagtccaagattaggtagctgcatttggtggtggtctcagcctgcttcaagtcattgtggaaaaaaaaaaagggaggggggggtgggtatgtgcaaagagatcacatggcaagagaggaaacaagagagagaaactgatgaaccagactccatgggagctaatcgattcctgccagagagaactcattcaccctcacgggagggcatcactctgtgcatgagggctatgcctccatgacccaaacacctcctactcggcccccctcctaacactccacactggagatcaaaatcagcatgaattttggtgggaacaaatcacatctaaaccacagcaattacctatgccataatgctgttgttttaaagattgaatgagatcaatctaaaaactacaaatccaggtagacattcattaggcaagtgatatttatcgttctgtaacttataatccccacattccaagacagtccaaatctccaggcttcagttccttctgtgtaaaatgaaaggactgtgcatytatggcctctattagtgtgatggttcatattgagtgtcaatttgattggactgaaggatgcaaagtattgttcctgggtgtgtctgtgagggtgttgccaaaggagattaacatttgagtcaatagactgggagaggcagacccaccctcaatctgggtgagcaccatctaatcagcttccagagcagctaggataaaagcaggcagaggaacgtggaaggactagactggcctgaatcttctggcctccatctttctcctgtgctggatgcttcctgccctcaaatatcagactccaagctcttcagcttttggactcttggacctacaccagagatttgccagggactctcagggtttcagccataggctgaaggctgcactatcaaattccctacttttgaggttttgagacttggactggcttcttggctcctcagtttgcagatggcctattgtgggactttagcttgtgatcgtgtgagtcaattctcctaataaactcccattcatatattcatctatcctattagttctgtccctttagagaaccctgactagtacagattttggtactgagagtggggtgctgctgtaaaggtgcccagaaatgtggaaatgattttggaactgggtaacaggcagatgttgtaacactttggagggctcaaaagaagataggaaaatgtgggaaagtttggaactttctagagactcgggatgctcagaagacaggaagatacgggaaagtttgaaacttcctagagactgattaaagggctttgaccaaaatgctgatagtgatatggacaataaagtccaggctgaggtggtctcagatgcagattaggaacttttgggaactggattaaaggtcacttttgctacacaaagagactggcagcatttttgcccctgccctagagatctgtggaactttgaacwtgagagagatgatttagggtatctggtggaagaaatttctaagcagcaaagtattcaagaggaagcagagcataaaagtttgaaaaatttgcagcctaatggtgcagtagaagagaagaccccattttctgggaagaaattcaagcaggcagcagaaatttgcataagtaatgagccaaatgctaatcaccaagagaatgaagaaaatgtttctggggcatgtcagagaccttcccagcagctcctcccatcacaggcctggaggcctaggagggaaaagtggtttttggggctgagtccagggcccctctgctgtgtgcagcttcaggacttggtgccctgcatcccagctgctgtatcccaggctaaaaggggccagtgtatagctcaggccatggtttcagagggggcaagctctaacccttaacagcttcaatgtggtgttgagcctgtgggtgcccagaagtcaagaattgaggtttgggaaccatcgcctagatttcagaggatgtacggaaatgcctggatgtccaggtagaaatttgctacaggggcagagccttcatgaagaacctctgctagggcagtaaaaaaggaaaatgtgggattggagcccccatacagactccccactgaggtactgcctagtagagctagctgtgagaagagggccaccatcctccagaccccagaatggtagatccactgacagcttgcaacacacatctgcaaaagttgcagacactcaatgccaacccttgaaagcagctagtggagaggggtgtaccctgcaaagccacagtggcggagttgtccaaggctgtgggaacccaattcttccatcagtgtgacctggatgtgagacatggagtcaaaggagattattttggacctttaagatttaattactgcctcattggatttcagacttgtgtggggcctgtagtctctttgttttggccatttctcccacattagtgtatttacccactacctgtactcccactgtatctaggaggtaagtaacttgctttggattttacagactcataggtggaagaggcttgccttgtgtcagatgagactttggactttagacttctgagttaatgctgaaatgagttaagactttgggggactgttggaaaggcatgattggttttgaaatgtgagaacatgagatttgggaggggtcagggcagaatgataggggcagaaatctcaccttggattgtagtaatccccatgtatcaagggtggggccaggtggagataaaataatcatggagtcagttttaccatattgttcttgtggtagtgaataagtctcatgagatctgatggtttttataaatgggarttcccctgcacaagctctcttctctccaccatgtgagacttgacttttcttctcattcaccttctgccatgattgtgaggcctccccagccatgtggaactgtgagtcaattaaacctctttcctttctaaattacccagtctcagatatgtctttattagcagcatgagaagaaacaaaaacagctacttttaatattctagaatatgggagaccttagctttgggctcatagcttcttctgctgctaaccagctgaatgactgctaaaaggtttaaggaacctctttgtacctcgggttcttcattaggcaaatggcaattttaaaaatacaaattttgtctgcctcacaaacaagttccaataaggtatgaacaatctcygcaaagtcaactgattgtctcataaaatatctggtgatgtcattattgctgtttcttctttgtaagtccttattagtaactagtttttgtgtattaatctgaaaggtacctgctattaacagtgaagtcagtagtattgacaatatagctctctaactttcttcagtgactctgcacaaaacaatccatttcttcctggatatggccttctaattttatctctgaagcctttctgtattttctctaacaaactgtgctcaaattcttcctaaaagaacccatctgttaacatttcaactctcacctttattctggaaactctctgatctatatctctaagctgacctctaacacaaactcagaaacgcatttactattgcctatggatttgcaaatctcataggtctcttcatttcaaacttattctgcccaaagctttacatgacacatgtgtttctatgtaccaaattcattttcctccccagcactccttcctcactgtcattcctcataaccaatgaacaaaactattgaaatttgactgctatgaaacttgaagattttaaaaacatggaactaaatcttattcactccaagactgaaaatcctatgattctgtgatttttaaaaatatcctgctcctctagtaattacaaatgattcttattgtaaaaatctcctatcaggcattcaaagcacaaacaatttgacctcactttgactatcaatttgcctttatttctcaaaattcttcatcataaaacctttgcactctctcgagtggttgctttacrtacccacctattccatattccattgaatttgaggcttcccgccctgcaagtgattgtttttaaattaaaatccaagcacaaatcttaattccaccaagaagtcctctttcttttctctgaattcctatagtgtttaacagttctaccaccccatttaaytctgacatacattctattttagaatattctacgattcttacagtttctctattaaataggaagaatttttgaacttccatatattaataatttactacgtgtcaggttctctgacaagtgctttatattcacaactccatttgatcttcagaatgcctctgagatcatttgaattgctctaattttactgaaaatggaggtgtacatgtttaaataacatacccacagtaaaacatctggaaagtgacagagtggggatttaaaccaaggtctacttaactcccaaatacatacatttaatcattatactatacagcctcttgtacacttgggggaatacataggactttgaagaaactattaaaaatatgttcaaaatgtaaagaaaaaacatactgagttgaatagtgaacagatttctgctaccaaccaaggtatagtagcagggatttaatttgttgtctcatctgaaacaaacaggaacaaatgcatacatatacatatacgtatgtatatatgttctcatatatatatacacacacacacatatgaaaaaagttttcaagatactggaaattagataactaagaaagtgatccccaagagacataaaacaaatgataagagtgctacaagtatcctagtttactaccttgagagaggtccaggccatggtagaaggaagaaaacccatgaggagcctagttaactacctggtttgaggatacaaagatgggaatataggaagaccaaggcaagcagaggttataaagcagagtattggagaggagatagctgaacagagaggtaattttgaagttctgcagagaataccagtcaggtaatcagcaaagtgctaatcagaaaataagtgtgatgaaattatccaaagctgaagaaagaccaccaaaatgtattagaggtaatagagcctggtgcttacacaggaagaggaacagtgcatgcttccaaaaagcagactggggaatctcataggcattggataatattggatctacaatatatatttaaaaaaatgcaaaatagtagacccaaacccaaccatatcaatatttacaataaatgtatatttattaaacacttaaaggcaaagattgtcagactagtaaaaagcaatacccaatttttgctggatacaaacgatgtatttgatacagaagcacaaacaagttaaactagaagtatggggaaagatattccatgtagacataaatgataagaaaactagaatagctatattggtttcagaaaaaaacaggattcagccgggtgcagtagctcacacctgtaatcccagctctttgggatgccgaggcgggcggatcacgaggtcaggagatcaagcccatcctggctaacatggtgaaaccccgtttctactaaaaatatacaaaaaaatcagccgggcgtggtggtgggcgcctgtagtcccagctactcgggagcctgaggtaggagaatggcgtgaacccgggaggcagagcttgcatgaagtgagccaagatcgagccactgcactccagcctgggtgacagagcgagactccgtctcaaaaaaaaaaaaaaaaaaaaaaaargaaaagaaaaaaataggattcaagataaagaaaatgtgcaaagataaaaaaggtatttcataaaaagaatgaattggccaagaagatataacactcaaatatatagatttgaaaattttctttgtataaatttatggggtacaagtataactttgttacctggcaatattacatagtggagaagtcagggcttctcgtgtgtccatcacgggatgtacatgtacccagttaagtaatttctcatcatccacctcccctcccaccccgcacaccttcagagtctccatttactatcatttcacattgtacgttcatgtgtacacattatttagctcccacttacaagtgagaacatgtggcatttgtctttctatgtctgacttgtttaacttaggacaatggcctccagtttcatctatgttgctgcaaaagatatgacttcattttttacggctaaatagcattccattgtgtatatctaacacattttctttatctaatcacctgttgatgcacagttaggttgattccctattgtcattattgcgaatagtacttaaattaaaagatgattgcaggtttgtttgttttttttttttttgagacggagtctctctctgtcacccaggctggagtgcagtggcaccatcttggctcactgcaagctccgcctcccgggttcatgccattctcctgcctcagcctccccagcagctgggactacaggcaggtatctttttgatataatggcttttttcctttgggcacaacagagtgaagagacagtctgcagaatggaagaaaatatttgcaagccatggatctgacaggaaacgaatatccggaatttataaggaacacaaacaacccaacaactaatcaaacaatctcactaataagtaggcaaaagatatgaatatacatttttcaaaagtagacatatgaatgaccaaaagtatatgaaaagatgctcatggctattaatcatcagagaaattcaaattaaaccacaagatatcattttacaccaatcagaatggctattattaataagacaaaaattaacaaatgttggcaaggattcagagaaaaggaacacttatacactgttgatgggaatgtaaattagaacagcctctatgaaaaacactagaactaaaaataaaactacaatttgatccagcaattgatatataatttttaatggcaaaacttcaaaacacatgaaatgataataaaagaaccaaaaggaaaaaaatacaaatctagagattttaacctctatttcagcaattgatacaccaaaaaaaatcaccaatatagaagacatgaacaatattggcatttcttgaacattatacccaatcactgtagcataaacagtttttacaagtgcgtgtggaatgttgaccaagatggaaaaaatccttgttcataaaacaatccccccaaaattcaaaagcttgaaatcttacagagtgtgttttctggtcccaacagaattaaacagatatcaaatcaaaatacgatatttagaaaaggtacaaatatttggaaattacaccagttccaaaagccaatgaattaaagaagaaactacaaggaaaatataaaatatttaggactgaatgatattattaaacaacaggctacaatctgtgggaaccagttaaagcagtgcctagaaacaaatgtgtagctgtaatacttacattcaaaagagagaaaagtataaagccataactttagatctgtaagaaaccagtaaaagtcaggtacatagatttttaccctacatctggtcctacccacagaatagggtatgtgagataggattagtaccaacataagggtaaccataggactctattgaactgaaagaaatatttctaaatttgccctgaggcaggatagccagatgcatttatttttaaattagaaacaaatgagagaccaaaaaatgtttctgcacatcaaaaccaaaggaaggagtcaaggacaaatgttggaggagtggtcagggaatacagatctgggagaatagaaattaggtcagcatgaggtaaggagcaggtgcatggggaggggccggggctgagcacttgaatcttaagcgggtgctgatgcacctttagacactgggccctctgttgtaagtgacaccttaaccctgcttacctctcctctcccaaaagaaacatattggctcacaaaatgtacaagtgttggggctctagactctatgggatccatgcaactaagcaatattatcaggatttaggctccctctgtatctccactcttatcatcatcatattaccacccctataggccagaacctcttcatgtaatggcctccagatgttctaggcaaacatcattttaaatctgtcaaagggagagattcttatcaatagtactggcacaaatctaggatttgagccgcattcatcttgatttggttacatgatgagtcctgaagtagttactgggttcatgtctggttaccagcccacccctagagcaagaggtaaaatcagcactacttgagatatcttaaactgagaatttagaaggggttgttcctcagaaactattggaatgcccttactaggataggaactgaattctggtgagacaaaatccacagatgtcccttaggcctctttttatgtcagtcctacggcatattgtgagatggatgtattggcggaagaaatcatgctactttgacagcgtgtgtgttttcctttggaatgctcctctgtctaaagggcaccttccatatctctcttctcctattagtgccagatcaaagttgttgttgttgttgtttttcccaaagcgattgatatgggtatttattgttgtcaagaaggtaaattaaaaaggtgtcaatgtcatcttatgaactatgtatgaaagatacctctgaggattctgggaaaatagcagaggagtcagcaccaggaatctctctcccaacctggactataattacactggcagaatctgcctgatataacaattttaggactctggagtctatttgaaggcttgcaacttccaggggaaggcttccaggtacgtttcagtcaattttagccagtagagtggtagcggctgtacattccccatccttcatcctgggggcaggcaccatacagattttgtctttctgctctaccctgagtgatacaccttccacctcccacacattyactttyaattagaagaaccttgacttgcttgcataaagagtattgccctcttaatctaaaaaaaaaaaacaaaaaacaaaacaaaacaaacaaacaaacaaaaggaagcctatctcctagcccaaggggtaaatcactgttggtctcaatcagtggttctcaaacagtggtcctcagactagcaccattaacatcagcaggaaacatattataaatgaaaattatctggtcccacacaacatactaaattagaaattctgggggtagaacccagtagtctgtatttaaacaagcttgccagaatcatctgagaactctactttgagaaccacatatctataataataatggaattttcatcctttttcccagtgatctgtctagataagggcatgtgaccaagttcttgctaatgagaagtaaggagaagtctgctggagatggagtggcagtggggttgactttcatggttaaatgacagaattcctactatgttcattctgtgtagtcagctggctggagaacgtgaggactagagagatacagccttctttagtttatgggaaaaattccaattaaatcacagaaataccaaactaggcctttgatgtcattgagctgctgaaccaaccctggagctacatattgccagaattcatgtcatgagagagaattaaagactttattattaagtcacaattacttgagatttctattacttccarccaaaataaattcaaccaatggaatatttttatctctattttacagctaaaggaaacaagtctgaaagatattaaataatttccataaggcaacatatctagttacatggtattctaagttttaggcttgcttttctctgaatacaaaactttatgaggctactctacctctcagtagatcacactgtcactcccaccaaactacaagcctggtggtggccagggagcaaagggactacgtttcacttcttcccttatgccattatatctaatccttagttgctttatgaacttaagaattctattctgaatgatgctttattttccggcttaaaaggaggaatacaatttgatttttaatttattcttcatgatgttaaacctatccctttaaagacaggtccacattttttactttgagtattccaatagtctgcattattcatattagaggtatttatgcagacatgatcaataagataattcacctccaaatgaaacaaggaggcttcagccctgaatgagaactgaagaatttaagtaagtcaatcctttagagagcttcaccatatttctgtcatcatctrattacacccagagaaaaattctttcatgttgtgtaaagggcagacaagtaaccatcataatgaaaaagttattttggaaaaaaaaagcttttgtcaaattcacaaagttttatcattgtgcttctgaaagggggaaaatcagcaccttttttttttttcttcagtgagttggggaagaaattaagatgagaaaattcaagaactcttaacagatagaagcactagggtttatgattcccaaagagcatttatgccgttttgtctgcttgtggctccatagcatcctggatgcacttggcttaaaaatatctttacagaactcatgctgctcaccatggatccagagtcagagctggtcccatgaagaagcatctgcgacttgaaaaggttggagccaggaccaagtaacaagtggaaacaaagggactgaatcatttctcactgaataaacctaaccatatatcttgaaaaaccactttagtatgtagagaagaaagactgttgagagggtagattatgtgatggagatcaatcagaaatgacttaaaggataatgtcattgcccatgaccatttgctgtatatccctttttagtgcccatggaaaaacaactcttttctatggtgtgggttagccatagtgatactggttatgactaagaacgtctaaatcccacatgcttagaaatcattgaatcatagaggcacagaggattgacatgtctatacgctaccatattcaaggtcatacattccgaagattacagaatccaggcaagcaatctaaatgagtgatgtagcccaggtgttggtaaactagagagcgtacatgttctgcccaaggggaacagctattatgtagctccaaaaatgttaccatgccttgctggaatcccagaaaagatcattactatacccagtcgaaggtttattcaccgtctgtctaattggttacaaggttggttttatttatttgtttgaaaatgtcatttagaccaacgctgtgcagggcaggacacataaaacatagttttcattgaacttgagctttcagttgcaaattctgagcccaaaaccactcttctacatgtagaaaagttgaggtccccatgagagaggtgatttgcctaaggtttcctaggtaataggacaaatacttaacagcatataccatgaatcaattcaacagctgtttaaagaatacaatggtggctgggcgcggtagctcatgcctctaatcccagcactttgggggctgaggcaggtggatcacttgaggtcaggagtttgaaaccagcctggccaacatggtgaaaccccgtctctactaaaaatacaaaaattagcctggtgtggtggtgggcgccctgggaggctgaggtagaagaattgcttgaccctgggagacggaggttgcactgggccgagatcatgccactgcacttcagcctgggcaacagagcgagactccgtctcaaaaaaaaaaaaataccaatgccaaatcgctagatatatttaaaagaagagtgtgtgtgtctgtgtgtgtgtgtgtgtgtgtatgtgtgtgtgtgtgtgattgacagaccatgtatacaacagtgatcctataagactataatatatttttactgtaccttttctatctttagatatgtttagatatacagatactcacaatcatgttacaattgcctatagtattcagtacagtaacatgctatataggtgtgtagcttaggagcaataggctgtaccacatagcctacgtgtgtagtagggtagaccatctagatttgtgtaagtgtactctctgatgtttgcacaaggacgaaatggcctaatgatgcatttcttaaaatgtatccctgttgttaagcaatgggtaactacacatacacacacacacaagatacacacacgtgtacaggcatctatcacctaacatatgcccactcaaatattctgctagatgctaaaattataaataaggaagaggatgaatagttttttcaatgcctattaagtactcagatactatgttttagtcaccatagcaaccctgataagtacaacttactttctccattttatagattagaacactaggagtatatgtcaccctcccaaggccacagaatggtgcatgatggacctgggattcaagttcaggtctgtctaatgccaaacactctgttcttctataagcaaagttgcccctttcttccaccttcttctgtgagaccataagtaaccacacatggcttctgccctcggggatctcacagtctgctgtgggaggaagatgtagaaacaagtatgtctccaggagaaatgcagtgtgaataatactgagaagcaacagcattgctgagaagacacccagggccagctctgcatgaagctactcgttcagctcattagagcttcatttgctctacctcctcaacttgtagtgagcaaagttcagctgccaacttcctccttgcaatctctagacaatgttctggcttcaaaatcaaagtcagatcatggagtccttaagagagtctttttgatgtgaaatgctgtgccttggaggcttagcaataacaactatcccttagggcaggtgcagcatggaaccgtaatggatgtgctatcatacaatatctttattgatcctcacattccacagtgaattaggcactttaaggttcaaattctcccttcaaacattatgaaactgaggcccaaagagaaaatggctcaaagtggagaagtccagatggggtcttctgcctctgagctctatgttctttataacataatatgctaggtattcaggyactgggggatggagaagaaagttagtggcaggtagcaagaggaaggycccccacagagaattagttaaacatgttgcagtgggatttgattctagttgatgatatctgcttcctcttcatctgctgaacttttacttttcctatgtcttttttctttcagtaattttcaataagctactcccatctgtcccctcctatcattttcccatgacttatgccaaagactgagattttcagaaagaagtagaagcacaacagtcagagaagtctacagattgtttctattgaggaccacatgaaggtctgtacygtaaaaatcatgcacatgtttacatataattaaaagcaaatagtaaaagggaattattaagtcctttgtgtcaacacaaaagtgccaagaaataggaaagtcattttcagatactttcgccatttgttcattgctttaccctcaattttaccacctacccgccctacctgcaagctataagaaacccctctaagaaggattctatcacccattgccatcgctgtgaccattagtatcacctaccccacccaactcctggcttctcaataatgacattggcaaaggaacaaacacattggaagccagtcctcaataatataggacaggactgtacactgtaaaagaatagtttctcaatccataaggcagggctttcttgtcacaaagaaaactgtccaaacccctgtgacagatgtattcccacagccttagcatagatgacccaaacagtctgccccctggccagaaacagcccacacacattgtgtgatttcgtttggcacaggggagctatatttaaatattgaatcagatgccaacattaagaatctggatgcctggcatctctaaaaaaaacaaaaaagagattaatctggcaaccttcaattcatgttgccacatgggtacaactggcagaacatgaggagcaggtgctgcctttaggtggcgcatggactctccgctgcagagcagtccatatctggctcactttactcatacttgacagatttagaattctgaatctgtgacatctgccctcatattgacaagggcaacaaaatttctaaattctttggctggcacacctctaacattataattatgtttagcatggaactccaacatcttcatttttatatgccaaatatacacaaaatttggaattaaaaattataaggcaaatattttaaatcaatttaaattgacaatgttaaattgttatttgttaattttacaaaactattttctttaatgtattattttgatatttgcaaaatgatggaatatgttagattctgaaaatcttgctttgaattgtgtaacattttctgtgctaactaaatgacactgccaggtcaatcatttgcaatcgagttgttttgaattaaagattaatcaagttttatgtttttgcttttgataagataaataccaatatagctggaaatgctaatatttcaataccagcattggtatgctcagtcctaggcacaatgcctggaatcccaggcaggggtgggtgtctcatcatcactctaacatactcaccaggggggctcaggctctaagacacgtattttgagtcaaattgaaccaaactcaagttctggctctgttccttaattggctatggaaccatgtattttatatttcagtctcagtttcttcatcactaaaataagagaaataatcrctatatctccatgatacttaaattagataatgcctggaagttgattattggtttcagatttcagagtccatgctcaatacttgacaacttttattatcctaaatattattaatttcattctattttagcttagttaacaaaacaacaatctctgactgactcagagtttcaagcatgtctttgagaaaactaggcctattttgcagttcctccttttccatctgtatgtaaatatatatactttaatttgaaaaagatatatttccgttaatagaatcacaaataatagttattatagtctggcaaaagtatttttttctgatatcaagccaccaatgtgtctctctcacacacacagatgtacacatacacacattcactgaggaatgacttctttgcaaaagagcaaatccatattatttttggaaaaaaataaacacacttataagagaagaacagtttgcatttggcttttcttccccttactcaggtattatttcacaggcattaatttttcctgtggtgttgactacaattcactgagtaaaatggtgctggagggtagtgaattacaaatcagaacctaattgaacagcaggaatagactgattggcattgacaagtacctcttctgtgcaacttcagtagggctgcctggggtcccaaaccatagctgactgtggccttgctgcttaagaataaacttgatgtccaatcaccttgactactggctttgattagggaaataggtgccattaaccccactctttaaatccaaaatggtcaaatgtatttttcatttttaacccatcaaatatctgctgagcattagctacctgccaggaaacatgtwcaagcattggcggtaataggttcggttaggtggaatgtcaacaggcttcgttggtttatatctgttgcatatttctttttttttttctagtcatgtagcttttattttcacacaatttgggatggcattttatagatctgttctttactgcctatgtggcttttcattcttcatccttgtctcccttgtctttgaaataaagataatcgatcttgccttgtagactatttgtgactattaaataagacttattctactactatttgtagtaggtgaatatacacgttggttttcatttccccctttcttactaggggcacaaagttgaattagaccctctcctggctctcagtagtacattttccttgagggagacaagcacatatataattacaatataagaaaatattataatatcactatatatcaagcactgtaagtataaaatcaaagctatattgtcattctccctaataataaaatatgcaataaaatccttggatgacatactccctgataacatgatttcattataatgtgacttctgagtgtcagttagtctcatactctgtcttgtcctaattatctaacagaggtgggataaggtgtttatctttgggggagatagaacgagaagaaaaggcaaggccagcattaaacaggaggctggcctgcttcaggaaagacaatgggccccatgtgctcaatattctcttagctcactcttctgggatcatttcagctaaagaggtaccaactcacaagggtatttctggaacagctgccatgttccagctaagacaggaacaagaggtgttctcaacatgccattgaggcttgaggaccatygccaccaggtggcaccaaataggcagcaagaatggggtggawctgggccctggatctgactcaagtaggcaggctcattccaattatgtcctctttgttatgatgtcagcttgcatcttacacaatacagtattttagtcccgtattgtccatatgtgggttctattgtgtttagattttagtaggagctttgaacaatattatgactccctataagatctagactgtcctcatgctttttctcatcccataccattcttccctgagctcattacactccagacattctggccttctcaaatccatcatctgtgttggagcctttgcatgagcctttgcatctacctgtgttgtgttcttaatatataatccttcttttatttagctcgcagttcaaatgccacagtctgaaaaaattttctttgaccaccatttttgaagtagctttatcttttcagcctccctaatccattaccttgcttccttttcttcctagcattaaccagtatttgagatgatccagcatatatctttattgtctctcttccttcactgcactgtaaacccaggaggccagggaccttatctttctcatccaacatcatgtctccataacactccagattgccgttggtgagaatggcaggcttagtggagggcgcttctctggagcatkacttaccccttgctgaggcaaataaaataagccaaatagtaactctttctygaggaaaagtacaaataagaaagttgtaggaaactaggatgggttagaggaagtaaacatgagattattacaggaagtaaagagagattattacaaatgtattattacattatatatttgctagaatatattggagataacatctcagtaataatagtgattaacaacaataacacaacacctagcacacactctgccaagcactcttctaagtgctttacaagaattagcttacttaatcctctcaacaacctgatggaatagctactattattagccttattttacagatgaggagacagtctcagagaagtttgaacctgaccaaaatcatacagctggaaattgaaggagctgagattttaacattgataatctgtctccattatcttaaataaaactacaacttcaattttaatcattgaaataacatacatataaaagttattcttttaaaaaggagagataaagaatagccaaggtggtcttagctaaaagagataactatgagtgaccactaaggaagaggatgggtcacatattatagaagaagatcatgcacagagtggtccaaaggacagtaaatatagagtagatgtcagtggtggataaggaactcttaatagagttcaaaacctcaatctgggaaaaaagggacctcagycacaggtataccttttcatgctacaggaattcataycacagtgcaaacatatactgccaggctggatcataacattttggaagatttgggtaggagcaaagacattaccatttgttccsccacattgtatctaggttcagctctcaacaaatgyttatttttcagcccaaccggagaaygcatgagagaggaaagactgataccaggaaaaaggactagactgaactttccttcatgcttccacagaattcaagcagtgaacagaaataaaaatttgcccagttctgctttaagaaaatgctctacaaattccacagagcacttctaaattgcatttggattctgtgctccmctccagcatgattattyatgatgtttgttgaatacagccactattctctgcctctatgcacattcataaacatgatttctaaaagccatccattatggattatgatctatacttggaaacaagatgtggctggccaatcgtgcattcaccaacattacagaatcaygtaaagtcctccccgcctaccctacagtcctgaagaggtcttgccattcaactcaagtgccgaagatgttaattaggccttagcccccaggtatttcagtgagcttttcagttcgtgggttatcaccatgtayatgcacctactgcctctcctaacagataaaactcaaggattaaaaatataaatggtaatagttggaatcctctgcagtttgggattaattttaatcatcatcagggcaatgataatactagtaattctttattgctcacctacacatatatttgtcatttttatgaaatgttaaagcaatccaaaaaagtgtaaaggatactataatataggcaacaatatctgtcatctagttaaatagataaataattactaagtaatcaaagacgtcttttcatgtctatctgatgacatcttcctagaattagccagtattttgactgtagttttatcattcctgtgtatttctttatgtatgaatccctaaataacatatagtgtaattttaccttttaaaatgatataaatagcatcaagctgcacacaaaactttgtaactttcttatttcatttgttattttgatatttacccatcttgaaaaaaagtaagcctaatttgttcatttccagtgctgtttattattttatcctacctttgatggaaatttagctttctgatatttgcaatcacaatcaacaaagctatgaacaatcctgctcatatgttcttttatacatgcacaagagtttcccaagtatattcctagaagtagaactgttgggtcagagattatgtgcacagtcaactctaccaaactagaaaataattcttcaaaatgcctataatttatgccccaacgaaaaagtatacatttttttctgttgctccatgctttgtcaatagtcgctattgtcagaaattttagtttttgccactacagtgggtgtgagatagtaaccctatgtagttttattcagatattcctgattactagtaaaacatctttctatatatttattgattttcttgtttctgtaattatgtttgtaattttacccacttaatttgttttactatttatgtagatttttaaaatgtatttgtatattttatatactctccaatcatgtagcttctgttttcacttttgttggaaggcagcagttttctttgagggacataaggtaatttctgctaatgttgaataattttcatcattttttgttgtatatgtttttcaaaacagttatagattaagcctttatttaactaaatatgatgcttgatataggtgtttggtagaagtcctatatctaacatttttttttctttaacatagttgatttttttggaaatatttttctatttgagatgattcttcatattttgttcttatatcattaaacataaggaattacaytggtacattagctactcttaagacattctaggaattccttarataaaagcaacatgttcacaatatttttttaaataatcattttaggttgttttgctaatatttgttcagataagtttttaaataacatatattgaactgtaattttccgattgactttgactagtttcgtagctgtttatattaactacattaagtgaaattgagaaatatgtcccctttttattttctgcaatgttttgtaaatatcaatatacatttcctcaktgtttcactgaccttgctcatacttatctgcgcatcagttttgaatagctatgtgtaggtgagtactgatttttaactacctgaaaaatttaattgttgtgtatctacacaatattttatttctttttgactcatttttgataaattatatttttctagttatttgtctatttccttaaattttcaaaatttaacatacattatttattttattttcagaaayatttgttgtatctgtactttagtcccccttgttactactaataatgataatttgtgccttgtctctttctcctgttagtgctaccaggattttgtttatattataaatattttcaaagaaataacttctgcaggccagktgtggtagctcacrcctgtaatcccagcactttgggaggctgaggcaggcaggtggatcacgaggtcaggagttcaagaccagcctgggcaatatggtgaaaccctcatctctactaaagatacaaaaattagccaggcgtagtggtgcacacctgtagtctcagctacttgggaggctgaggcaggagaatcgctggaacccggcaggtagaggttgcactgagctgagatcacgccgccgcactccagcctggtgacagagtgagactccgtctcaaaaaaaaaaaagaaaagaaaagaaaaaacttttgcttttaataactctctggtatatttttattttttatttctcattttctttactttcattatcgcctttatttttttcttttttattcagtttgttttattcagtggttcttttcctaactgcatacattctatgctttgctcattaaataaagtctttcttctatgctcacaaaatatttaaggtacctcaaaaaagcaatgtaagctctattcaacagattttgattactgaagtatctatttgaatccaacatttccattttctaaaggcttggacatgttattgtcatttattatatttcttccactcaaattatttaaagtctttaaatgaaagattgttttccatggggctacatctgtaggatcctgttgagacctgagttggtaaaagaataagcttttgttgctgccaaatgtcacaagaggctaaaaccttaaagtcacttattttcgtatttaggttcttccaggtcacaaaagcaaggtaaatgcaaagattattttcttaatatgatttttatatgaaaggaagatattcaatgaagaagaaaaaactgtgaaacacaaagtatgttcaggatgtctcaggcattgtgatttgattgaaggagttcagcagtcttgagtttgaattctgacattccttcttccaaagtgtgatcttgagcaagtttctaatacttgttttactctgagcctcattgtttgtgtctaaaatttggagaacacattacatggatagtgtgatgattaaatatacaagtatgagcccacagagttccttgaaataatatgcatccaatatatgatgtaataagtcctgtcctttatttttctactttttccttaggcaagatacaatgacagaccagaaatgaaaggactcctaggtcccttctaggaggaaaggcccagaaggtctattgtctctctggctatggccctaaaaccatgatatttattcaaccaatactatcttctccatgctaggcaataaaggagasggtcatrtgctcagacacattagagtgggcctaatagctctctaggggttaagaacatagtggatttaggctggtaggtattttgagataataatagtaataataactattatatgtgctttgcacatgttatcttatttattcccaccataaaccacataaattgttggccccatgtcccattttcagatgaggaaactgargccccaagtcacacagtgagaatatgtcaaaactgaatgaaggccattttattccagattctacttcaatattcttaaaagacagctccmactaaagagcacagagtcattatactgtattattttcttaagtgcctttgggaccaattaggccataaagtcataaacacatcattacaaccatgaatgagcaccatgacttggggcagtggtaagcctgtaaattgttgggtaggtctgagatattattgtgctgaacagcagctgaactgtgactctgcgggtctgtatcaccaagatcggttgtcttaagtttcttgacaatgtcagaataaactcataaattcagaaaatggtagtcaaattgacaattctttaaaggatagtaatacaacccacattggatgctggccttttarcaatatcattattttaagataggatacttaaattgtgaaaatgcgtttttaacaaacacactagaatgattttttaaatcagttttcagcctgttttaccacattagggtatcatattatgagactctgacatgctggtggctctgaactaaacagatattttgggttttggtgtatgcacccaggagaaaactcagaattccaacttccattcattcatcaatcatttagtgagaggctcctataaayaaaaactgggcacagaagatatatgaagaaaaagcatgggcctacaactgagactctgtagtctactggagaaaatgtagacaaataattacaacaatattccaagtgttatagcagaggggatgattaaagttgctttagaagagcagggagctactattagataaagatgagaattaaggaaattccataggaaagatatctcaattgaaccttgaaaagcaagtcgaattttatcagacaaagctaaaagatgactctaggtataggaaatatcacatgcaaaaaaccttgatgcaggataaaatacagtgttcaggaaacattgaagtatttggtgtagctgtagcacagggcttatggaggagtagggtgaggaagagatgagtttataaagtacagtgggaccactcaatgaaaggacttaagatttaagtcctcctaaagtttagtcaccatccagtagataatgggaaatcactgttttttttcagaagcagtaaggcataattacatttctgttttgaaaagatcactctggagacaagagtccatgtgttcctctattccatgtagttttgataaatttatagattagtagcttgtattatatttaggttaactcttataggtaggattactgcatagataagtaatggttttctgaggcactatcttgggaacattctgagacctaatcaggaattaacagaaaataaatgccaaattggattcataatttattgtggtagcagcatggcttttgtaagatatatgccattccgggcttcacatgatacccacagcaatgaagaagtaaacataacttttctaggggatgatttaaaacaaatatttcacttcattcawactaaacaataaaaaagggggaaaatgtttggggtatttattgtgtaggatgtgttgcaatgagctttaaacatgacttttagctagaatacccttaactctgaatccaccatattgayataatcacaggaagagataccaagggtgatatccatagagtgcaggagaagaggggttagagtggcagcaaggatctagtgacagcctggggaagagacaagactgaaaatctgagcatgccttcgaattctctgcttcgagctrgtgaatggatgagtttaaaataaatacaytgaaatcaaatwtagagtagtatacattctccctggaagysacaggaaaagcaggaaaattaccaaatgtatgtaatcaggagcaagataggaatgaagaccttaagaaattttaaaaaccaagtttcccaaagcctattataggtaaattgtggtaagcatcaagttaattaagacaaaattacaaaggcaccctgtgartttattcaattatgtacaaaaaaaggagtcagatcataggaaaagctgtgtgagtagaggggagtaaatagatcttgtaatcaaaagacttaagttccaactcctcctccactgtttactaacctttctgagcttccacatgtacatccaagaacataaaattataatctctgcatggtgctaatgtgaggatcaaatgagataatgaacgtgaatggatttgtaaactacaaagcccttgacaaatataaggtattatcatgatcgtattgtcacaataaaagttaaatgcactcagaaaaagcaccctagcttccaattattctgtcggaatatttattagacacttatgtgccagtctgttgcagtaagccctggagagcaaacaaggtccctgctctcgcagacctctttcatggagccagcattctcaccactagaaagagagaaagaaaatcaaaagttattcactaatttgtgtggtttggggaagagaaaaatctctgttgagaatcagctcaatagttcctggatctagcactggacaagggatgcaataggtttctcccagtgatatcatagtaattattagatcaaggttggaactaatgaaacattgtgtgtgaagagggtttgaggatcaattactgtatttaaaaaaaaaaagccaagtgttgcagctatgaaacagctcataatttgggactaggctaggcaagcaaagaatagtatatggagactcaggtacactgcagcacagtctgatgcagccattatttgcagggtcttgctgactgagaatagcctctaaatgactggatttatacccagcgacccagctactcaaactgggaagcaatgtaaataattacctattacctagagctgctctgaaagacacaggacaaatattattctctgtacttggtatatgctatatcattgtactttaatagcaaccccaagaaggattagtattaccatttcaaagatgaggaaattgaggctcacatagataggagaacttgcccaagaaaaatagcaaaagtgagacagaacaagactcaaacccagaattcttggttcttttatttaatgagaaacacatttggcttatttgatttttgtcctagcgcgtcttaacattggtctagtcacatgatttatagcttacaactggactggttgatatgtatagattcaatttactcttttaacagatagcataacactgaacttcttttcatacttatgcctgcctctttcaatatccgatttacttatcaagatttactgtgtatgttctgtctttgcgaacaaagtatacaaaggaaattattaggctgggtgcagtggctcacgcttgtagtcccggcactttgggaggccaaggcaggcagattacctgaggtcaggagttcgagaccagcctgaccaacatggagaaaccccgtctctactaaaaatacaaaattagccaggcatggtggcacatgcctgtatcccagctactcgggaggttgaggcaggagaatcacttgaacccgggaggcggaagttgtggtgagcctagatcatgccattgcactccagcctgggcaacaagaacaaaattccatctcaaaaaagtaaatacataaataaaaawtttttaaaaaataaaaaagataggaaattattattctataaactttatgtacagtaattagctttccatggatctgcctgaggatgaaaaccattcacaattgcttcatttgttttacctttttgagtagtcacaatgatgtgtgtataaccagaatgggccactgtgatacatctacttgccacatgaatcctaaagctaaaaactgtctgaaaggcaggtagtaggacaaccacaatgacaactgtgaagaacaacatactaaaagtccaatagatatatttttggcacaacttctttcaatataaagttgaataaagttgaaaaagattctgataaaatcagaaatacctagagcagcttagcttccttagggccatgggtaaatgctgatggtaatgagttgtctgagtcatgcagagaaagttcctaacaatcaggagtgtaataaatgcaaacaccaaaattgtaaaacaaatttttactttctgcagcattttgcaatgaaaagatcacgggttttggagccagaaaatcttacttgaactctgttgctaccttgtcatgtggcaacaaatccttagttttcccacataaaccagtgtcaggcactcaacagaagtctctcaatcaagactatttatttacttatccaggttaggagtctactaccctatactgctcactcattcatttgtccattctgtgtggattttaatcatacaatcttttacctccattatttataatactatcaagagagtggcacctgtaggaaatgagtcaaccataaatcttcagaggycactaggatttgccttctaagccttcagcaaattctgttcctgacaatacatatgagcaaggacagaggatttcaaagctatggtaactacttgccaaagacagagacagaagtatagatgagctttggccaggggtggtaatagaacagattaaactttaagaacttgggagaaaagtgcaaaatgccagagaaggggcaaggccagcaaaaggaactatacaacataaacaaatacattggctcccagatacttttttagaaataatgcttgttctagttcctccacttaccccatcacaaacagatcactcctgtgaatagtgaatgaagcccatatagaagaaaacctactccattgcattatcagctgcaaagtaataagctgcaaagcgtttttgtcattcatgacatatttgtagtaattagaacagatgggataaaccagtttaaatcccaataatgcacatattattgcccacagttgattrtacatttctttgtccagttcattgttgatgactcaaataatgaggtctcctgctactttgactcactgcatargacatgcagatgagatggaataacagttgtcacaatgttctccccatcaataccaagaaaaaacatgctaatgtgaaatcttaaacacagtatccaaggagtgtgagctaagcttcagatgacaaacactgggtcacatgtgaaacgcctaccccagcaatttaccagtatgaactcacacatcttcaattgcttttcagattgaataagaacaaaaaggatagggtaagagaacaaatatctgttacttgttcagaaaagacaaaagatttgcatcccatggaaaagtttctgagatatctttagcagtaataaaattcactgaattaacatggttaggggcgcatacacacatacagacacatttaaagacctgtagattatgcatgttggcaaagtcatactttcagggacaatttacattaagatattattatgtgataatattcacagacagtaagtactacaaaacacactctctaccaccatcaggatagtcactggcaatggtagccccctacamtcagtaaaatacctaaatactctggatatcagaacacagcataggggaaaaaacaattctgaaataaaagttggaaaatatgagtttgagtcttacacttaacaacggcaagtatgatgttggacatcagtttccttcctcttacaatggagaaaacaatgacttatttgcagagtaggaataaagttcaaatgaggtaacatatctgaaaacagattgtaaaacaaactttacgaagggtttgtaaatacaatctctcaactacactttccatcaacactaaaaagcacagtattatgtcactgctaataataaggataaattataacagagacaacctggataaaaagccatgtcacgtataaagctctgggtgctgaaaataaaatgtatacagatctcagagacaagcaaattgaattgttgggaactgtaggtcaaactgattataaatattgtggtgaaataaaatattaaagtcataaaggacaaataataaattggatgtttctaaatacaagctcacatcttgcacggagagctaacaacctggaggtacataatcattagatctcataaactgatttagtacttacagagaatttagaaataatctaagattatttataaaatttattacagaaaatatttttggggccaaacagtaaaatccattgtggcataaataagaactctcatgacagatgaaattcctaattctatgaagtgttgaaagtgttatgtttttactaagtagttacagataatcaagctagtgaacttatctggtgaactagaggctacaaaaggaagacaagatttttctgtcatgctgacatggtagttttttaaaaaattgattcacttaatatttttcagatgatcaaaataataaattctcattatagaaaatttggaataaaagactccagaaagataaagcttaaacgtatcctttttactgcctctttccactccaatccaactatctattccttctcttgagaaagtctggctatggcaacttcacaggtcctagaagatgtcagcaagctatgccagtatctaaagctgaaatttaagttgttgacatatactcttatccagagtttgaaatgtaataagactggtgttagacagccctgggctaaggatgcaacacagtgattactggcaaccttggcactcaaaagaagaaagcctttactaaacctgtgaaaatgaccttgtgcacacttgctattcctttcycagagagtcatgacaaaactgaattggattaaatcctctctccctaagggcagaagaattcttatctttatagtagagttgaccaatacagagagccttcctcctggaaagaaaacttacaacttgccacaactcatagtatctctggttatagaagcagaggcagctggacattccagttgatgaattttaattctgtgaaaaggccaagaagaaactttggaggaaaaataatatggacaattttaccaaacaccaaatgacaaagtttttcaaaaatatagtaaataaaataatgtgttattgatgcatgaatagcaaataaaccaacaaagcaatgtggaaaatctgaaaaataggcatatatatgagtgtgaaaataatagaagcattatcagtggagtaaagatggactagtcaaatagattgaacaaatagctcctctgacagaataataacaaaaatagattcttatttcacacaatatatagaagtaaattttacaatgtattacagagtttaataacatacaaaaaattgtataaaactcaggaaaaaagtgaaataatatcttaatgatccatgtaataaaggatgtctgaaatataaggcagacacaaaaattaaccaaaagaggaaaaaaagcattaatagtgtaacaaacatgtaacaaagatatttgcatgaatgataaaaaaatgaatattcagtgtctaattataaactctgtaattctacaggaaaaatgttaatgaatgatacagtataaatatgggcagaaaatatgcactggaaataaacagaatgatcaataaataaattaaaagatgtttaacctctctactaattagggaaaggcaaataaacacaaaagaagccagttcacataggtcaggttgaaaagtgtaaaacgtcagcctgcaccaagcagcagtgaaaatatgtagaaaagcaactctcctacaatggtataaatgggtaaatctcttcacagaataattttttgatatctaataaaattgaatatagtcctatcctgtgatgaaataatttcacctcttgatatataccctaaagaaattcctgcaaatatgtacaaagaaacttctgtaagaatattaattgagacattatttgtattaaaaatggaaacaatttaaacgttgatcactagaagaatgaaaactaaatcaatcttgtcttcttcaaatagaatactatatagtacttaaaaaaattatcagaactatgtatgtatcaatatgtgtctctttaagaaacacaactgagtgaaaaaccaatggtagaaaagtacatgattacttatttataaaatttaaatacaaacaaaaattatatgtgtgtctgtatatatatatatatatgtatatatatatataatatgtttatggatgtgtagcaaaataattaaaacatgggtgaaatggaggcatgtcaatttttataattatttatgtaattatcaccagggaggaaaatgtagaaggaatagagtcaagaaagaatataaaaagaatttagattttattcaaatctacaatattccaattattagtaaaaataattttggtgcaaatgtagagaaatattgaatatttactaaaataattctagtgtaaaggcatctgtaatattttcctgtgtacttttctgcctggctgtattatttcattgaactgtgaaataagacaaattgaaaataaagagccaaaatgtatcagggaatgcaaagtaacagacaaagaaggagtagtaatattgatatcagaccagttgaaatttaggaaaaaagacacagggtataataaaatggaaataatatgtcaaggcctgaaacaaatatatcacaggtataaacttgtatacaatatacagcaaagcagctaattacaaagagcgaatactcatgaattcaagtagaatctgacataaattattgttgaaaatgttataccccctacagaactggatagatctaaatgtataggaagaaaaaaacacaaaaactggagtttatgtataatatatgatatttgatttatatttataacctataaaccaagcatattttttttctttgaggggtatgaaagtgatcctgcctttgctcacaaacaaaatattaaaatattttaaaacagatatttcataatttacattaactaacgcaattaaatgataaataactgacttcataattatttaataacaattattcacctgaaattaagaaagactttcttaatcaagttctggatcataagagagtcaaacaaaaataatatgctatccagaaaatagtaaaaagttgaagaccttataacaaaaactgggatatgaccagaggaaaagatctgcactgaaatgacaatatttggtctactttttttaaaaatattttttgtaactatacttcaagttctagggtacatgtgcacaacgtgcaggtttgttacatatgtatacatgtgccatgttggtgtgcttcacccattaactcgtcatttacattaggtatatctcctatggctatccctcccccctccccccaccccagccatcccattactgggtatatacccaaaggattataaatcatgctgctataaagacacatgcacacgtatgcttattgcggcactattcacaatagcaaagacttggaagcaacccaaaatgtccaacaatgatagactggattaagaaaatgtggcacatatacaccatggaatactatgcagccataaaaaatgatgagttcatgtcctttgtagggacatagatgaagctggaaaccatcattctcagcaaactattgcaaggacaaaaaaaccaaacactgcatgtcctcactcataggtgggaattgaannnnnnnnnnnnnnnnnnnnnnnnnnnnnnnnnnnnnnnnnnnnnnnnnnnnnnnnnnnnnnnnnnnnnnnnnnnnnnnnnnnnnnnnnnnnnnnnnnncaggaatggtttacttcttaataagttaaaaacaatttgaaatgaaacaagaaagtagggagagaataaatttgaaagctaaaatgtataaagtagaaatacaaagaaaagaacaggctgggcgctgtggctcacgcctgtaacccagcactttgggagggtgaggcaagtggatcacgaggtcaggagaacgagatcatcctggctaacacggtgaaaccccgtctctactaaaaatacaaaaaattagctgggggtggtggcacgcgcctgtagtcccagctactcgggaggctgaggcaggagaatcgcttgaacccaagaggcgaaggttgcaatgagctgagaccatgccactgcactccagcctgggtgacagagtgagactcctctcaagaaaaaaaaaaaaaaaamcaagagaagaataaaaatatgtttaaattgtacctattgaaaaaagaaactcctataagaataattaagaaatgcaaaggaggagcaaaaatctgttaaacaagaaatagaaaaagaaacataattatagacattaaaagattaaaataattatatgggaatgcaatgataatatgtggtaactggcttctaaacctaagggaaatgtatagtttttcaaaaaatataaattactacaactgtgcatataagaagtacaaattttgagaaggacacataatcataaaaaagctcaaaaatgaaaaattaatctatcattttcaaggtcttcagggtcacgtgaccttatagccaagtctaaattttgaaaagcaattaatataacttacacattttcaaaatagaaagcaataacaagttctaaattatttttaaagtggacccacttggtacagataatagacaacaaagtcacagagcagctcatatatgacaatatatttataattctaaataaaatattaatatagtatgcagaaacatcaagaaaagagacaacccgtttttaatgtgcagagaatctaacagacatttctccaaagaagatgtacaaatggccaataagcatatacaaagatattcaacttaattagtcatcaggaaaatgcaaatcaaaaataaaaggaggtaccacagcatacccaccaggacaacttgaatcaaaaagtgagataataacaagtataggtaaggatgtagagaaacttgaatactcatccattgctggtgggmgtgtaaaattatgcagccactgtgcaaaactgtttggtagtttcttagaaagttaaaaatagaattacsgtatgatccatcaatcccactcctaagtatacacacccaagagaattacaaatatatattcaaacaaatactggtacataatattagtagtggatttactcataatagtcaaaaagtagaaacaaccctaatgtctataaactgatgactgtttaaacaaatgtggtgtacctgtaaaatagaatattattcrgccataaaaaggaatcaggtactgatacatgctataacatgagtgaacctgaaaaacaytacgctcagtgaaagatgtcagacacaaaaggccatagattgtattgtttcattaatataaaatattcaaaataggcaaatccatgctgacagaaagtagcttagtgttgcttgtggttaggggaaagggattacgcggagtgattgcttaatgagtacggagtttctttggtgggtgatgaaatgttttaaaattagctattggcaatggttgcaaagatctttgaaaaactgatttactyatatgttttacatgggttaaatgtatgatatttgaaatatatctcaataaagctattcatgagagtttttaaacagaagaataccaagagaaaaaccatactgtaacctagtaggatgatcaagtgatgaaaaagatggctctacatcactaatttttctaaaaaagaataaatattgatgtatgatgggagaaaagtcaataggaacaacttttttgacttgtttttttcaatgaaaacaatgtttataagatttatctacgttgtttgaactgttgatttgtttacaatactgtataatattacattgcatgaatatttcacaatttgttattttcaaattattgcagttataaaaattactgttgatacatgtcatcctcatgtctcttggttcatatatatatgaatatcttttgagtatacatttaggagtagaataagttgmtgagtcaygcacatatatatttcccaaaatatatagtataataccatgttcataaagctcaaaaaatagtaaaatgtattataacatatttgttgaaatacacacatgtgtgtgctaaaattacatattttaaaatgtgaaggaataataaatatgcaattctggaaaaattttgcctccaaggataagtgacaaaaggggatgaaataagggagtagcactaggataacttcaaaattatgagtaatttcttttattttgaaattggatgacttgttagtgagtgttcatttttatgtctcctaatatgtgtttatgcgttacaagtgctcttttgaaagaataatayattaaacagtttataaaacaatagatgtttacgaaacacttgataaaatttgttaattcttccaaacaaaaattttttgtaaaatagaaacattagatcactacttaacgtgccaagacctacctactaaaaattattaaatacatttttgttaatactatatgtaaatggctttggtaaaaatcaatatcacacacctgaaaatatattgcttagctayagaaacactggttatgaaaaatatatgtacaayaatgattattggggtgttgtttgtgctgagaaaaaaataaaaagtgaatgcctattaataagggaaaggagtaaattgtgatagatccacaccacggcatatcaatattttactgatacaaaatattttacatatttatagggtatgagtgaatgtttgttacatgcatagaatgtataatgatcaagttagaatatttgtggtatctatcacctacactatttgtcatttctttatgttggtaacatttcaagtcctctcttcaaacttcttttaaatacataatacattcttgctaactatagtcaccctatctgctgtcaaatattggggcatatttcttctacgtaactatatgtttgtattcactaatcaacctttcttaatctgctycccatcccacccatagacacttcacatcctctagtatctatcattctatactctatctccagaagatcaattttttttttttagctcctacacataagtgagaatatgtggtatctaattttctgtgcctggcttgtctcacttaacataatgacctacagttccatccatgttgtttcaaattacatgatttcattcttttctatggagaaatagtacttcatagtgtatacatgccacatttactttattcatttgtctgtcaatggacacttaggttgattccctatctttgctattgtgaatagttaagtgctaaatatgcacatgtaggtatctttttgatatcctgatttattttcttttggataaataccccgtagtgggctggctgtatcatatggtggttctgcttttaggtttttgaggaaagtgtactgttctccatagtggttttactaatttacattcccacccacagtgtatgagttcccttttctctgcatactcactatcatctgttgctttttgtctttttaataatagccattctaactggagtaagataagatgacactttattgtgattttgattttcatttcatgatgcttagtgatattgagcattttttcatacatctcttggccatttgtatgtcttcttttgagaaatgtctattatgggcttagccaacttcttttattattattattattatactttaagttttagggtacatgtgcacaatgtgcacgttagttacatatgtatacatgtgtcatgctggtgtgctgtacccattaactcgtcatttaacattaggtatatctcctaatgctatccctcccccctccccccaccccacaacagtccccagagtgtgatgttccccttcctatgtccatgtgttctcattgttcaattcccacctatgagtgagaacatgcagtgtttggttttttgtccttgcgatagtttactgagaatgatgatttccagtttcatccatgtccctacaaaggacatgaactcatcttttttatggctgcatagtattccatggtgtatatgtgccacattttcttaatccagtctatcattgttggacatttgggttggttccaagtctttgctattgtgaatagtgccgcaataaacatacrtgtgcatgtgtccttatagcagcatgatttatagtcctttgggtatatacccagtaaatgggatggctgggtcaaatggtatttctagttctagatccctgaggaatcaccacactgacttccacaatggttgaactagtttacagtcccaccaacagtgtaaaagtgttcctatttctccacatcctctccagcacctgttgtttcctgactttttaatgattgccattctaactggtgtgagatggtatctcactgtggatttgatttgcatttctctgatggccagtgatggtgagcattttttcatgtgttttttggttgcataaatgtcttcttttgagaagtgtctgttcatttccttcacccactttttgatgggattgtttgtttttttcttgtaaattagtttgagttcattgtagattctggatattagccctttgtcagatgagtaggttgcgaaagtgaactcccattcacaattgcttcaaagagaataaaatacctaggaatccaacttacaagggaagtgaaggaccttttcagggagaactacaaaccactgctcaatgaaataaaagaggatacaaacaaatggaagaacattccatgctcatgggtaggaagaatcaatatcgtgaaaatggccatactgcccaaggtaatttatagattcagtgccatccccatcaagctaccaatgactttcttcagagaattggaaaaaactactttaaagttcatatggaaccaaaaaagagcccacatcgccaagacaatcctaagccaaaagaacaaagctggagacatcatgctacctgacttcaaactatactacaaagctacagtaacccaaacagcatggtactggtaccaaaacagagatatagatcaatggaacagaacagagccctcagaaatagcgccgcttatctacaactatctgatctttgacaaacctgagaaaaacaagcaatggggaaaggattccctatttaataaatggtgctggggaaaactggctagccatatgtagagagctgaaactggatcccttccttataccttatacaaaaattaattcaagatggattaaagacttaaacgttagacctaaaaccatagaaaccctagaagaaaatctaggcattagcattcaggacataggcatgggcaaggacttcatgtctaaaannnnnnnnnnnnnnnnnnnnnnnnnnnnnnnnnnnnnnnnnnnnnnnnnnnnnnnnnnnnnnnnnnnnnnnnnnnnnnnnnnnnnnnnnnnnnnnnnnnnnnnnnnnnnnnnnnnnnnnnnnnnnnntatttgttatattattgttgagttgtttgagttcccttgaatattctgaatgttagtcccttggatagacagtttgcaaatagtttctcccattcaacagattgtctttcactctgttgattgtttcttttgctgtatagaagcttttcagtttaacatagtcccatttgtctatttttgttatagttgtctgtgctgttgcggtcttagccatgaaatcttttcttagactgacattttgatgtgttttccttatgttttttatagcagttttatagtttcaggtcttatgtttaagtccttaattgatcttgagtttatttttgtatgtggggtgaaatgggtatctagtttcattcttttgcatatggatatccaattttcccagcaccatttattgaggaccgtgttctttcctcagtatatattcttggtgcctttattaaaaatcagttggctgtaaatacatggatttatttctggcctttctattctgttccattgtcctatgtgtctgtgtttacaacaaaaccatgctgttttggttactatagccttgtaatatattttgaagttaggtagtgtgatgcttctagctttgttctttttgttcaagattgctttggctattctggcttttttttttttttttggttccatacacattttagaattgattttttgaattctgtgaaaaatgacattggtatttcgatagggattgaattgaatctgtatatttctttggacagtatggccattataataatattaattcttctgatctataagcatgtaatgtctttcaatttgtttgtgtcctcttcaatttctttcatcagtgtttcgcagttttccttacagatatcttttcctcattggtaaaattaattcctgagtatatattttttggagctattgtaaataaaattgctttcttgatttttttcctctgctagttcatcattgttgtatagaaatgctactgatttttgtatattaattttctctcctacagctttactgaatatatcaaatgtaggagatttttttgtggtgtctttaggtttttctagatgttagatcttatcagcagacagagaaaatctgacttcctctcttctgatgtggatattttttttctttttcttgtctgattgttttgctgagggctcccagtactatgataaataggattgatgtaagtgggcatctttgtcttgttacagatctcggaagaaaaattttcagcttttccccactcactatgatgtaagtcagctgtgggtttgtcatatatggcatgattattttgaggtatgttccttctattcctagatgttgagagtttttatcacaaagggatgttacattttatcaaatgatttttctgtgtctattgagatgatcatttggtttttgtccttcattctgctgatgtgatgtaacatgtttattgatttgcatatgttgaatcatccttgcagtcctggtgtaaatcccacttggtcatggtgtattttccttttcacgtactgttggattcagcttgctagtattattctgtggaagatttttacatctaatttcatcagggatattggcctatagttttcttttttggatgtatccttgtctggttttgatatcagggtaatgttggcctcagataacaagttagggagagttcccttttcttctgttttttttttttttttttttttttttttgaaatactttcaggaagattggtgttagttctctacacatttagcagacttcagctgtgaatccaccaggtcctgggcttttgttaggagactttatattactgattcaatctgactactcattattggtctgttcaggtttctatttcttcctcattcagtcttggtaggttgtatgtttccaggaatttatccatttcctctatgttttggggtttgttagtgtataactgttcacaatagtctttgatgatcttttgtatttctgtgctatcacttgtaaagtctcctttttcatttctgattttttttctttggattttctcttctcttggttagtctagtgagtggtttttcaattttgttcctttttaaagaacgagctattcattgattctttatatttaagtctgtatttcatttagttcttctctgatctttattatttaaatgatctaatttccttctgctaattttgtgcttggtgtgttcttgcttttccagttccttaaggtgcatcattaggttattatttgaaatctttctttttttttgatgtaggcatttattgctatataattttctcttagcactgcctttgctgtatcccacaggttttggtatgttattttcccattgtcacgttttaaaggcattttttgatttnnnnnnnnnnnnnnnnnnnnnnnnnnnnnnnnnnnnnnnnnnnnnnnnnnnnnnnnnnnnnnncccactgtggtctgctgactgctgccaccacagggacccgaagactggcccacctggtatcctagtcctcagcaaaacttcaccacagcctccactagtaaccataccctaagccactgaggaaattgcagatatcaccaatgctgcttataggccaggaaatcatacaaagactgaactactgcacaaatccagaatcaaagctgaaggccccacccaccaacaacatatctacatcttcagcaaaaagccttctcctatgaaagcaagttcaaaaaaatagaagaagtttatttctttttttttttaattggttgagaatttttgtgttgcctaacatacggtctatcctggagaatgttctatttgttaatgagacgaatgtatactctgtagttgttcaataaaatgttctgtaaatgtctgtcagatccacttggtctaaagtccaatttaaatccatgatttcattgtcaattttctgtctagagaatctgtctaatggtgagaataggcttttaaagtatttctgaaytgaagtcagtttctctctttagatctagtaatatttgctttatgaatctgggtgttccagtgttgtatgtatatatatttagaattgttatgttctatttttgcattgattcttttatcattatgtaatgatattctctgtcttttttacattgtttttgatgtaaagtctgttttatctgaaataagtatagctactcctcccggttgttagcttctgtttgagtggaatatcttttttgatccttttattttcagtttacttgtgtccttacaggtaaagtgcatttctaataggtagcatatagttggattatagctttttaaaatccattcagccaatctatatattttaagtgcagaatttaatccatttaaattcgaggttattaatgatctgtcagggtttttgtcatattgttcattgttttctggttgtttgtatgttctttgttcatttctttttatcttattatttgtcattgtgatttggtgattttctgtagtggaaccacttgagcccttcctctttctcatttgtgtgtatggtttacctgtcagtattacagttttatgagttttcatgttggtaaatgttgtttttttgcttccaggtgtagggctcccttaatcaattttagtagggctcatcttgtggtgataaattccctaagcatttgcttctctgggaaagactttatccctcacttatgaagggtaattttactggatatattatccttctctgtcagtttwttctttcagcacattgaatatgtcatctcattctctcctgcattgtgctgagaaatccccagttagtctgatggtggttcctctataggtgactagatgcttttctcttgctgtttttagaactctctttttctttggctttagacagtttgactataatgtktcacagagaagacctttatggagttttgtcagtttggtgatctttgatcttcctatatctggatatctaaatcttttgcctgacttgtggtttccatccattatttcattaataggttttggaaccccttcattatctctttgtccatggagacattgataatttcaataatcagttggtttatggtgtcccaaacaccacaaagtctttgttcattcttttctaggcctttttatttttgtctgactagattatttcaaaagacttgtcttcaactattgagattctttcttctgcttgatctagactattatcaaagtttccaaatgtatttatttcattcaatgatttcttcagttccaagatttctgcttctttttaaaaatatccatccctttggtaatttttaaattcatatcctgaattgttttttatattctctgtatcatttttcagaattctcttgtgtctcatttgggcttctttaaaatcagtattttgaattctttatccaaaattttatgaatttctgattgggatccattgccagagaattactgtgtctctttccaagtgtcatatttcctttcttttccatgtttttggtttccttatgctgacatctgcatagcttgtataacagtcacttctatttttttgaacttgctttcataggagaaggctttttgctgaagatgtagatatgttgttggtgggtggggccttcagctttgattctggatttgtgcagtagttcagtctttgtatgatttcctggcctataagcagcattggtgatatctgcaatttcctcagtggcttagggtatggttactagtggaggctgtggtgaagttttgctgaggactaggataccaggtgggccagtcttcgggtccctgtggtggcagcagtcagctgagcatgcctgtctgtgagctccagagtggtgtatggtgagtytagtgttcgtaagtccaggcaggttgattcttgggcttccaggtagcttgcttggatgttggtagtatcaggaatggtccagaaatttgggtgggttttagggcccctggtctatgggtattttgtgggcaatggcagaagtagtggtgaggcaacccaccggaaccccagtggtccacggtgatgttggcrgtggctgtgatgggctggtcagggcatccctgtggcctgcaagtggcttgtacaggtaggtactagctgtggcagtatcagcagttgggttggcataacctcaaaccctgggaaaagtgtttaggtgccaacacatgtggattgggctgggcaatctgcaggygcctggatgtcatgcttaagtattgtgggggtgggaccaggacagcaggcttgtcctcaggccttctggtaggatgttctggcactgtctgtaataggcaggartgggatggtccccagattattggcagaatgttcaggtgggtgcagtggtgactgtgctgcagactggcctccagggagggyggggccactctcagtgggagcagcttaagcaggcatttgtagaacttgtgattttctcccacctcggtcctacagcagctcgcaagcagaggcggtagtatttgtacttggaatgtacgacattgcctagcttcccttctcccttcctggtctggcagtggcaacagcagtgttgaacccagtggaggacacagtcctctaagggctgtgaacttggactggtgcaggattggaggcctgccactgaggaggatgggrgccactctcagtgggaggagaataggcagacagctatggggcctgtgatttcctcacatcttggtcccacaacagctcacagcagtgggagaggtgagatttgtctttagggtggatgaaagtgcctggcttcccctctttctccttggtagtctttgagggctgagctctcagaatggcactatgttgcagctgctcagggtttggaaatctgtgggactgtgtgaattccttttctgaagcttggcacaatcactaggcagctgcctatattagtctcaaggctgtgaggcttgaggagcttttccatggctaggattatacatggcaagtatatgaaaccctgacgtcactcactcaccctttccttatgtccaggagcttctcccagttcctagtcagtcctggccaaccagcctgcctatttccctctcctttgctttcagtgtttctggtcacttcttggttatattccagtgttctctcctaggaaatctatgtgaactgtgactrtctacttgcttttttgtttcctctccatggaagacatgtgtactaactgcatgtaaggagtcatatttctgaaatcatttaataccatcaaaacaaatcagtctgttgatttggagaatatatcctatgaaattgagatgtttgtaagtcaaagcagttgaaaattgacaatttcaaatgatttctataattttatatttattcatacatatatgtacatatgtaatgtacatatgtatatataacacatatatatgtatatatggatatgtatgcatatcatctactatacacaaatatacmtatccatatatgtatacatacataaacacaagcctacatatatattcttatgagtgtgcatttgtaaatttatatattaggtggttacatggggagttggttaaattacatgaagatgtggaagaataaatgtaaggggagaggtaaggagaaaaaaaattgaataaagttgagcaccataaagcaatgtaaatacctttattgtaaaagtgtatagtatatgtcaatattttttaaaaagatgatgcatataagaacggtcaccaaaatggtggtggtttctcggggcataaggagatgaatttcacctttttccttaggtgtttatgttgcttaaatttattgtgtcagcaatttttttttgtttgttttaggaaaaacagcaatagggacatttcattataaaacaaaaactatggaaagtttggaaatttatacaaaaaaatatagcatgggaaaaaaattatccttaagttccgctactcaagacaaccactattaacgctggctaaatacttaggatattttatataatgaggtcacatttgacatatatatatatatatatatatatatatatatatatatatatgttaagtaaaataggatacccaaataatgggatattgtttggttattggaatattgggtggttataaccacccaaataatggaatattttatatatatatatatatrtgtgtgtgtgtgtttgtatatgtatatatatactatatataatttcatttttcttttggatgggtataataaccacacaatattccattatttgggtatcctattttacttaattacaccttatgctaaatacttgtttacttctatttgttcactctttgaactaattactaatagcataattcatattttatataaaaatatttgtttatatttcacactattttctaggcatcctctttaaattaagcttttacactgactccaaaggtgtaaagattttcaaaaatcttgatacatattgcaaaactgttttactagcatttttaattgctaaacgaacaggataattactgcagataacatcattcttgattcagacaatgacaatattaaaatcattggatttgggagatctagacctacatttaaccctgtgtagcagttcatttagttagcttgttgaagacgtactttgcaggaagcatatattgacaggtactgcaaacaagaaaatgtatcctttttggggagtatattgtatgtgtacagaacacattagctttacctggaagcagttctgtcgactatattcatggtaaagtgattcggtctctaggtagttgagcaattgaagtgcttaagcattaacaaaaggataattttatcttattttcagacacttaaataatctggccttgacttgcaccatcaatacagagcagctatactatactataagtacctgttggaattgcctaacatacttaatgttggaaaggcagtgccaggcactcttatactattaagattatagaggcctaatggatcactccaccgcactccagcctgggcgacagagcaagactatgtctcaaaaaagaaaaaaaaaattatagaggcctaatggtaataatagtagagtaaaccactattaatcaaatgggccccataaatccatcacatcaattttcaggtatataaatgttctatgacagttattttgttttgtttcaattttaatgctaatcatttacaaataccatgttccttggggggaaaaacaaacaaacaaacaaacaaaaggaaaggcactgtcacagtttttctttttttcttttttttttttttaagctctccaggaaattctcatatacggccatgattgagggccactgagttccaccactggagagtgagtaatctgccctcaaagagttcagtgtctagtaaacagaagtcacccagttcccactgggaaatttctccaacaaccatcaccactactgtaatttttattaagacagctagcatttgtcatctattagtacatgtcatgtacgtcaactctagcagtagaatattatctctgctttgcaaaagctaagagtgaaatgtagtcgacatgtgtaattctgggtgaccagcatccaaatttgggaaaaatcctatgataagtggaggtatggcatgctaacagcctgttgggaacagatattccctctctagtaccatggcccctagagtgtagggcatatgacttaagaacaactaatcagatactcctacccagaacttttggggaatgacataaaagcgtggggtctgttggagattactcaacactacagtggagtccacagtccattagagcagtaagtgtttaattgcagcaaaattggtgtgatgccttatgcaaagcattcctttgccttgcctactctggtttctgctacagcttaatttttaatctttctgtcaattctataaactagtcatctcacttgttaattcctttttgcttaaatttatccaaagtagatttctattatttatcaaaatgaactctgactagtatacaaagaacagggaggggaattataaactatgctcaaggtcacccatctagtaagtggtagattgaattcaaacctggttctgattcctataagaacctaaaagcagggcctgctttgcctccaatcaagataactaagccaatacccgtaaaattcttacctctaccagcggagctatggcatactctttgtgtaaatgagttctttttttcagatacttgtcacacattcaatgggagtcagttctgttttgggcattgtggggctagcccagattgccaggcaatcctacagtcagcagcagatgctgtgaaattgcctaaagtccacgaggcacagcagtctcaacaatgtccagccatcagccatccagatgctgtctctgacaagtaaacatgcaggggcattttcttcttgactccagctttaatatctattctcatcagcaataggaatctgtttcatttacttgtgctcttaggaaatatctagcaggtcttgagagaattataagggtgtgtttccactttaatgcaacccttacattactctctctgctactaacatcaatcatgcttgaagaccattattaagtcatgctgcaatcttcacttgcccagattaaagaatccatctcctctaaccctttctcagaggaatgacctcatggaactttcatcatttcactgctcttttctgagctctccacagtcattaagttttgtatgaatagaaatgatgaataattttatgagccctttatgaagctgtctttgtaggcttgccctataagctctttgaatcgggagagactttacctgtgggtcattcacattagaggaacattatttaatatttaatacagtttgattctgcattaaacatcatttattgagcacttattatgtgctacacagtattctaggaaactttcacatgtcctgtcattaaatatgtacaatggcctttggagaaaggcattgtaaagccctccattttattgaggaataaactgaggtaaagtgactagtaatccggttaagtgactagtgatttagccaagactatatacatatagtcataaaccagaaaagaagttgtgagaaagagataaaaggcaaaacagtaaaaactagttcaggggtatttccccaaccattcagaccaccccacttggtttattagggacatattgagcacaaaattaaaatgaagcattctgaggggaacaggatgccataacattattaactgcctgaaaggcttctttgcccctctctggcacaactggttaggcacatctacttactaatgagcagtttctggtggtgggaagagcagtcgctttcccattgcacatgcagaggagcttaaatcaaacattcattgaagaaaaatccagttagttttcactagccaaagaggtctgaaagctattttagcttaaagcagaaattactgcctaggatttttttggtcagataagtgtgacaatttagcatrtccgtggccgacactgtgaagctgaatgaacagcctaatagcttcacttctgaaaggatctgccaggttgtgagacagtcaggttcttttcagacagggaaattgcccttcttccctatccactttgaccaggtcctgctgctgtaacttctcacttggctgattttcatttctacctgaataagaacagagagacaatttgtgggataatctgcccttatccccaatttaataagaatgaaaacaaaactagccccagggattacaagttaaaggttcactgattccaaagctaatagtaaaagcatcaggaaaacttctcattatacttaaacagagagtcaatcattagacatttcctgtattccaawgtctcctatgatgtcctagttaaatttgagagacacgaaaataatagagaattttatatgagaagttttcagatcaattatattgttccaatataaattctgtttacttctgagcaagagaaagagagcttgataagaagactactagtcagggaaaggaaagtagagcagagtcacagaaaccatatcagataaggaaaagatgaatgacttagagctgtttatctcgaggaaaaaagacaagactgtggacactggtgatggtgcaaaaccggaaggagaatttgaagtttatcactttgtaaagttttaatttttgtgggtacatagtagttttgtgtatttatatggtacatgagatattttgacacagacatacgatgtgtaataatcacaacaggacaaatgggatattcatcaccccaagcatttctcctttctttatgtaactaacaatccaaatatacacttttagttatttttaaatgtactgtgaattactgttgactttagtcacccttttatgctatcaaattatagatcttattaattttatctaaatgtatttttgtacccattaaccacttccctcctacccactacctttcccagcccctggtaaccatccttctacttttcatctctattagttaactgtttaaatttgtagttcctcaaaataagtgagaatatgagaagtttgcctttgtgtgcctggcttatttcatttaacataatgacctctagttctatccatgttgttgcaaatgatgggatattacttttttttatggctgaatgctatttcagtatatataggtaccacattttctttatccattcatctgttgatggacatttaggttgcttccaaatctcggctattgtgaatagtgtacaataaacayaggagtgtagatatctctttgatggacagatttccttccttttgagtatatacccagaagtgggattgctagacaatatggtagctcaatttttactttttgacgagcttccaaactgttcttcatagtggttgcactactttacattcccactaatggagaaagaaggttctcctttctccacatccttgccaggagttgttataccctgtcttttggataaaagccatttaactggggtgagatgatatatcgttatagttttgatttgcattattctgatgatcaatattgagcacctttttacatgcctgtttgctatttgtacatcttcttttgagaaatacttattcagatcttttggccatttttaaatcagattatcagttttttttttttcttatagggttgtttgagctcctatatattctatttatttatcctttgtcagatggatagtttgtaaatactttctccagttctgtgggttccctattcactttgttgactgtttcctttgctgtgcaaaagtccttttttttttttaacttggtgtgaccccatttctctaattttactttgattgtctgtgcttgtggggtattactcaagaaatctttgcccaggccaaagtcctggaaagcttccccaatgttttcttttaggagtttcataatttgaggtcttagatttaagccctcaatccatgttgattttattacctgcatttgattttacaggctcccagggagaagggacttgccttgtctcyaatgagactttgtacttaaactattgagttaatgctggaataagttaaractttgtgggactgttgagaaggcatgattggttttgaaatgtgaaaaggacatgagatttgggagagaccaggggcagaatgatatggtttggccttctgtccccatccaaatctcatcttgaattttaatccccatgtgtcgagggagggacctggtgagaggttattagatcatagggatcattttccccatgctgttctcttgatagtgagggatttatcaggagatctgatggtttaaaagtggcagttttccctgcactctttctcctgccaccttgtgaagaaagtgcttgcttttccttcaccttccaccatgcttagaattttcctggggcctccccagcaatgaggaactgagtcaattaaacctctttcttttataagttacccattttctggtagtatctttatagcagtgtgaaaatggactaatacagrtgcatttttctatatgtcaattacatttttcaactccagaatttctgcttgattctttttattataatttcttataatttttataattttatttattataatttatttattattataaataactttattataatttttatttatataatttatctgataggaatcttaattcactctctgtattatcttgaatttcactgagtttcctcaaaacagctattttgaaatctctatctgaaaggtcacgtatcttaggatttgttcctggtgccttacttagtttgtgtggtgaggtcatgttttcctggatagtcttgatgcttgtggatgttcattgtttttgggcagagttaggtatttattatattcttcatagtttaggcttatttgtacccatccttcctgagaaggctttccaggtatttgaagggactggggtgttgtggtctaagtttttggtaactgcacctatatttgcaatggtaggcactctaaacccagtaatgctatggctcttgcagattcatagaggtaccaccttgcttgccttggataagatctgaaaaaatttcctgaattataaggcagagactcttattctcttcccttactttgtcccaaataaattgagtctctctctctctctgtgctaagctcccaggagctggaatgtgggcatcaggactctgcttggtgccctatcttactgtggctgaaccagtatccacattacaaggcaaagtcctctttacctttccctctcctttcctcaagcaaaggcaaagagtctctcctggagctgtgagttgtactgtctgggcttgggggaggggtggtgcaagcactcccttggccaccaagctggtgtctcactacatcacatgtcccactagtccacttgctctgagcctagcaaagcacaagaagttgccctggaattgcagtccttgtagcctagattgcatttcaagtttatttaggacaccagagatctttagcctgtggtggggagccttgccagaactcaggttctgactgctgggatggacgtttcccctctcgctagagctgcaccaagtgttccctccatgaacaccagctgtgttctgcctagtgttgyctgctgctgtgacagggcagcactgtgttttagtgcaaagtcccacaatcattgtgctctcccttccccaagtacattcaaattctctctttgcactatgccgctaccacctggggatgagggacgggtggcattagcaattcaagactgtctttcctacactcttcctctttcagtgcctttttcagtaatatgaagttaaaactaggtactgtgwtcactcacagtgatttttggttcttatgaaggttcctccttttgttcaatttgctattcttgcagggatgattattggtggaggcttctattcggctatcttgctccatttctctatcatttttaaaatcaaagtcagtgcccatgatatcaacatattatcataaaaagataattatcttttagagaagtgacattccttgtactccatccagtctattttctggtgtgtctttctagaggtccatgaaaggacaggcacagattgagcagtgccaaatcattcagtgagtatgctaccctctattgattttccttttcatctttctggtaatgaagagaatatctcagttctctaacacttcttaataatccttgttaagaaagacaatgagaaaggcccatattaakaggaataaatcaggcacagctaaaattaataagtttattttctatagtatatatatttttacagaataaccttctgtttaatgcaaatgatattggttttctattttttggtaatgataacaagtatcctggttaagtaagttaatttaagtacaaaggtagagttcaattgaagaaaaattatgagtaattaactgtacatgtacaactcagatgatgtcatgaatgtatcaggattttaaggtatcatttgaataaatttcataaatacttgagtaatagaagtactaagaaagtaaagcaaagaatcataaaatctcaaagttgaagatccataagaggtcactgratcctggcttctatccagtatgaaattctggattctacccaaaatcataccaaacagctacaagccacagcttagacatttccacttacaaaaagctgtcttatcaactactcaacttttgctatgctaacaaacaaatccaacatttttcaatggatttcaccagtaacaacaaaacatttgttcttgcacatattatgtgaaggcttcaagtaatctcattctttgctccagatccactgtaaatctgctctacatgacccattcataacctcacgatgagagagcagcccctttgtacaatgcactgcttcttgaagcagggaggaatcaaactcaaagctcctttttggatgcaacctatatcttgttcactcataggggattggccagagcaagtcacatggccagtcctgacaatgatgcctacagggggcactataagttatgtgacaaggaatgtggctgtttaatcctcctataggagtggaaaggaaaacaagagctatgaacaacattacaatatactacagaaccgtttaggctggggacatgtggcacataaataacattttctcagcagggtgcaacttcagacatcaatacttccaattaaaatgacactgagataaagctctgtcatgcctccacataattaaaaaaagcatagataaaataaataaaagttctttcatggaagttgtgttataaccaatgttaacataaggcaaaggaaaaatttagggtattaagttagattttgcttttagcttttttttccttttgtttttcgcatatgcaggatataaggctgatgaaaatatcagaaagagtatggagactcactatagggatttatgtgacattgaaaggatccctttccactctgggtctctytctaagatgccttccagttctgatacrcattgaactaagataagcgatgcaacaaaagctttgtcaaataactaggaagagagagacagacagaaagacagagaaccattgctagtattatttataccagttaaagttagtatattttatgcattaatgattactatgtgtagtagactccctgcaattagtctacagaagatgacaacacagattaggttttactgaaatgggaagtgagaaaaacaaatacctaattataacagaggcattgtggaaaaaaagattgtgcttatgtaaaactctctacaatacaagggaagcatttactagagcatgctcttcaaagtaattttggtgcagtgaaagggacaggggtacaaatcctcagctgcttcagttattagactggcaaccttgcataaattttcaacctctcttgaatataatatgctcctctgtaaaatggagataacaatattttcctctattttaataaatatttattaaatgcctactatgtgctgaatattgttcttggctttgggaattcagcagcaagcaagataaaagtccctgttctcttgatttttatcttataaagggaacacagacagctaaaatcagtggtgggagatctacattaaaccaggtaataagggaagggctctctgagtgaagactctattaaaagagagtgagaaccacagggctctctgggggatgaattccccaatcagaaaatacgggaaatccaaaaactttgaggaaggaataaaggtgttattttaagtaaagaaagttaatgtgagtaaaataatttaaggaatgaggacagtcacaggagatgaggggaaagaggaaagcaagcagaggtcagattatgcagaatctcataggcccagattgagatcacatcttagtgtcagtgaaatgataaaccagaagacagttttgtgcaggagaaatatcttagaaatagtacctcgtacgtaacagtacttaggaaatattaacttttccttctcttattcctcttatggtaaagtagtacattattttagattatctgaacagacaccttgaagcatgaatctgttggaacctaaagacttgtggaaattttaacggatattttgttctctttaacacagagaggtagtggagttatgcaattccctggtgtgactccaatattgcaatatactacggggtgtcccacgtaagccttagaatttcctcctatattattcatcttccaaaaaactgaattgatcgcatgcaaattatcttgcccacaatagcttgatcctacctagattttattgtgcccagtaacatttcactaagggaatgccaagttagctatggggacagttatctctgttctgagggaatatttgaagtatcccttccttccctcaaacaaaaacaggtgccctcatcattgaaattgtctgtgtagaattagggtcacttcttagaaactcctcgttaaaatatgaacaggtaatcttaaatgaatgaaataatataagaatgacatttttgtgtgtggacaaatcaatagattggccagttgttcacctagatggtggttaagatccattcaatacagaacaaatgagtttgatttgggaaaatagatgaaaaaagaatctcaagaggtttaagggttgctggcctagagatccagaggcttgtagaggaaatraaggaaatgacagaaacacaagatttctcatctttatttgcctctgcattcttctacctggaatgttgccctcacccctccaacactcctatctttttaaaggtggagtacaaatgctgctacagtcatgaagcttccctgattctctagcaggaagaatatattttctgatcttctataggcttatctgtgcatcttttatagcactgagcacttcccaccttggattttagttcctactttcctgttttctctcccctaatattataaaaatagcttgaggtagagactaggtatgattaatctttgtgtctccattctctaaatctgggcactttaaataatgttttacctatggtaggcatccaataactgataatcacatagatggcttaaatagaaggaaagaaggaaggaaagaagaggaagggaaggaaagggaagggaagggaaggcaaggggagggaaggggacgagtgagtgaattattaggaacatttcctatttgattgtttctacctagacacttgtgtcatctcagcagatatcaacagcatagatttcccaggctggccaaggaaagaaaagaaaaaaataagtatgtagtttttttctaggaactgctccctaattagtattttcatactagcctacttgatttgattcaaatattagactaatccttctttctccctcagcataatgagataacaagacacgtaacaagtagaaaaaggttttattttccaagaggcatcttagaacatgctctcagtagttaactgcaaacctggtagcgggtaaaggccagggagtgattcatgactcaataacaatagaatgagtaatgtgcttagtggcatgagttaaaataatgttgtagtgctccaaatctttaaagttcaacaactcaggttaagagaaagcaagcaaacagcatctcgggtatctggatgtacaatcaaacaaatgatgaactgagctggaggcagaggagggtttgctcattagaaaagaagaatgaatttaatttttccagagactggaggtatttgctgaacagtgagccacagctgggtagagaagtttaaaacaaacaaacaaacwaacaaamaaaacaaaacagaaagcraatcttgtgtctttcttctgggagcttagacagctcaaaggtcaccaggaaaaagaaaaatgccattcttgctccatattgactctaatactaaagtccctcctgaaattgaactcaattgaacttcatgatcttcagaaacaggctaaaataatgtactgtaccttgtttcttttttatttgttgatcagagtcaatatgtaatgtgaaacaaataatttcatttttatatatcagttgcagctttctgtacacaattagaagccaaaatatactggcttttcacatgtgtatgcatgcatgtatgcataataagcatgtctgtatgtgcatgtatttgttcagtgaattgataaagagcatgaacttaggagtcaacagaacttatttagtatctcatgtttgcatctttatgtcttttgaccttggacaagtcctaaactctccaagccttactttcttcatttctttaatggaaatagaagtggcactacttcatcactgaattgttataattactaaatggggtaagaaatttamwgtgcttatcacagtaaacaaacaataaatgttagcttttataattatattgttatataattcacttaatctttgaaactattttcagttatttaaagtctctatcatttaaagaaaatatcatgctgctgacatttatttacaaaaatttccagttcatcagctagaaaagatggcttgttaggatgaatcagaaaagaacatatttctaaatagttttattaaagcatgttctagtggtcaagacagaaaatgtggcaagcctaataattttatcttgggctaaattttattcccatcctccaagctactttttcttaacctcctcactttatttccaagcctatttttttttccaaatagagaaagactgctgaaaagagggcaaaagagtgagtggaaaacaatatgattcatgtatgggatcatttcttcttgtcgttttatgaccacaaggattgacaaaccctaaaaaatggcaaagggataaatctggaaagaagtcctttgaaggcttttgcagccttaagcagacatgctgtggtcttaaaaggattgagtataatgctttcaaaatatgatgataaggattgatgacaatatttataagtgactattatgtaaaaaatagcttattaactattttatatccattgttgtgtttacccaacaaccatggtgaagataccactatttttaccattttacaaatgagaaaattgattctcagagagtttaaatcctttgtccagaggacatggcagtaaatgctagtgcaggacctgagctctagaaytgagttccaaactgctgcacagtgcatcctatgaatcaggaacttgcagcaaatatgtcctgaggttctactctgctagaygctggcaatatcaagatgactaaggcatggcttctgtccttgaggtgttcacagcttaatacaggagagaaacacatgaatgycagtgcaatgtggtaagctctggttgcagatatgcacagactaccaagtgaacatacagaagaggcaccatcagtggcttggagctatcagggaaatgttctagaagaggtgattaatgttggagctaagtttgcaaagagcaggggaacatgtacatatcaggcatttaaaatgatgaagacaaaaatgttttsaaaaagtatattgggaaacatgtttgaatggtgaaatacaaatttaaggtaagagaaggcaagaaatgatattggataagaggtaaggaccagatcatagagaacctaaaatgttacactaaggatatcagactttgctctctcgagtctaagcaaagggagccattgatgtttttaattagaaaagtatttgaattttagatacattttctgaagaaagtttgagctcttagcatgattactttgtaccaattttgcaaccttgatcatgtttctgcatatatctttacctcaattctttgagaatacctacacctcgtaaggtagtggtaagaattaaatgagttcataaagaaaactacatatataagtacctggcatagagtaattgttaattactattgaagcttggatatcattaatcaagtttcattcttcattatacttttcagagaaagaatccaaagaaaaaatagtaagtgtcatcagcagtaacatttgcatttggtgtgtcccaatccaatttaacaaggggaaaaagctagcaatctgaaagtacacaaatagagatttaatctctttctaaacacgtagtgctacttatacttgtacaatgttgtggattcaagatactacaacccaccaccctcgactccatagcatcccttgcttatctcaaacataatacgcttctattgaattatcaccattgttgcatttgcctataccttttcctggactttgagcaatttgaaatcacattccttatctttgcctccctaaacttagcaaaatttgtggcatatagatggtctttaattcctattaattcaatgagtttaattaaatgcaagtgaaggagaagaaaaaaggaagtccattttgataggctatgtccaaaactgcaaagagctatggcaaagacaattatagagagcagaactgggctagtaaaaatctctctgacttcccctgaaattatgaaattctaaggctggaagaaaacccaagagcaattttccactgaggctatagaactttctgtttaggtggggatgggtactcctgcaagactttttcttgcaagtggagatcagcccagtcttattcacttctagggctcatacaaaatccaccagagaagcaaaacaaaacaaaaaagtccctcaaaactagaatggtcttgtgattgcaagggatttggtctttcagtcrtcctactctacttagatgttatgttagtcctgaaaaacaaatgcatgtgttttcatagaaagtaggcaggcccctgaaattttcatatttttaaaaataatctgatggatctgtcttcctatctctattaggatagaggtccttggcatttcaaggatatgtctgttcttcttgctcatggatgaattgaatctggcaaaacaaaacaaaacaaaacaaaaaacaaacaaaaaaaacacccagaatttccaacagaaaaatatctcaagtgtctaaaggcagagtagcactatttcagatctgactcgcctcttccctgtcatgctaggcagagttcctcaggagaaccttggctcattcttaagtgtggcctgtctactgtgttctgcaaacctgctttcagatgaaaggcaataaagaacctgtctctgggtgaacatatgcctcctttatcttacctacaaggcatcatggctcctggctcctctacaccccatccacttcccaggtgtaacttctgagctaaagagggctttcgaattttatcaatcttgatccctttaggtatggtcataggttctacctaacccacttcattttttttcactttccagtcagataataacttgttattgaaatgacaaacaaaaatttgccactgtagaagcaaattggagattgggcaaggcatgctcatacctttttttaacaatagaggtacagataattcacactgtaatgggaatgcaataattttaaagtctttttattgccaacttattggctcaaaataatactattaaaaatgagaatcattacataacgttaggcagaaaamaatcgcasaagaaacaaaactgatattaatataactaaggatgcataattaagaatagaaaatamcagtaattaaaagccataagcaacttaaaacasttttaatgtttgggtaacaaagcatcctttccccaaattctaagaataaattctaagaattttgtctgtgtcagytgagtttttcaacatggccagaccattgatggtagcaaaatatcctgtggaataataaactgaatcttcaataaacttgaagagaattggtgaattttataattaaaatgccagatattagtaatccttaatattttaatacattaattacaaatggccttttatgcaactgagaatatttccattgttagtcattttattcttagtctactaagaagctcactgagggggttcagatatattttgagaatctcagtcccaaagccatatttactgaagccctaaagcttgcaaggggtcttagagaaaaatagagtaggttgtagaaaattcttgtttcttctcagcttttcccagagcaactatgctttcatcacccacaaattcaggagttccaagggattctcattcacctattgcagcggttcaccatctaatcacaccccatgctccytgttacgagcactttgtaataccttctttagcaccctgaaacaacattttaatataaacttcctatatacataatcttgaaaaatcatcataaaccttaaatataaactatataaggaaatgaatttatattaaaataatgcatactcagtatgtaaaaggctgagcatggctaccttaaaaaaacataataaagcagttagattcttacccttggcaagtttagatttaagtcaataggacaacattaaactgacatagtgccaacactttttcttacagttgatatttttaaagacataaatatgcacttccatgtctatattgtaatgaccaggaatgcaactcctgcaactgcaggacaataaatatataattgtattagagccacaaataacacaagtagcactgtcagcagtgtataattttcctaggtaaaacattattgaytcattgagttcccataaaattttgagataggtactattgctatctccaatttacagctgaggaaactgagacacagagtggctgagtaccttgtcttaagtcatacacagttagtaagtatgggatctgcaattcaaagccaggctgcctgactccagaatccttgcttttaacctttttgttctctctcttggtaaacaagtcctgatgaagctcctaacaacaacaataaccaaagtctactcttccttcaattatcccagttgttgcatgtctggaaaatacagtgtatatcaaaactgtgaaattaatactccatgtcacatataaaatagagttgggttctagactcagatttttacaaatttctttttcactgacatgaatgtctggggagatattcatatccgtcatatgagatacgggacaagtcttcaacatctaggcatctaggaccatccttcacattgcagcatacctgacatccctggccactgtccactaaatgacaattgtacccccactagtcactacaaccatagctttccaaaacttctcctagtgggaggttctcctgctgtcattagtacccaaactctgttgattggagcctcagagaacattttattctatactcaaattcaacaagaggcactctgcttttatccattttatgcactggggtcccaggcaagattttgtctggaaaaataaaagcttttgctattttttaaaaaaagttttaaaactattgctccagagtaggattcattgctcawctctttccactgagcacaatggaaatacctgtttgcacttcctaccatctgctcccaccttgtttctctctgggtgagcacactgctaatgccccagtcatctgtcacaagaaagagttggagtgacagactgctggcttagccagagaactctgctccttgtgctggtagctgtttccttgtcctgactgatgcccactsgacctgtatgtccctctagacctatcccttatgaatccagctagtagggtgccatgtctagtcgccagacctcactagtcctccgcaatgctgaaagactgccctgtcaccagggcttcaggtagagggcaatgcattgtgctggaaggaaaaataagtcggctattgctaatagagtcttaaacttggagtcaggagacacaattctctgccactaattagctatgtggccttcagcaaattcctccccctctctaggtttcagttccttcatgtataaaatgagaaggctatgtttcaggattctaagagcgctttgcatctctggctctcttcatgtcttggatccctacagttgactgcagttagaaaggtagtgtgtatagcktcaaggcaaggtcaattgcacagccagctgaagacgcataagaaatacttctctggtgctacggcttagatttttttaatgttcaagtaagttaccagggttattctgacctctttaaagcatcagcaggagatggcagctcaagggaatgaatggaatggtatgaacaatagcagtgataacaatgctttcaggaaaatgtgttttagaatgagcttttgcctggattttattgtgtacttatccactacatcctccttggtccttttctcttcagaaaataacttgtctgtgaggttgcccaaggaataataatttttaaaaaggtgaatgaatgagggtctgagagaaagagaaaaaaactagggcagaaagaattttataaggtgacgattgatatgccatgtgttgcttctcagaaagaaaatgaaaatgctatagtaaattctggaaagatgccaaatgctattgtcaggaaatagattagagaacttcacaccaaattaggggccaagctcccagtgaattattagcaggttgcatagtaaaaagagcccagagctgaaaacaagaagcttcctatttgagttctaggttagtctcttactaattgggtgactttgtgcaaagctcataatttatttttagctgccaatactttgtatcataattcctttcccaatttaaatattattaagagtctaatatctgaaatagataaaaggagagcaactctagggcccctgcttcttcctgcccactgctttctrtgatggcccctatatcacctcctcaagaatcttaaggatatttgaataccatcagattacatcctccctaaggtctctttccaaggtattccttcgtgtactcaccaaacatttactgggagcctcattgtatcagactctctactaggcattgggtatacaagataacatcatacctgcctttcaaagttttgtgcaatatttaccaaatagctttctaagtattatctgctttttcagcagagtgcttccagaaaatgactgtgaaggccagtgaatggcagtatttctaaaacgtcatatttcttcatataaattattaaactggtgtctggtttatacattartctcctgatactaatgtgatctcatcactaaaagagtatggtgactaataatgaatttcagattttgcaagtctatgaagaacttaggtcatggtgaaaccactctagtagttaaagggacacaactagcttaacatgggacttggcagggtctcaatgcagycagcctcaacatccatatttaataatcttttataaagtggtccagtggtccccaacattttgtgktgaacatttttagatacaaaaaaactattttttcctcatgaaatttatttcccacagaatttaagtgatcaagatagataatgaaactcagtaatgtcattttgtgtccaaagaaaagaataactacagactgttatttcctgagcctcctcaactggctctatgctattactctgaattttttttttttttttttttgccacggacatattcatagaatagttgtctaagtaaaaagtagattgtactaaagaagcaatatatatttggaaacatattgggacctgttaaaaaggtagtttaattactttgtgaaatgtgttagtaaatgtggcagtttaaaaacatagccacaattttttgacactttccagaaaaagaggggagtatattttatccactattgagtctgggcaggctgtgaccacattgaccgtttaaatatggttagaagtgagtatatttgatttccaaagctaggtcataaaggccacacagcttccaccttgttcactggaacatttgaatttggagccctgcccaccaggtaataaattcaaatacccttaggcgaccatgctttgaggaagcccaaatgacatgaggataccatggatatttgctctgttccagagtgtcagctgagcccagcgcttaaatcatcccagcccagttttcagatgtgttagtaaaaaagtcttccgaggattccagcttcagccattcaagtcacatccaggttagagtcttccagctggagtctttccatctgagtccctagatctcatggaaaagagacaagccacctctagttggccttgtctgaattctttacccgaagagctgtgaacgtaattctagggtcattgtcttatgccactaagtagtgagtggtttgttatacagcaatagataaaacaggtaaccagatacaccagatgaggtcttgattaggtaccctctcagtgacagatgtagttcttatcctttagcttaggaatgcagaaatcttattaggggatactctgtcaaactacagagagaagacaaatctggtttggaaacaaggaacctttgcaaagttgtccatgagctaggaattcagtccctgaagaacagcaaatatacttttagatttaaataaggagtctagagctgagaaacacagattgagtggtcccacaatcatctgcatattctttgaccctgattgatgaggcagcctgaggtgaggctatagttcaatatggtcgaatattaatttgcacaaataaattcatttaaattgaaaccatcagatggccaactctccaaacaccaccagatactttaaactagatctaagacagctcacctctctaattttacaaagtgctggaggtgggagccaacaatcacccagacaaragaacagattttcctcttttggcatattgctaatctagtctcaccactggatagagacaccataactcagaagacagaggagaggctcctggatccagtctctgtggtaaaatttaggtatttttgataggttttagagaatgattcagcaaatttattcttaatgaatatttcaaggaacctattttgaaactacgatgctttcctggccacatttttttcttggtgttccttttgccttgacaagtcctgcttaaatggtatccaaactgccattacagtcaaacacaggtgcttctggcaacttttgagaatttatttttctatggagataggagaagaggagaggcatccagcagactactcaaaatttgaacaagttttggactcaggaaatatgcacaattgcttatttttctacgttagactcttggaaacctgtgagcaaaatagacctccttgactctcagaagtcatcacctccgactgagaaacccatatcctggagctgcaggatgaacaagggttcaaagagaaacctgtatgaggccagtaaatcaaccctggagaaaaaatggggtgatggatttcacagtggcttgccttcccatccaaatatcctctctagataatacagtttcctctgtttaataaaatataaacccattgcttaacatcatatggttcccacctcccaataggggagacttcttaaccctaaagaaaatgccacattgtagaggggggaaagaaaacaatctattttaaccatcctaccttaaactcccaaaaccataaatcctgctaaaataggacattgcatttaaaagctacttgggctaagctaaggagcaagcactgcccattggtatccatgatgaagtagttagtatatcccttgacatataagaattttaaaatttcaaatgaaatgtagcaatgtctgctgccttcctagttatatttatttggcctagtatgctcttctttatttaattctagttgtatgagactacagtttgaatagatttccatgtcttgatttaatgaaaatttcccatttaaaccaaaaggtccatcctattattggtcttttaaactcagcaggcttacctacacacaagaccatgaatgagagataaaagcaagccacagacagtatccagcagtctagaaaaatgcttcagacttctcccagtttattttcggatcactgctcttgcatttggctctgcttctttggtttcctaactctattccctggcttccacattggctcctggacctttggaatatgccactccatgggggctgttttgtagtttccaggtctttactttccatttggtattcactgaaccayactagctgattaaaccctagaatagttagcattgtgactacagaaactggctgtggagccagactgcctgtctttacagcatcttccactgcttcttagccttgtgagcttaggcaagatgcttaaactctctgtgccttcatttccttaacttcaaaatggtgttgatgataatactggccttcaaagttgttgtaagaattaagggagattttatagttaaagtctatagtacagaacttaactcatagtgagcacttaataaaaatcagctgctattgctaattctgaccgacsaacaatgggaggggaatttggagaccttctgttaatgtttcctaaagttttctacagcactctaatttcttaagggattaatattttttataggggagaaagacctggcataaagcatgttaggaaatgctaggttaaagtcaatcaaaatgatttcttaatatcgaactgctcagaacctttcttataaaataggttgtccctgctccttgaggtagaaacaaggtagaaactactaataagtggtgggtccaaaattcaaacccagggctgttgcctctacccagtcctcattcactgacttcttgtatcactgagcgcttctcctaacaatttggagtgttttactctctgaaataattagtgagctatgagttgcttctctgtttcataagtgattgttatcaattatggaattattaacaccccttcccatctgcctctaatttccagctaagaatgttaattaaaacacaaatccatccaagaatttggggaatttattactgaagatgtttaccaatgactctagtaaatttattcagtaaataacagatattgatctcacatttcactacatgtcaataattcttcctgtagaaaattatattaccccaatcacaatgtgagggagctaggggtgtttcctttccccagtgatttatctcgttcacctatttgcctcagaactaatatatattttcagatttttatatacatctcactgacatgcaagctaatgaagagacggtgtaccacctcaatggccttactaagttattggagcagaaaatagaaataggctagttacagaacttgagactttaggattctagcaaccagatgcctacctctacaccatggagggctaagaattggagaaaatagccaaatttatccccagtttattcttaaaatcaatgctctcgcatttataaggagtactatttaagagyagttcccccacaccaagctgctttattatacccaattcatgtcagaaaagaaacctggcaccatagctacctcaagccaacgattctttggcaagtggcagctaatcacctccaataaccaaggcagaattagcttcaaaagtcatcataaagctttttccatgttttgcaatttgagtgctgagaaaaggctgcaggctcttaacattgctagggttctcagactgcttagggcttagttagctctgtcccagggcaccttaggatagtcattatgagtcatatcctttattcctgtcactctcattcactggactgaacactagttcttccaatcaacaaacatttacctgatgcttgtccatttattttttttctgtgcattttcccatcatgttcttttgtccatttctggtcttctttacaaatactttccattatactctctgcaacctatgttccaaagtaaacaacccctatcccatcacatcctccacctcttcacagaatccctctatctcctgctctggccacattaataaagccttttatttgtctatgaggttagataagtgggcattcagcattaactgtgcatcagacaatgttctgaacataagaatataacctgcttcttcyccaagaaaatccttctctctatactccaatgtcataaagtccatggccattatccctgtgccctttgctgattgtagatctttagttcattggtctgcatrcaaagccctttcatcctttgaagttgaagtcatcccactttaccacctctcctctacctcacattttcatcatttagagattttctagatgaagaagrtcttcattttcatctactaagcaatttgaaacatgcttcacagtcttcctctgcttctggtttctgtcatcataggaatgatttagtcattcattttttcacagatgtttagatagctcatcttactatctgaccatatatataacatcaaagtcctcaatctcttccaggacaacagattgtatcaactttccaattcagtccttctcactatgcccctgacccagcaagtactgcagttcctccctctattcttttttttatcctttacttcacctccctataaaacaaaaacccaatgttccatattaaacttagatccattcagcttcatttattgccaacatcttcaaagttttcaaatcctacttttttttttttttttttttgctagtgaacacactgtaacttttcattaatgtaaccctctctctttttttctcctgaaccatggcaggttacttcatttatagcacatggttttgtgaactggtggmcctacaagtaagtaatgttaataagaccctcagtaccattaaaccaactctttcatcctgtttctggtcaagtcccctcaatgtccccacagtgactaccctatacattttaagtccctccttcccaatgttgctccactcctctctcagcagaaggctcacgactggactgtgaattgggtatgaatctcacatccaccattttctagagtgtgtaaaactttgagtatggttcttctttgctgtgccttggtttgcttatctaaaatactgtgattattaaaaacatggaataaaaactgacacaaaattttgtgtctctaaatattaatattgtgagttcctgaaaatgatgatggtgatggtgatgaaggatttgctgttcatttaacagaaaaaaattctcttcattcctttccccatatctacaaatatccttccatttcttcattcatttaggtagagatgatactgcacctaaaactaacccttcgatcactgtagttatctagaacccttaagtcaaggctgaggcattgctcagttttctaatgttcttctactaatttctgtatcttttctttaaatctttattttttagttttcaacatttagattacactctgcattcagcttttttgtttctcattttttcactcaaaatatattacaagaacattttctccaataatttgaaagtctttctttgaaaataacatttacaatggttgtgactactctgtgaatacaccataatttatttaattgtgccttctttgttcagcataaagattgtttccttttttccttattataaatgattctgtgattattatctttgtacataaatctttatctacatctctgattatatctacagggtggaattctatatgtagacttacagggtcaaacactatatttttcaggctctttacacacattatcaaattgcttttcagaaagattataccaatttatacacccactagctgtgtatgaaagagatagtcttaccatatctacactgtcattaacaatatttcctgctaaattttcaactcttccctctctactggttcttacaaggaggctaaaaatatatttaagtgttttacctactaaaaacaataattttctcccagtgtctctcttcggataccatcttatccttcttctcttcacagccagatttcctggagagtgattagtctttggccttggtctccatcacctgatcttcctattgtcatctcaattagtcttttacctcgccacttatcaaatgtyacctctgaccttctaactacaaagcccagcagattcttcttgtcattttccacacattacctttatgtatgtatcactgttaaatatttctagaaattctcactttctttggctcctatgacaattttctttttgtttttctcagtcttctttattttttccccaaggctacttagtattccatcttttattccttctcacatttcttctggattatttaatctgcattaatgactttggcaacaacctgtggttgataaatctccaaactmtattttagtacaacttcttccataaaccgtagcaaattatgtaaaatgtccactggatttctctaagtggatattctcaggaattaaaggcctaaaaattctgaaattaaatttactccatacccaccaagccttctactctagtattgacaattttggtgaagagcactgctatctctgcctgtgtttcagaaagaaatctagaagtaatgcatttacctcactgttcttaatgaacagtcaataaaatctcacaaaataatgtttaatmcctcacaaawaattcttgcaaacttttcagtcctatctctaacarcacctcttatctccacaacactctgaattctttccatttaacttttcttctagattacaaagcacagaaacctgactcatgtctctacgacttttcattttgttttcccataatattccatcaacaccacacatttcaccaacccacccagccaagaastattaaatttttagaatcagaaacatgaacaatattctaatcaagatttcctgcttgctcaggtagaactggccattctttctgctgtgcttgaaattcaacacttacatatcccttcctactcagttctagaagacttctttaaatttatttatttacacattttcctcagctatattgccaaacctttaatggaagtattatgtcagggtggtgtgtgtgtgtgtgtatttccagggaatttcttaagggatatagaatttatctcagctttctgaaatcaacatatcaaattaaaagtgtttgtatcttaggaaaaaaaacacctcatttataaacttctcttttttggtctggttacaccatctcatggaaaatagttgttcatctctgtctgcatcacatatatttctgttgaaattaccaccatgtttctctttggtctccacctgcaccctttcaacatttctgctacaagccctgccttatttcgtagtattttttaatctgtatagtaggctggctccttgaggacaagttctttaaagcctagcataatagattctcaataaatatttgttgagaaagatgaatgttagaaattataacagaagatcaatataatgaaactattatcaaaatctactgaggaaatatttccattccatccaaaaaaaaatattttttcactaaacaaaaaaataataaaatccccaacaatttataaaataactgttttagrctatagaaaacagacagtgtatgatagtgatccctaagagatgagaaatgaggaagtacatcgtgcagttttgtacagcatactgcttatattctctgtaatggatgaaaacccaagcaggaaattaggcagttcagatgacagatcagtgaaagtgcagacacagcaatagaatctgaccacaatgaagcaaagagagggaaaaatgaagtctcagaaacatatagaataatatcaagcaatacaacatacaaataatttgagtcccaagcaaaagaagaaagagtaaaagggccaggcatcrcctgtaatcccagcactttgggaggctgaggcaggtggatcacctgaggccaggagttcgagaccagactagccaacatggcaaaaccctgtctgtataaaaaatacaaataattagccaggcttggtggcacgtgcctgtagtcccagctactcactcgggaggctgagacaggagaaatgcttgaacctgggaggcagaggttgtagtgagccgagatcatgccactgcactccagcatgggcgacaaagcgagactccacctcaaaaacaaaacaaaacttaaaaaaaaaaagaaaagaaagaagaaagtaagaaaagaaaagaaaaagtaaaagggggtcaaaaaacaactcatttgaagaaacaatagctaaattatggctggcatctttccaaagatgagcaaaaccataacatcatatacctaagaaactcaacaaattccaagaggaagaccataaagaaaaccctaacaaagcacatcttaatcaaaatggatgaaaaccagggattaacaaaataatctcaaaaagtttgctgggcatggttgtcctcgcctataattccaaactttgggaagccaaggtgggagggttgcttaagcccaggagttcaagaccagcctgagaaacatagctaaactctgtctatacaaaaacattttaaaaattaaccaagtgtggtgacatgcacctgtagtcccagctacttgggaggctgaagcaggaggatcacttgctcccaggagttcaaggctgcagtgagtcatgaccatgccaacacactccagcttagatgacaggtraggccgtgtctctctctctctcattaaaaaaaaaaaaaaaagaataaaagaaaaaaaaaaggaaatagccaccagattaaaaaaagtcacattatgtaaaatgtgatcaaatgactatgatattctccatagaaaatatttaaacaagaaaggtgagagaaaattttaaactactgaaagaaaaactgtaaaactataatttgacatccagtgagaatatattttcataagaaatgtgtaataaagacctttgcaagcaaacaaaagctaagaaaattagtcatcaacacacttaaagaacactgaaagtttatggaagttcttcacacagaataaatttggatctacracaaaaagattaaagagttctagaaatagtaaatatgtgagtaaatacaaaacacactgttatggactaaatatctgtgttctcccaaattcatgtgttgaagccttaactcccattgtgatggtattagaagatggggttgttgggaagtaactaggtttagatgatgtcacgaaggtgaagaccccatggtgaaattagtgtccctttaagaagaggaacaatgaccagagctatttctctatcatatgaggacacagaaagaaggaaacccgctgcagctgaggaatggggcctttacagtaatcaaatctgccttaaacttgatcttggactttccagcctctagaattgtgacaaataaatgtctgtcatttaaaccactcagtctatggtattttgttacagcagccctagctaagagatgtattctttttcatttttaacttttaaaagataatcttgtatttaaaataaaactaataatatatgttagagtttataagatatggagaaatgaaatatatgagaaaaacagcagagaggctagaatgggggaaagataaatttactgttttataaagaacctataaatcatgctgctataaagccacatgcacacgtatgtttattgcggcattattcacaatagcaaagacttggaaccaacccaaatgtccaacaatgatagactggattaagaaaatgtggcatatatacaccatggaatactatgcagccataaaaaatgatgagttcatgtcctttgtagggacatggatgaaattggaaatcatcattctcagtaaactatcgcaagaacaaaaaaccaaacaccgcatattctcactcataggtgggaattgaacaatgagatcacatggacacaggaaggggaatatcaccctctggggactgtggtggggtggggggaggggggaaggatagcattgggagatatacctaatgctagatgacaagttagtgggtgcagcgcaccagcatggcacatgtatacatatgtaactaacctgcacaatgtgcacatgtaccctaaaacttaaagtaaagtaaagtataataataaaaaaaaaagaacctatgatcaagttcttacactaaatctaaaacagtttaatgttatttgtaggtagctaaagatgtgtattgtaaaccctggcacaaaatttaaaaaaaaaaaaaagggaaagaaaacacaaaagagttatagctaacaagctaatagtgaagataaaatggaatcataaaatacaactctaaagaaggtgggaaaaaagggaaaaagaaatgaagaacagatggtgtaaataaaatttaagcagcaataaggtagatttaaacccaactatataaataattttattaaatgcaaatagcctaaccattccaattaaaaggcctagattgtgagatggaataaaagaaaaaaaaacaagacytaattacatgccatttaagtaagccatgtaaatacaaagacacgaagtttaaagatatggagacataaaatgtatactaaaaatagcagagaggctagatgtgaaaagatataccatgcatacagtaatgaaagtaaggctagagtaactttagtaatatcaaagtagacttcaggacaaggaataggaatgggtattagataattatcagaggtcaattaataaagaagtcataaaaatcctaaatgcacatgtacataacaaagattcaaagtatgtgaagcaataactgataaaacctaaagaagaaatggacaaatctacaattatagtaggatattttaagactgttctatcagcagttgttagagcaagtagaaaataaatgagcaataatatggaagacttgaacaacactattgaccaaaatatccttattgacatttagaaaatcttcctccaaaaattttcttgaggtgcatgtaaacaattttcagtaaatattaaatgatttaaatcatacagagaatgttctatgacaaaagcaaattaaaatgaaaattaaaaatagaactataactggaatatttccaaatattaagaaatttttaaatcctacaatataattcactaataaaagagaaagctacaagtaaaattataaaatttgttcaaattaaataaaaataaagatataaaatacaaacatctgtgggatattgtgagaccagtgattaaaaggtaatttatagtactgagtgctaatatagtaaaaaagaaatattttaatcaatgatctaagctactaccttaaggagctttaaaaagaagaaaaacttatacacaaagtacactgtaggaaggaaatagtaaagataagattagcagtcaataatataggaaatgaataaccaatagacaaaaatcaatgatttcaaaatctgctcccttgaaaatgtccataaaattaataaacttctagacagaattataagaagaaaagaaagagcacacagattacaactacatatttcagacacataaaatgaataatcagggaatataataaaaaactgtatgtcaataaattaaacaacattgatcaagtgaacaaactccttgaaagaatatagctacaaaagtcattcagggaaaaaatagaaaacttcaacttcttatcaaaagaaagtaatgggacatgttttacccacctaccacaaccaaaacacctgggcaaaatacatgaaaggatgcttttcaagacattagacaccagacagtgaatgataatgagtttgtatgctttgatatttttcatctttcaaaaaaagaaatttctcacctgagagatattgtgaggtgagattttatatgtgaaaatctctaagataacaggtaccacaatcaatgtttccttcctctctccttctcttttcttttctgacaataattaactttcatatgccaaaataatttaaaggcactaaattatttgtgagactgcgaaagtgttccccagaatagttcaggtctaaaactagtactgaacgaaatttaaaacaatattttgattgtgttgccttatttcttaaacacacatacacaccacaaagccattccaattttaatgatgtactagattcccaggttcatccttccatctcttcttccctccctccctcctgtttaagctaaataagtcaaagttctttgaccattgtctcgccatgaccaaccaaacttgggtaattaagtaacttttaagaataattttatttcatagggaagaaaagcagtctctgaagcctccattggttccaaacattttagcayttgtcaggttaaatcaaaatatgtgtcactctctttcagtctacatttaatcattatattacattaatcagtctacatttaataaatataatttaaaatgtaaattcctgattctatttctcaggaacctttttcatttctttctgggactgaacataaatgaaattatgaaattaattatttgaatgcagcctcagaagaaaagcctccttgtaatctggctccaggtattttataatactccatatatttggataattgtytccaggaaaaaacccaggttttggaattgtaaagttctgagactaaatctaacacttaatagttttctgaattgctgaaccaatcccagtctcaggtccataatctgcaaacaacacatcagccctgctatgttattcaaaagattaaatcagaagagcctaatgaagtgcttaacacaatgtgtggcacaaaacctctcctctgtccttgcctctcaatttctttttcctttttcttttttcttttttttttcttttttyttttttttttagacggagtctatctctgtcgcccaggctggagtgcagcggcgcgatctcggcttactgcaagctcagcctgccgggttcacgccrttctcctgcctcagcctcctgagtagctgggactacaggcgcccaccatcacacccggcttttttgtatttttagtagagacggggtttcaccgtgttagccaggatggtctccatctcctgacctcatgatccgcccgcctcggcctcccaaagtgctgggattacaggcgtgagccaccgcacccggcctgcccctccatttctttctaaaaatatatgtgcagttatttaataaaatgtatgcatttcagtaagcaatatatactcattaaaaaaacagaaaaaaatattatattaatgttaagaaagggactattcaaaatattttattagcaataatagatgtagaagtgagtcatactgtatgcagttccacccttcctttcctgtctgtccagattcggctttcttccaaattcatcatatacatttcaaatgaacgtggtgatgtttcaggaagaaatctgtatgtacaataactttgtgcaacagtatattttctatttttaaattgtactttcaaagttgttaagatttctaagacatgattccatcatttctaattttcatccagattgcaattagtatcatcatatggcgtatcarttatacaacgttatacctcagcagcataaatcacaactctagctgcagctataaatatcagtcttcaaactgtgtgtacattttcaaaatacactacagcagcctgattctagaaggctttccttttaaattgttttgttgtctgttttccgctgtttaagactttgcagaaaatttattgaaaatcccccacacatatttccagagtgattacaatgamattataataaaaaagagaatgacacagatggctcagttctttctgagttttgctatcagattaaaagagtttatttggaaggatgaattttattttgtaaaaatgaatgaacaataataaaatgacaataaatttctacttttctactaatctttcagaagtaacctaaagctgcatcattactagccattttcattagtgttaacaggtcaccaactaggcaagctaggaatttgttttgataactttcaaaagaatgaaataatttttaacaagaaaaacaaagagggctaactctaccttattccaaggttatcaacctactgtgatacactcatgtggtactagtttaaagatgaacaaacagatcaacagaaaataataatccagaaatagatttacttatatagggacaagtgatgtttgacaagggtgcaaaggcagttcaatagagaaaggttggtcttctcaacaaatcttggtagaacaagtggtagccacatgcaacagaacaataaaacatctttgatctatatctttccccagctgcaaaaatgaactcaaaatgaatcatagacttaaacattaaacctaaaactaaaatttctaaggcaaaacactggagaaactcatcatgattgtggattggtcaaacatttcttagatacaacacaaaaacataatctataaaagaataaaaatagctttatcaaaattaaaacttctgctcttcaaagaaactgttaaaaataaaaagacaagmcacaaagctacaaaatmtgcagatattttcatatgtcaaatatcagaattttatcaaaatctataataacctctcaaaagtcaataaaaagaaaacaactccatttttataacaatgagaagagttgcaaaggaactttataatattagacatatggatggcaaataagcatatggaagaatgtcaaacattattggccattagaaaagtgtagatttcagccacaaacaaaaratgagatcttactaggtatctcttagaacagctaaaattacaaagactgactgtaccccaggttgacatagataaggaggaaatggaactcatacactgctggtgggaatgcaaaatagtgtaatcaatttsgaaaacagtttggaagctcctttaaaagttaaatattcacctgccatatacatgatgtagccatttcactactgggtacccaagagagggaataaaagcacatgtcaatataaacagttattaatactcgtagcagatttattagtaatggacaaaaactggaaacaacaaatgtctatttagaggtgaatattttgacaaattgatatagccatacaatggaatactatttggtattaaaaagtaataagctatcgatagaagcaaaacatatacaatctagaataattattctaaatgaaaaatgtctgataaaataggagtatactttgtaagattccatttatataatactataaaatagtgtagtgagaaaaaggaaatcagtgtttgtcatttggaagtgacagggaagagtgggcgagcaaattataaaaatggatgaggaaattttaggattgcttgatattttcatcatcgtgattgtgctgatggtttcatgggtgcatacccacataaaaacttatcaaattgtaaacctgaaatgggtacagtttttctatgtcagttagacctaaccaaagtgctaaaaatattatatatgtacaccacatgtgtgtttacttaggtgaactttgtacctgtatttaatctatattatgcagcacttaataattaaaaattaattttattaatgagaaactcttaagatataattttaacgtagttagcaagttgaaaatatacagaatcactgggtagaacaaaatgtgaakaaaacacaaagaaaatatgaggaaaagcaatcagcagtagcataaaaaaattttaatatcagtaagatatcaggagagggttgcagtaagatggctgaatagaagtctccactgatagtcctccccacaggaacaccaaatttgacaactacccacacacaaaaaaacacctgcataagaaccaaaaagcaagtgagaaatcacagtacctgattttaacttagtactgttgaaagaggcactgaagagggtagaaaagacagttttgaattgctaatgcctccactcatcaactccctggcagtggctacgtggttcagagagaatctgtgcgtttgggagaaggagagaaaagcgattgtgagaattcagtgctgccaacactgggcagaactcagatggcacccatggaaagagcatttagattagcccagccaaagaagaaatgctcattgcagtggtcagaactgggaagcactggcactgcaggctacagtgctctggggtcctaaatatacttgatgtgctgtctaggccacaaggactgaaactcctgggcaagtcctagtgttgtaatggactcacagccagaggacttggggggtatgcaacctcccaagtaagatacaagccaggcaagtaagacacaagccagggtggctaaggggttttcttgcatcacccttcccccaaccacaggcaatgtaactcgtagctctgaaagagatctcttccttctactagaggagaggagagggaagagaaaagtcgactttgtcttgcaatttggataccagctcagcctcagtaggatagggcattgggcagagttgtgtaggccctattccaggtggacccagtcctggcattattcatcacctgctgatttaagagcccatggccctgaataatcagcagaagtaaccaggtagtacatgctatgggccttgagtgagattctgagacatgctggcttcaggtatgactcagcacatacacagctatagtggctacagagagaaaccctttctgcttgagaaaaggtgagggaagaataaaggggactttgtcctgaagcttaggaaaaagctcagccacagtggaaaagagcaaaaggggctctagggttccccaattccagtccttggctctgggatgacatttccggacattccctgggccagaggggagcccactgctctgaagggtgartcccaggcatagcagtattcaccataagctgactgaagagcccttgggtcttaagtgagcatcagcagtactcagccaatactacttgtgggcctgtattggtggcagacatgggaagagacacttctgcctgggtaaacaggaggaaagaataggaaaaactctgtcttgtggtttcagggtcagcttaaacgcagtagaatagagcaacaagtagaattctggggtttctgactctgggccctggctcccagacggcatctctggaccaagctgggacatggtagaactcatcaccctgaaaggaaggaacaagactggctggcctcacaatgtgctgattgtggagccccaaggcyttgaaccaacataggtggtagcccagtagtggttacagtgagccttgggcaagacccagtgctgtgctggcttcaggtatgacccagtgaagtcccagtggtgctggctacccctaactcagctccagtcagctcagcagaccctgttttgtggggagaaagtaagggaagagaactaagtggttcctttgtgagtctacaagaactacagcattactggacttggggtgatccctaatgcagatatggctacattgacaaaaaacttagattataatacccaaggccttgtgaatacttcaaaagccttcccaaaaaggatgggtagtaacaagcccagactgtgaagactacagtaagtacctaactcttctatgactagacactgatgaacacacacagcataaaatggtccaggaaaacataacttcaccaaaagaactgaataaggcaccagggaaaaatcccagagagacagagatatgtgaactttctgacagaaaattcaaaatacctgttttgaggaaattcaaagaaattcaggataacacagagaaagtattcagaatcatataaagtaaacaaataaattgaaataattttaaaaaatcaagcagaaattctggagttgaaaaatgcaattaacatactgaagaatgcatcagagtctcttaatagcagaattggtcaagcagaagaaagaattagcttgaagacaggctgtttgaaaatacacactcagaggagactaaagaaaaaaaattaaaaagaaaaaagtatacaagatctagaaaatagtctcaaaagggcaaatctaagagtcattggacataaagatgaagtagagagattaataggggtagaatgtttattcaaagagataataacagagaaattcccaaatctattcaggagaaagtatcataacatatttaaagtgctgaagaaaacaacaagacacttttatcttagaatagtatatcctgcaaaaatatcctttaaacatgaaggaaaaataaatgttttccagacagcaaaagctgaaaacaccagcaacaccagacctgtcctacaagaaatgctaaagggagtacttcagtctgaaagaaaaggatattaataagcaatatgaaatcacctaaaggtacagaactcactggtataggccgggcgctgtggctcacgcctataatcccagtgctttcagaggccaaggtgggtggatcacctgaggtcaggagttcgagaccagcctcaacatggagaaaacacacatctactaaaaatactaaaaatacaaaattagccaggcatggtggtgcatgcctgtaatcccagctactcgggaggctgaagcaggaaaattgcttgaacctgggaggcggaggttgtggtgagccgagatcacgctattgcaagcctgggcagcaagagcgaaattccatctcaaaaaaacccaaaaaaacaaaaacaaaaacaagaacaaaaacaaaaaacaaaacaaaacaaacaaaaaaaaccaactcactggtatagcagtaagtacagggaaaacacaggatattataacactgctattgtggtgtgtaaactactaatattttaagttaaaagataaagacatgaacctataaaataataactagaacagtttttgtagaagacatagacagtacaataagatatgaatacaaacaataagacgttaaaaaatggggagacaaagtatagacatttattagttttatttttgcttgtttctttatgtaatcagtgttaagttgtcatcagtttaaaataatgggttataaggtattatttgtaaacctcatggtaatctcaaatctaaaaatgtacaatgtatacctaaaattaaaaagcaataaattaaaacacactaccagagaaaatcacatacactaaaaggaagacaggaagggagggaaaaggtacagataatagaaagaacaaataagagctagtactggatagcacaacagggtgagtataatcaataataattgtacattttaaaataactagaagagtataattggataatttgtaacaaaaaggataaatgcttgagatgatgaatactccatttatcctggtgtgattatcacacattgtatgtctgaatcaaaatattccatataccccgtaagtatatatccctactatgtatccacaaaaactaaatgttttaaaaaaatcaataagatggattattttatagccaggaaaaataatttctaatctaatttcaattgtactattagcaaagactcaaaataatgctaatatccaaagttgataatgtgttcaaacaggctgggtaggaatatcagtaagtataaatcctgagaaaaacagttttgctatgtataattatacccttaaacttgtgcatatcaagaaataatttcacttccagaaattgtacctgagaatagtcaataaatgtgcaaagatgaaatatatgtatttcatctttgatcattatttgatcatggcagttcttcttaaagtggtaatcagcccaattatccttctgtgttcaccagtgagacactgcctaggataatgacaaatgtaggtctattgtctaaaatatacattcataataccctgttaagtgaaaaatgttaaaactctttagagtataatctcatttttaattttaaaatgtggtgtcaatgtatacacactggaagaatattgagaggagtttgtatacatacatacagagagaaaatgtcttagttatatatataaactgttaacttgaattatctctagttagtggaaaaagtgattattgttttccttcttataatgtaatagtatcttattgttttataatgaaactgtagcatattttataatcagaaaaaaaattaacctacttttcttttttttttctttttctttgagacagagtctcgctctgtctccaggctagagtgcagtagagtgcagggtgtaatctcgtcttactgcaacctctgcctcctgggttcaagtaattctcctgtctcagcctcccgagtagctgggactacaggcacacataccaccacacccaaktggtcaggctgatctcgaactcctgacctcaggtgatccacctgcctcagcatcgcaaagtgctgggattacaggcatgagcccaacagccaacctacttccattttaaaggaaataataaaaacaataaactcccatttccattttgaaaaaaaaataaaagcaaagacaaagtagcctcaattttatggatattatttttttttctcaccagaagctctttatctaaacatcctgcactcattcaataatatacaaatttaaaatcattcaagccttagccagtctacttaacttatagtcagtgcacacaaagaaagtgctatggtttaaataaatccacctaaagttcatgtgttggaaactaatcctcaatgcaacagaggtgggatcttcaagagttgactaggtcatgagagttctgccctcctgaatgaaaatttgccataatcacaggaatggttggttattcagaaattgggctcctcataaaacgatgagtttggtctaacttttttttctccctttgacctacaagcttgcttgctcttttactatgttaagacacagcaagaaaaccctcactggatatgtcccgtcaatcttggatcttggacttctcagcctccagaactgtgagccaaataaatgtcctttttttgtaaattaccctgtatgtagtattctgttatagcagcaaaacatggaataaaatagggaatgtagaatgaatgcaaaaaaaaaaaaaaaaaaaaaaaggaaagatagcaaacatttccatttacaaggaatagtaaagctaattgcacccaatttccatctcagggtctcaaattgttaatgtcatgatgcatattcattgtgtttacacttttggccttgcccctcacttaggtaaactctccaaaatggtgctgtattattgttaagtagtgcttcagctccaattccagtcttcattagatagtggctctttcattcctgtgctgacagcatacttttattatatatctctgaaaatgtgagctgcatctacagaacctagcaaagttccatgcacataagaagtgctcaagtaacataagtgaaataacttaatatgttgaatattttattgactatatctaaatgccccctaaatttaattgaaatacttgatacaagtaaactaccttgaataattgaatttattatttaattatggttaatttagtctggcttccttcctgctgacctatcctttagatccacaagtatttcttgggtgtctcctctgaagaatttgcagtgccaggtggtggaaaattaacagtggttgagatgaacagagaccacgtaaccataagccgtattttctaccgtttaacatacacacaaaccaatatttggccaaagttaacacaaggttgatatatagaattccaggagcagggttctgaatcacaatcttaggcaactgaggttgctaatcttaggtaaatctacttcttaacaatagatttacctaaactgacacctgagaaatgaataggcattaactgagtaaagaaggtgattaggtaaatgctgtaaattattttaaacatcagtctactatatttctctattgtactaaataaacaaaagttaatattttttgatgacttaggatcagagtaaagaactcaaaggtggacttacatcataggaacctataagtatttttattttagttagttattttgattaagttattttgctgcatttaaaagtatctatctggaggatgataaaagtaacatatcaatatttcttgggtaaatatatattccatgaagtcaggctcttgttaatcaaatttttaccttatccatgaaagaaacaaggtcaaaataaatttggtacaggattatctgtttagccaaggcatttaatataacaccatagtgaagatatactacctactgatgtcagaccttatcaacccaacaatttataaagaaagataattaacatttataaataaattaaagtgtcaaactctcaacatacatttttttcaatttttcattgccaccctaagaagcaggtacctttacctgcattttagagctagaaaaccatagcttgagagttttgtttaaaatctagatctttctaatgaaagtgttacaatatcatacagcctttaatgattatgcatataatattagcacagaatattgtgaaaatattgtacaaagtagtacaagccatgatccctacacaatagaactgtgcaatacaagtgggaagataaaacccatcaaaagacagttcggaacataccatatcatagaacacacacacacacacacacacacacacacacacacacacacacacacacacgtcacagcctcagagtaaagaatatatggctgttcagaattatcctgaaaaaatattataaatagaaatgatgtcaaaggttgacactttttaaaaaggcaaaacaaggaggacatttgagatagaagaaataaagacagccaaagtttggaatggagaatcaaattgtgttctggagaatagccccagttctgtgttggtgtcagaaatgatcccagtagttgagatgyaggaggtaagattaaagaggtttaataataaaggagtttcaaacatttgcaaaaacacagcaggctctgtagaattgtgaactaaatataaataacacctacatttctttcttttcatacgttttacagatattcaataacatactcaggtaaatgtagttgttagaggtaaaagtctttaatataattctggtctataagcaataaataaaagttgcagacttttctcaggcaggtttgcaatcatggcattctagcactctgcaaaaagtactctcacaaatggaattaatatctttgttcctacccaataccaaggccttttattcctccccattctccttgactatgtggcactgggtgctgattgtcactgcctccttcttagcacacgaattcttcagcttccaagacatctcaccagtgaattaataaatgttttcatacccattttttccagacactaacaacgytccttcagtaggtagtacatcttcactatgatgttatattaatgccttggctaaactgattgataagcctgcactaaatttattttgacattgtttctttcttggatatagtgaaaatttaattgacaagagcctgacttcacggaatataaatttacccagaaaatattgctgtgttacttttatcatcacctaaataaatacttttaaatgcagataaatactttaattaactaactaaaataaaaatacctttaggttgctatgatgtaagtccacctttgagttatttgctctgaycctaagtcatcaaaaaaaaaaaacttacttttgtttacttactacaataaagacagaaagtaggctgatgtttaaaataacttagagcattgacccaatcaccttctttactcagttagtgcctattcattcctcaggtgttagtttaggtaaatctactataagaagctttttttcagttgcctaagattgtgattcagaaccctgatcctggaattctatgaattaactttgtattaaccttggccaaatattggtttttctgtatgtaatagtagataatatggtttatggtattctcctttattttagtcatgcctttccttggtagaataaaagctcccaaaaggcaggtaatatttctcattattttctttatctgcaagaatgtctggctttgtgatctaaatattttattagttggtagatagtgaggcagctaagcaatgtaatatagtaagagtttggaaaaaaatggtgctagaaatggccatcaatgagtgttctcaggtaaattccagaaggaagataagatctagtaaaatttgtacttccttaaagaattaaatagatgaaaactctatgcggatcacactcaacatctaaaaccctaaacttgaaacatggcgtgaagctgggatgctcattgacttggctgtattacttactaatacaggaaggcactgtattagtaagaaatgatcccaaaagcagaagcctaggctctgaagtcatgaattaattttgtatgctttaatccatttaatgctgatcaagtcatcacagtgacagcttgacctattatccttgaccctctaagccagttcacctgcctttgctcttgccatatgactcccatctgtagacactgttccagtcagtgatccgagattaatctgcttctgcataatcagaagacattaaatattttataatgcccagaaccaactcacccagttcttggccctgcattttccttgttctctgggtacagtctagattaaaatctgtcttgtccttctctgtgctttataacatccaagatttggattctatctgtrtaactgaagactggaagtttggttagcatcttactacctgtgtaaatattcactgactttctgtttctgtgtcctagtatttctctgactcttaggtctagttatttttagttgacttgtctatagcctagtattctgcttgtggattgttcctgttttctcaaacacccaccttcaccttttatgtcacacctctattacctgcagtttggtctgtgtcctacctcaactctaagctttacctgatgggattacctctaagttttaatttcacccattgtggcttgcctctcatgagtcaacctcacatgcctatggtatattaggacaaaaaaatgcatttttgacttcctttgaatccagtcattatcactgatgttaccaacaaaaatttgagtggaacaagtaaaaggaagcatcaaccagtcataacttcctcacacaaaattattgaggcatagaaaaaaacagaaatcccagaactgtaaaattcaatgtctgaaaataaaaatacaattgacagccytaccagtagtctaaaacaagcagaagaaagaaattctgaacttgagccagggattttaaaataacccagacaaaaaataactatataaagaaatgaagaaagcctgcatgacatatgcaatatgatcaagtgaagaaatattcaaattttgagagtccttgatggagaagaaatgtgaacaggcataaaaaacctatttaatgaaataacagttgaaaatttcccaattcctataagagatatagacattcagatacagaaagctcaacaatccccaagtagtttcaaaacaaaaagttctctctgagtcacagttyggtcaaactgtaacattcaaagagaaaaaagtagcaacgaaggccatcaagtcacatagaaaacaatacctatcagactaacaatgtatttttcagcagaaaccaggagaggatggtataatatattcaaagtgctgaaacaaagaaacaaacaaacaaaaaaactgtcatgtaagaatactgcaccagtaaagctatccttcagaaatgaaaaataaactctattccagatgagcaaaactgagggaaattattatcaatagagtggcactacagaaaaatgccaaaggaaaatctgcatctggaattgaaaggatgatattttccgtcataaatcacacagaaagtataaaactcactgttagatacacaaataggaaagagaaaggaatcgaactttataaattttgctcactacccaaatcagaaaaataaacattaagagataaagcaacaaaacatacacaaaacacttcagaaaccaactagtgaaaggacagaagtaamttttcacctatcactaacaaccttgaatgcaaataatttaagttttccaactaaaagatatagactagctaaactgattttaaaaaaagacccaaatatgctgcctacaagaaactcacttcacttgtaagtatagactgaaaaggaagaaacagaaagagatataccatacaaatggaaaacaaaatcatgcataaaaaacaattttatcagacaaaataaactggatgtcaataaacatgaaaagagatgaagctcagccaggcacagtggcccatgcctgtaatcccagcattttgggaggccaaggtgaggggatcaattgaggtcgggagttcgagaccagagtgaccaacatggagaaascccatctctactaaaaatacaaaattagccaggtgtggtggtgcaggcctgtaattccagctactcaagaggctgaggcaggagaatcacttgaacccaggaggcggaggttgcggtgagccgagatcgcaccattgcactccagcctgggtaacaagagtgaaacttcatctcaaaaaaaagtcattatacaatgaaaatgtgatcaattcagcaagagaatataacaactgtaaatatatatgaactgaagaatggagtatgcagataaatatttaaagcaaatatcattagaactaaagagaaagatagagcccaatacaatagttagaaacttcaacattccactttgatcattgggcagaccatctagatgaaaaatcatccaagaaatattgaattaaaacttcactatagatcaaaaggccttaacagatatttgcagaacattttacccaaaagctacagaatacacattctttccatcagcacatggaatattatgcatgatagaccatatattaggtcataaaacaagacttaaaatttttaaaaaatttaaatcatatcaagtaccttctcagatcatcatggaataaaactagaaatcaatgaaagagtaactctgaaaactgtgcaaataaagggaaattaaataatatgcttccaaacaactagtggctcagtgaaaaaattaagaagcaaaaaaaattcttgaaatcaataaaaatggaaacataacataccaaaaccaatgggacacagaaaaagcagcactaatagcaataactgtctattttataaaagttgaaagatttcaaataacctagcaatgcacctcaaggaaccagaaaagcaagaacaaatctgacccaaaataggtagargaaaaataatgaatatcagagcagaaataaactaaatagatacttaaaatatatttaaaaataaacaaaatgaaaatttgtgtttttgaaaagataaatttgacaaatcattagttaagctaagaaaaaaagagagaagacccaaataaataaaatcagaaatgaaataagagacattacaaatgatactatagaaaaacaaatgatcattagagactattaggaacacctatatgccaacaaattagaaaacctatggggaatatatatattcctggatgtgtaactgaacaagattaaataaggaagaaggctgagcacagtggttcatgcctgtaatcccagcacttcaggaggctgaggcgggctgaccacgaggtcaagattttgagaccatcctgaccaacatggtgaaaccccatctctaccaaaaatacaaaaattagctggacgtggtggcgcacacctgtagtcccacctacttgggatgctgaggcaggagaatcacttgaacccgaggcagaggttgcagtgagccaggatcatgccactgtactctagcctggcaacagagtgagactccgtgtctaaataaataaatacataagaaagaaagaaagaaaaaatctgaacttaccaataacacataatgagattgaatcagtaataaaagtctcctaaaaaaagaaatgcctggcactgattgctttactatgaattctattaaaatttaaaaaatgaattaacacaatttttcttatactattctaaagattgaagagaagggaatttttcttaactcattctatgaagccagcattaccattataccaacatcagacatggacacacatacacacacacacaaacacacacacacacaaagtacagaccaatatttctgatgaaaacacatgcaaaacatgcaacaaattactagcaaaccaaacccagcaatacaccaacatataatacaccatgatcaaatgggatttatcccaagaatacaagaagggttcaacttatgcaaatcaataatgtgatcaacagaatgaagaacatcacatcaacagaatgaagaacaaaaatcatataatcatctcaattcatacagaaaaagcatacaataaaagctaacatctcttcatggtaaaaaaaaacaaaaaacaaaaaacaaaaaacgataaaagctaacatctcttcatggtaaaaaaaaaacaaaaaacaaaaamcaataaaagctaacatctcttcatggtaaaaaacaaacaaacaaacaaaaaactcaacaaagtgctactgaaggaatgtgcacaaacacaatacaatccatatatgacaaacccacaactagtatcatcctgagtgtggaaatgctaaaaaaacctttcctctaattgctggaagaagatagaatgcccactttcaccactcttatttatcataagaataagataggaccagaagtcctatccagagaaaatagcctagagaaaaaaaatacagtgcatggaaactggaaaagcagaattccctctttactgatgacataatcttatacatagaaaaccccacaaacccacaaaaaaaccctcttagaagtaatcaacaaattcggtaaagttacagagtagaaaatcaacccacaaatcttagtagtatttatatacaccaataattaactaggtaaaagcataattttaaaaaattccatacaaaaatatacagctacaaaaattaaaataactaagaayaaatgtaaccaaggaagtaaaagacttctgcaataaaaactacaaaatgttgatgaaataaattgaagaggacacaaaaaaatggaataggacagttaatattattaaaataaccatatttcagaaagcaatctacaaattcaatgcaatacccatcaaaataccaataacattctttatgaaagcagaaaaaaaatcttaaaattcatatgggaccaaaaaacatttggtttcttgacaatagtcaaagcaatgctgagcaaaaagaacaaagttggaggcatcacactacctgacttcaaagtatattacaaagctgtagtaaacaaaacagtgcagtattattataaaaatagaaaaatagatcaatgaaacagaataaagaacccakaaataaatccatgtattaacaatcatctgattttagacaaagacaccaagaatatatattgggtaaagggcaccctgttcaataaatgcagctaggaaaactgaatatccacatcaagaacaatgaaactagagccccatatctcaccatatgcaaaaatcaactaaaaatgaattaaagacttaaatgtaaaacctgaaactataaaacctactagaagaattataaggaaatgcttcagaacattggtcttggtacagattttatgggtaagattttagaagtacaggcaacaaaaacaaaaataggcaaatggggctatatcaatcaaaaaaatctcctgtatagcaaaggaacaatcaccagagtgaagacacaacctgtagaataaaagaaaatatttgaaaacttaacctgacaagagattaatatccagaatatacaaggaccacaaacgtctcaacagcaaagaccatataatcccattaaaaaatgggcaaatgatttgagtaaacatgtttcaaaataagacatacaaatggcctgctgggcgtggtggctcacaactgtaatcycagcactttgggaggccgaggcgggcaggtcacctgaggccgggagttcgagaccagcctgatcaacatggagaaaccccatctctactaaaagttcaaaattagctgggcatggtggcccatgcatgtaatcccaactactacggaggctgaggcaggagaatcacttgaacctaggaggtggaggttgtggtgagccgagatcaagccattgcactccagcctgggcaacaagagtgtaactctgtctcaaaaacaacaacaaaaaataaaaacaaattccatcagacatataaaaacatgctcaacatcactaatcatcaccaaaataaaaacaaaaaaccataataaggtctcatcataccccagttagaatggctgttatcaaaaacacaaaaaataacgtatactgttgacggtgcagagaaaagggaactcatacacactgttggtgcaaatgtaaattaatacagccattattgaaaacagcatgtagatttctcaaaaaactaaaaataaaactacctatgacccagcattcccaatactgggtatttatccaaaggaaataaaatcattataacaaagagataccaacaaccccatgtttattgcagcactatttacaatagccaccattacgtaataaccccacatgcccatcagcagatgaatggatacagaaaatgtggcatatatacacaatggaatactatttagccataacaatgaaatcctgtcatttgtggcaatatggatgagcctagagaatattaatatgaagtgaaataagtcaggcatggaaagataagtcaggtatggaaagattagcatcacatgttctcactcatatatgggagctaaaagaatgagttcatagaagcagagagtaaaattatggtcattataggctgggaaagggaagagggagggaaggataggcagaggttggttaatgaatgcaaagttacagctagatgggagaaataacttctagtgtgttgtaccactgtaggctgaatacagttagcaatcatttagtgtatattttcaaaaagccagaagacagaattttgaatgttcacaacacaaatgattaatgtttgaaatcatggatatgctaattaccctgatttgatcattacacattgtatacatgtatcaaaatatctctctatataccataaataagtataattattatgtgtgaactaaacaaatattaagatacttcataaatttatcccttcctcataaaattaccaaattcagaatagatctctatttccttccaatctccccaggtcacttaacacaagatccaatcccgtgacaatccataccccaaaactttcttatcaaagtacctactattatcaaaaatgtacaatatccctttttgcaggaagtaataaactcaactttatttgactrtaagtgtatcctggggtcctttagctagtgagcattaacatttgttaggatttcagtcaaattttgtgaggtttagggtggagaatcaataaattaatggcttgaagacccaataatgacaagcattttcactacaggtttcacaaagaaaagctagtataataagaactaatattatcttagtatgtgatattcattttgctttttattttcatagctatctttagggacatcataaaaaccttgtcttcactgtcattaaaacaaaccaaacagctgaaaagtcaaaaaatcaatcagtaaatatgtatagtatgtgctattatattctctaggatacacagaaaaaaaaaggaatcctggatggtccttactctaaagaaatttatggtccacttgagccagaactaaaatgactttcattttaatcttgagagtttgctatatgctatacactgttataattgcctcatataagatcttattcattcatacatttctacacagaagaagcaagattatcccaattttctagctgagtacattgagttgcagagcagtaaggaaaatagccctgaatcacacatccagctagtaaagatgagttcaacataaaaactcaagtagtttgaattcagagcgcacatacatgcttaactttactcctgttgagaaacagctaacagcacaaggcacaacagagttgagcataaaaaaaagcgtagaagcaggttaagcaaaatggyaaaggcagaaaggagaaagagcaaaacagtcgtggccactcaaggaatgggatgaaccactggggccaacacaaacggagactacttccaactctgtgaaaactgcagcagatctgaatggtagtgtatggatacattaattttgtgaaaactagaccccttactttccaaccttatcatggcaaatctacatacaatgtcaaaattttaactcctatcttagaaacctaacaattagagctgacttttgagtgtcttctattcatatagtcaataaacatttattgagctcctacaaagtgctagacattattcaaggtacttgggaaatattagygaacaaaacaaattaacagatctaccttagtgaaatttacaagctgacagcaagagagaatcagtatacaataatgacaataaatagatgatatagaactttggaaaggaaaaggatttttgtaaaaaggaaaataaaggaaaggtcttgcagatcgtgggtgtctgggatgaggtagagggacagttattaaatatatcatcagtgcagacctctttgagaaggtgaaatgggaccataaatgaagtgagagaagggaggaagtgagtaaatcagccaagtagatgtcagcagaaataaagcaggtatctcaaacatccttctgaatcaatatcatcataaattatgatatgattagctccataatgtcaaaaaattaggttagacgtgttttgaattgggaagtcacccaaagattttttttctttgtacagttttcccctaatcatttgcttgttttaaaatttattgaatatctactatattctagaccataattataaagaatacagaaatgaaaagaatttgagagctatactaaagttgcttggtctggtaggggagggctggtcataaaaacatagtgacagttagtaaaacacaaatacgaacacattgctgcagttgggacaaacatactcctggagttaggcaacattcctgttgcattatgctacagatcaaggtgttttctatcttaccatttctggctgtctaaagtgcttgaagcctgagtggtgaatccatctcaccctgcgaatcatttcctatgatctaagaggccctgcactacatctcagaaggccaagattctatttgaggggattaaatgcgtatctgaggtggtacaagagcacttcatcaaacaaacaaacaatagttccctaaagccagtttgcttagtgctgaattataaaaattaaactaaactaacaaattaaagatttggtatagagatttttagataaaatggctaaagtgtctcagctttccaatttacataaactagaaaaaagatgcttataagatttcaaaggatccttgttattcagaagatgctacaaattgtayatatattatacaatcatatagaaagagtctttagccaaaataaataaaacttaaaacatattcaaaatgtcaaaatataaaataaccaaaggggtgcaaacaaaatatcaaaaggtagattttaagtaagcttttaattagaaaggtaaattgagtgttgtcagattaacagacagagtagctagacaggtgttacatttatttgcaataccaatagcttaatatctttggccttccatgtacttgcttatggattcacattatttgctgstaaacacaaaggaagactaatatctgtggaaatgaatgaaagaggtgaacatataacaagtatctgagatgtttcaagttccgtatagaaattgtctttgttatttaatcttcaccacaaccctctaagatatttagaggctattcttataccattttacatagrgacaccaaaggattaaagtagataagtgctagggtcctttcctgcctttaaagagctgatgtccctctgaggttttagtgttcctggcaaaaaaatgctctctgaactcttgtgaacccacatctcaaagagactaaggttgtcaatttatgttatagacaagggactttcctgctcactgcctcttttaacctgtaaatatgtaaaggctttgtcatcaatccagccaggcaagggagaatgcaccataatatatttttctcctcaaaagtgatttccaaatcatctggcatttgaatttcaaagctgatgcagctcaraatgtgtgggtttggaacagcaaacttgcttgaaataccaagtcatatttttgtcatgcactgcattgaaggtggggtgtttacagccaagacaggattgaagcccctttgcccaacatagcttctgtctataatagaatatcttccaaattcatacacagattttaataaagtcaaactttgcccccaatgagtttaaaagctaaaataggaaattcaggttcaagcccttgattgattgaaaatcagttaaaacatttgaatcatatttcattcctcccaacttgtcaatgttactttaatatttaagcccatgagttttacataattgtcttagagatgttttaaaacacttttgacttttcagtttaatttcaagtgttttaaaattactatttcagtgaacaaagcaatcaaactattaaaccattttttacatgaataaattaaaaacatttcctgtgaatgtaaatgtagaattcacattagtgccttaaaaatgctatgtcattaggaattttaggatcagagaatcaaaatgaaaaggtctattatttaaagcctcaagtgttggctatgaatcatacactgcaatatggaggctcaaaaggaaagtggctatcaggccattactacmcacatacaaaatgccattagcaatgctaaatggatcctgcacacctcgatgtgataattcttagattatccatagattattacaaccaaraaagtcacttgatgttgctgcctttcacactwtccagaactcctaggtcacctaacaatacatgtgctttaatagctttagggctatattttatcatttgagaattagacacatttaattctctttcttccttctttggctcttttctgatgataatcaccaagcctctcctaaacagcagcaagtcacctgtgaaaggtggtcattatagttcctgtagaaaagcaaacaaacaaattctaagtcataagctataaaaatgaaaaccttgttgaggtttttcttttgagtaaagcaagacaataatttcaaattaatctgaaacattttataaaaaataaattgagagttgcagggaagtggaagaaatgaatatccccggaatgtgtatcagtcaataaccaaatccaaaccttttactcaaataaaagtaacaataataactttatcgacactatctcaaataaatttatgatttcagagttatgaaggctaccagaaaacccttttgttttactccttttccagaaaattatttgtactaatgctgattaattttacttttcatagatgaccacactctgcttattctgcttaagaactctaagaaaatggaggccatcagatgttagccttggtgtgttctctctccacctcagaatataattaatagctctctattaaccctcccttccttccctcttaaataagtttcaactagaaaatctgtccacagccagctgattgacattccctacgtgttctctgaaaaatccatattattttaactttggggcagtttcttttagtgtgtctttgatcataggcacaaacacactagccttgtctattcagcttcaggatcagctgcttgagagcacaaaccaagttagactcakcagtgaaacctgccatccctcacagagcacctcacacagagtattgtgcaaactatgtattcagaacattactgggaagttgcagtggcttttatttttctgcaaggcactagtttttgggtgtgactgaaagtctattaggttaggagtggctgagatcagtagtcagaaactgacctattttacttcttgggtttcttttacctataaaattatgccattcaacaggaaaagaaaccaacatttttgtgtgtatgtttgtgtgtgtggagaatggggtctcactatgttgcccaaggtgtctcaaactcctgggttcaagctatcttatcacctctccctccctaagtgttggaggattacaggtttgagccaccatgtccagccttaacattttttagcacttactatacatatcagagaaagctgaatatcttcatgtatgtttaattgttatattcccttagagtgaaatagttctgaggttttcatgattgaagtttagagggagatagcaatatccmaagttttcaaagttgaagttcgctgtaaaaaatctggattattgttcagcaaatatacaacaaagactttcccctttccctgttagaagtgcatctgtcctcatctgtgctacattttgttacatcaacttgatggagattgagaattacatagtccagaatcccctttactgttaggttttatgttacagttgccaaaacaaaaatgaagttttgcaagatttggaaggtggagaaatgcagaacccttattcttggaaggctgttgtgatgagacatagcgacatgaaaaaatgcagagatgcctaacagcttgtcctcactctcccctgtttcatgctgactttgttttccacctgctgcccctactgcccagcagcatctccaggcccacgcaccaccagctgcctggctgtggactgactgaagtggtaattacatgggggcaacagctttcacaggaataccctagaggcttcgtcttcatagttccactcctgaagccttctgtgcttgcaatttcagattctcccataagctccatattattcaccccatgccagtgctccagatggactatgtcgtaattctcttggatcttctgacacccctcttccagatcttcattgaccaagcccctcccatacgtgcacaagatcaatttcctataataaaatccttattaccataatatttacaatagctcatttttttctgactgcaccctgcctgatacacaccctattgatgtttgtcttgaccatgttgtacttgtgactgagataaccaattcagtgattcagctgtagaatcaacctacctaatgcaataggaaggagcttgcttaaaagtgtgcataattacataatatacattgaagctttgaaggtaagagaatgtatgtgcctatgcagagatatgaaatttgtcatagtatgtctcctcaagaatatttcaaatacccacttttcatgaaagtctttaaaatatcttctttctcaaattaacctgtgatttatgatgctcataaaagtcctaataatgattatgcattcattcatttttcagccagaatttcatttattcagccactatatattgtatgtcaagtattgtatcagggtctgggatataatgatgaatgagacacagaacaaaccccagtagattatgtgccaaccacatgctactgagcatgtactgtgaatgtcaagctaagggactagtgcaggaaacaatatcataagcagatatttaacattaatatgtgtcaagtccagtgaaaaacttatagagtagaatcatttaaaaaaggaagaatgaattccaccagtaaacaaaagggttttctcctctccaatctcattgtttctttttgtgtatttctaatcctacacaatagataaacagagtttaaaaatgtcaaatcttcccacttctgacttccagtccctaaaagccagcatatttcactcttttagctacattttcttggcatttacctccacatttataaacagctttcttatactgctcgtttcttgatttttctaattttttaacattttctattgtctcccttgtttggaaaatgaagatacttctttttaaattctctgctactagtatgtcccaacattatcacaaacaaactctaaataacktycctcaaaaatatctttatctttgtattagttttctattgttttgtagcaaattactacaaacttaatacaacacaaatctatcaccttacagtaggtcagaattctaaaatagattggcaggcctgtgatacttctyggggctctatagcacaattggtttccttgctttttccagctttgaaagcctgcctgcattccttggttcactaccctttctagcaaaggcatcactcagacctttgcttctgtgttcacattttctctgactccagtgctcttgtgtctcacttataatgaccctaaaattacattaggtccaccctgataattcagaaaaactgtctcatctcaaggtcctgaattaattcaaagttatttttgctaaggaaggtaatatagtcacaggtttgaggacatttggggaagaacattagcctccaaccattttcataactgattgatacctacctaggtatggaactgtatttttttttggctattcacagtaccttgaaattctrtatgaattttaggataggcttttctttctgcaacaaaagactttgggaatttgttgagtcattgggattgctttgaatctgtagattgggattttattgagtcattgagtttgctttgaatccgtagattgctttgggtagtatgcttgtattccaggaataaatcccacttggtcatgttatataatccttttaataggcttttgaattaattttgctagtatttttttgaggatgtttgcattaacattcataagtgatactggtttgtagttgtcttgtaatggcttggtctggctttggtatcaaagtactcctggcctcatagaacaagttaagaagttatcccttcttttcaattttttggaaaagcttgattttgtcatgttatttctgtaaatgtttggtagaattcatcagagaagccatcaggtccagtgctttactttgttgggagatttttgattactgattctatctcatttgttataggtttattcagattttctaattcttcatgatttagtctttgcaagttttgtgtttctagcaattgtccattttgtcctcattaccaaattagatagcataccgtactcatttttttgtttttgttttctgttttttgtttgtttgtttttgagatagagtcttgctctgttgcccaggctggagttcagtggtgaggtctcagctcactgcaacctctgtctcccaggttcaagcgattcttctgcctcagcctcccaagtagctgtgataacaggtgcctgacaccacatctggctaattcttgtatttttagtggagatggggtttcaccatgttggccaggctggtcttgaactcctgacctcaagtgatcygccggcctcagcctcccaaagtgctggtattacaagcgtgagacaccgtgcctggcccgctggcatacagtactctcctataatcctctttatttctattaaattggtagtaatgtccccacttccaattctgattttagtaatttgattactctatctttytcttagtcaatttactaaatgtttgtcaattttgttgatctttctgaaaaatcaacttttgatttcattgattttttctattgcttttctattctttattttatttttgctctaatctttattattttcatccttttgctagcctttggtttagttactctttctagctcctgaagttataaagttaggttgttggattgagatctttcgcacttttctgtgtaaatattaaatttatagctctaaattttccccctagctttcagcacatgctgtaactttgggtgtgttatgcttttgttttcattcatctctaagcattttctaatctcccttgtgatttcttccttgatccagtgattattttaaaacgtcctgtttatcttctaccaatttgtaatttttccagttttccttctggtattcatttctgacttcatcctgttgtagacgggaaaaatacactgtatagcatttatctctttaaatgttgagacttaatttgggcataatatatggtctatcctagagaatatctcatttgcacttgagaaaaatgtgtattcttttgttgttgagtaaagtgtcgtgcacgtgtcttttaagtctaatgtgtttattgtgttattcaagtctctctccttacttatcttcattctggtggtattatcctttactgagagtggggtatgaaagtctccaatcatgattttagaaatacctatttcttcttataattctgtcacttttgttttatttatttttgttttttattattgtttaaatgtttgtaattattatatattcatgttatattgaaacttttattaacatataatatctttctttaccttttataattttttttatgaagtctctctctgtcgccaggctggaatgcagtggtgcaatctcagctcactgcaacctccatctcctgggttcaagcgattctcctgcctcagcctcccgagtagctgggactacaggtgcacaccaccacacccagctaattttttttttgtatttttagtggagatggggtttcaccatgttggcgaggatggtctccatctcttgacctcatgaaccgcccaccttggcctcccaaagtgctgggtttacaggcgtgagccactgcgcttgggcaccttttataaaatttttaaacttagagtctrttttttatattagtatagcaacccatgttcacttttttttactatgagcgtggaatatctttttccatattttcacttttaacctatctttggatctataatgagtctcttgtagacagtgcatagctggatcatgttttgtttaaaaaacccattctgcccatctctatctcttgattggagagattaatctagttacattcaaygtaattactgctaagaagggacttatttctttcattctcttatttgtttcctatatgactttaattttttttgtccctgatattctatattactgtgttttgttttagttactctttttgtagtttagggtattaattcccttcttatttctttttgtgtatatgctacaacaactttgtggttactataagtattacatttaacatcctaaacttttagcactctgagttaaatttacaccagcttcactccaataacataaaaaaacttttttatttacagcttcctcctcacttttttcaattacatctttgtgcattgtgttaataaatatactaataattgttcttgttaaattcattagtctcttaaattgtgtaaaataaaattatgtattatgtctaaaaccaaagttataatactaccttttagcttataatagtttttcttttatgtattagtctcttaaatcatgtaaaattaaaaaatggagttacaaattgttacaataatactagcttttataattgcccatatatttacctttattgagatctttatttcttcatggagttttgcattacattctagtatatttttatttcatcatgtaagacttcctttaagatttcctgcagggcagggtaggtctagtggtactgaactctctttgtctctcttcttctctctctcttgcacgtgtacatacacgtgcgtgtgtacacacacacacacacacacacacatatgtgtaaatgtcttaatttcctcctcacttatgaaggttggytttttccagacagtgaattcttggttgacagttacttttttttcttttagcactttgaatatatcaggcccctacacaatggcctccaaagttttggtgaaaaatctgctgataatcttgttgaggattcctcacatgtgatgagtcacttctctcttgccgctttccagattatctttgttttggggttttgacggtttgattataatgtatctcagtttgggtatgtcaggtcatcttacttagaggtcattaagctttgtggatatagttttattcatgtcttttatcaaacttggggagtttttggccattattgctttaaataatctctctgctcctttttctctctcgtctgcttgtgggactcccacaatgtgaaagctggctctttaaatctcctggaagttgttttagtgggagaaggagtagcttacartaatgctgtggggtggggacgtgagggggtggtggagaagggcttacaacaatggcttcctgcctttgtatctctmcctgcaaaatcagaagcagcgatagtaatctgaacacaaatctctgatatctggaggacasgatctttattgcccagcatggctcctgcaagcttcatccaatatgctccaggaacacatgcatgtgccacagagttgaggtgggtaggggatgggttgctacctccagataagagctgaaattggctaaaattaagggtggtttattgttcaaggcttcccctggacactgcaagccttggaatagactccagagtttcaaaatagttacgtcagaaagatttggccagtgtaatcattgtttaggtgaagaggcagattcctggtgctacctattccactaccttataccatgctaatgtgtaccatatttttctaatcttcaaatcttcttctgtattttttgaatgcttcttttcatgacatcctgttattgtttcataaatacaatgtgttttcatttctgcaaatactacggccttttccttggcattttcttctgtctacattgtctctctttttctgagtttcttttatccattttgattgctttgtctcatttatcttgtagcctttactgattattttgttgctgaatattcaaattctagtacctaagggtcttttattttgaagtcatcaatttcctcagggaggaattttccaatcaccctcttgaaaagtgccagactgccaaataaaggagtggaatgggatactgccattttgaagactgtcttacacttacacttccttatatactctcaccctgctttttgttgtgtctggtgcttccatatctggacccactctaatacaattttttataagagcaaacctccagtcttctgatgacagggaagatgtagcttctgtctgaaaggggacctgggagtctaattactcttcagagaaattttcatgccgtcttcctcttttcgttcctatacttgatctcatttttggaggtattttatggtgccaattcccaggtctttccaagtttctttctcagtaactctgcagatacttaacttttatttttctctaatctactgtcagtttccatttattgacatgttttgcattttccattttcagccactatcacctcctttcctcttcttttcatatttgtacatttacatcatttttacaactcctttactatcatttatatcatttttgttccttttatggggacttaggaagcaaaagtaagtggatttgtttaatctaccatgtttaacttaagtcttctctcatttaatgtactattaagtgagtagtgcaatattgcaaatataccttcatttgtagaagactatgaggcttaatgacttgttatgcracaaagttgagataagcttaataactacattttcaatagcatgcatttcattgatttattcaacatgcacttgaatggaccaagtgtgcaatatgtttttgtatccattcaaacacacgtacacacacacacacccacacgcacctctaagtattgtattaatatggcaagtgtaatatgggaacacagaggcagataagatgaactcagcaagcaataaaaaaataggattataacaaattgtcaataagtgaccagaaattaaaaataattggaacagcatggcaaatgcatggcagtggaaaagagctttgtataagtatcaggaataaaagacatgatatgatctgtacttcatgaaagacaaatttctcctaaaccgtatgaattaatttctctatcatatttcaaatttatatacttgatatcttctatgtgtacttttacttgaatattgcacytttctcttcatcgaagtgacagctgatggcttttctctcaaatggttgggaaagattatattttgaagtcatattataaatagtgcattaagctaattgctacagtggaaactgtttctccttgggaccagtaataagaaatattcaaagaagagtgtcatgttcctcagagaattttggtacatgccgttgatgacaacagttgctgtaaagatttatgagaaaagctgaatttatgactgattggactctatttccgtgacccctaaaagtctcttctatctacaacttagaagtttctttttcctaatgtgcaggctagcattattacacaaaaatgtgacggtttccataataactgatgaggaaacagttgatagaattttttttccaatttaatatggcaatttcagaacttgcaacggtttcttgaaggataaaagatcagtttgggatttttcatcatagctccccacttctctcactaatttttacctttaccaggatttgatgccactgttttatgctttgggctgaaatgctagctctcaagtataagagacttggtcaaaggtcgtgcattacagagcagtgtaagtaaccaaaggaacacagcccccaattttcttcttcactcatccagacttcctgaaacaggcaaatgtgaacaagtgtcattaagggggtggcagaagtgggtgagcgtagagaccctccctctctgctcttgtgattatgcatcgataattttaggctagtcatgctgtagtaataaacaacctcaacatctctgctttttacaatgataattctcattcactttacgtgctcatgaagattggatgcaagtgtgctctaaacctcttcactctgaaatccacacataaggaatggtctgtattttggacacgctatcttcaaggcacagatttttaaaaaggaggtagctgaactatgcaatggctttaaagcttcttatcagaaattatacaagttacttctacttatattttattggccaaagcaagtcattaggcaagcttgatgttatcagggtgggaagtatatttcttcaatgggaaagtattaataagtggtggtttagagacctgaaaggaaaagacccataaaaaagagaaggcaaaacttttgaacagcaattagcactgtgctaatatgtgctcagtacacatgtgcagtttgatgaatggaactctgccaccccaaattccatttacatctacacattctattttgatttatttattttaattaatccctcaattgttacagtgactacataggcaaagtagtagatactactatagttactactactaaggcaaatcagtagataagttgaccaagatcatatagccatcaaggcctgaaatgttgcctacctggtttcaaaagccattcttccacagctcccttagcttctatccaaataacttactgaagcataaacatattcatctgcacgacagcttcatgtcttctaccaccatccccagaagcagaaaccctatttttctcagtactgtatttctagcaacccatcccacagagtataacataagccagtgttcagtaaacccctgttgaataagtgaaagttcaactgactaattaaagctgaaaaaagcatttctcatatatataaaaataataacgcctagctcataggactattttgaggattcatttagccagtgtatgtaaagaatttgcatagtgcttgggacatggtgagcctctaaattaatggtgattaaaaagaagaaaagtcccyaggtgcagatactgttgagctggatgggatttggagaagatagacttgttttgttttgtttcattttgtgtttttcaaagaaaacaccatgggtaaaggatgtgaggtgcgactaatagggagtgaagtaggacccaccttagaagtgggactcatagggaggcctgaccctagtaaaaaatcaaatataagagttagaataggctcaggtaatggggatgagaaggaagttgcttttgacaatcatctactgctgaagatcactaatcaaacttttctaatctattaactactttcctgcattttaaatgttgaccatatcaactttatgtggtaaaatcattctgattcataacatctctattaggtacatcacagatgatttactagtaaaaaggaaaaaaacccacagggtcatgtttgagagacaaacaagctatccttctttaaatctggaaaccccttaaacgatgaatctgaattgaaaaaaaaaatcagaaacatttttaatacataaatctgtaaatacatgaaaaatataaacaactttgaataatgaataaaaagattcctagtaacttctgagtaaataccaccaaaaaggtaagaaatgcagcacctcattaatggaaactgggatatggtatactgcactatcaaaatgaaaatgacaataattattattataaagtaaagaagaaggtagaaataaaagggagaggagaagaggtagacaaacaagagcaagaacaagaagcagcagcaaacactcggataacacagaatacattctaggtcctgygctaagtcctttatacatgtccacacatttaatagtatatattatactgtttaggtgcatgaagttgtagccatgctgccttggtttgtgtccccactgacaccagttgtggacttcgggcaaattatttaattttgtactcctccagttttctcatccactaaaaaaaataaacttatatttgtgaggattacataggttaatcatcatcatgaacttgagacaggatataaattaaataaaattcaatttacccaattgttttcctgactcaactaaatattgaaggaaaacaaaggacctagaatttttccatatgtgtcactgcaaatgaagatgggtcaagctgcccataagttgcttctagtgccattccctgttagaataacctgtcaccagctccatcatattagatgtatgattctgaagacccaattgctgttacatgtgttttttgcatgtgttttagcagtggttggaaatcctttaaaaatcaccmtattaacatcttccagattaaaagtaaagaggaagtagtgaaaatagagaatctatttatctgtcatctcaactttcttcaaagaattctagtcttgttttatagaatttggaaaagatatttgcaaccgaaggccaacatttccccatttctttctcctcattttccttagttgatgactaattaatgcaggaagcacaggttcaggagctaaatgtctttgaaggggaaatgaatgcccttacaggctaccatttatgaagccagtctcctcactaattattaaggaggcagcctcacccaaggttacagcattaaattatcccatccaaggtagtatttaatttagcacatcacccttctatgaatatcatttttaaaaactctgtcttttcttaaattactcccaagtctgagcaaagtagatcaattacagtcaagaggtgggtaggaaaacagacaacaatctttgctctcagcacmgaatcatcaagcacttgaaaacaccttatgtagcgttctattttctctctgaagaaagatatttccttcctagagtgttacagcagcagggcctccaggagaccaaaacaatgcatacttcaattgtcgcaagagacatcatttctttgcaggcacacagcattaaaagttgttttatcaagaagcttccctccgtcctctcccaactcctcttgaagatggagaacatgctgaattttaaggactatggaaataacagtccctgatgaatggaacctaattaatgacaattaaagtgtcatttggcatacatccctgagtttcaaacacctggttcctgcttctgctttctagcaccagtgccagagaatggaaaacccccagcccttctccttttgcttaacctcttaagtttaagcaaaaggaagggaaacatggtgtaatcctctcttgcaaattaagtgattaaaaaccccagcctgggtactcagctgtcatcaattaaagagacgccacagtgacagttactatccaggacaattcctgtaaaaatagaaaaaataggggggaaatgaaaggaaatgaatgataagcaaaacaaacaaacacaagaaacaatgatctataaactggcatcatcactacatttttaatctagatgcatacagatcaacaagaagagaaagttgtcaatcaaactgccaaaaatgagatggtctggtgttatcaacctcatactgagaaattcaatccttttaagtctggaaaagaggcatttaccctaccctgcctaaatcactagttttcctccaaggcaactggcttcaaggtagtcaccacaggctgtgcacctctggacacggctgacaagcaaaggcacagttacccagctttctctaatggccctggtctttcttttataagttgctaagtgcaagagcaggggaaggtgaaggaaatgatgctcaatttgtgctttcagagataagagtttctcagacaagttcagcttcctcagtcaaagctccaactcactctagtttcaggtagtttaacagccctgcaggagtgaatagcataaacttggtatggttaactgagtaattcaagaggtgcctcagggattatcgtggctctttagttgtcttcttttcctgcttatgctttttttgggagggaggggggtgcatctctttattctttaatgcctcattctaatgttgaacaaagcaaaggagatagaaattgtcctagtaaatgtagttgcctattagaagcttgaggagggaaggtgggaagaagggaagtcctgcattgaaacaggttgaaactattccgggattatctgggggttccccttacccaaagcaactgacattaggagatttgattatcaaatgcccattgcacatagccgcattccccttccctaaaatgtacttagaaasccaaatgatgcagtgaaaatcataatcagaagaaaacattatattttataattatgaacaatctgaagatttctttttattaaaacaagaagaacttaagagaagagaatggtttagcaggtataatataaaccctcatgaatacaggtagtacaccggagggagagtccatttgccgtatcagtgactcttaggctgtgatccaggaatgcccacaagtcaatgaagagactttctatggtcactaaaaatccctttctcattctcaaaatgttcataatgtatatacacatatgcaaatatttttgaagatattattcacaacttccattaacttccaaaaatgctgtgtgtatgtttgaataaaaaagagtaaaaccaaaacaccctgcatagcacatcatgttgctataagtaccatcagttccatcagttctttctttcttgacccaccctctcccccactcttcttccataaaaatattggaattaccttcatttccaaagacctcttaccaggcccagcagcagagaacctctactacatctttcacctgtatcaagctcattagacatgtaattagcctttctgggtaataatcacagtagctcaagttcatgaattcctttctccctagtctttaattctaggtgagtttgtgttgtaaggcttcagaaataccagcctgtcattaaatgcagggctgtaaagattttactaccattgtgaacaacaaaaaaatcttgatcattctattatttcctctatatgaggaatataaaccagaatgttgtttacatgcttccactgatgccccctgcctcctgacagctgatgaaatatggcctgcattttacctctggaaggattgattcaaattgtgacaggtcatggggtgaaattaatgttgagatcttgccataccctcaaaaatatttttctacatcagagaaattgctttgctattccacacagatgacatacaagtaagatttgaggagaaggggtgaccatgcagttgggccaccttggaacaggtgtgcaaacagacacaggctaaaataaggacagaacctgaagccaggtgtcagaaggtctaggttcctatttccgtattcttagtaacccatgtgaggccttaggcaaggcacagaacctctgtggaaatcagattttgtgaaagtaagatgagggaataggatttgattagagatttctttaagctcgtctttcaaagcagccacacttttttttcaaaattatttctagaaccatgaaagtgaagcatctaagatggataatggggtagatgctgaagcccacatttmctatatctcccccccacccccagcacccttgagtgtcatttttccacgatgcagttgcaaaactaccataagaggaggtccagattgtccatccagatttgacatcctgggttatggtttatctcgcatctccatcatccctcagaattctggatgactcagcagggctgaacatctgtcacatcrtgatactgatactgagaaccrtggcagtgagccacagaaaaggtatcaggtgccttctgaattggcaatcaagggttttttgttgttgttgtttaataaagtttctcatatgttttgctactgtatgaatttcctattagccaaagtgttggaatacctaacaccacattccatacatgtcgttgagactagagagtgtgccataatcaggggccagaattacttcccaggatgactgcagaactggaggctttcttcagataccctgggatacctctggttggctaagggttgcaatgtgagggttgcaaatgggactcatgagactttctgcagctggcaagctgcaggcctctgccttacccaaatgccaccatgtcaccctcccttccccaggccaggagttatacttaaggggttagattctatccactgagtttatagtaggttattctcatttctctatttctggaattttcacagcccaaaacttcaaaggaggtaaacttctctgagactgatgtaaattttcttcctgatacttcatgttccrtagacacacttccctctaaacaaaaagtacaaatgttcaacatctaactctggtcttaatgcactaagcatggacatcatgattagaaaaacatgggttcaaatcttggttctgtcatttattaactgggtgattttgcataattcagtttctrtaagtttcagtttctttgcctataaaatgacaaatcctaggaagctcatctgagtattgaagcagatagggatgaaaactcttggttcactgcctggcatttagtaggcatttataaattatagctcctattatttaattacaaaatcatttatgtcctatctataaatttgctaaattcaccccaaacaaaatcattatcatgtttctaatttccagactgagttaaaaacaggaaaaaatatctctaacagaattttttataactataatttcagagaaaataactaaatgaggaaaatatcctattatttttccatcaattaatctgttttgaaaacaaagagtgatattttccttgaatttgagaatgcctaaacatttgatactttattgcaaacttgccagcactgtacttcaaactctgtcatcacaaatttatgtctcctactatggcctggggtgaacagaactcacacacaaaaatctaggataccatgtattattgacaaagcaacrggatgagaaaggtcatcagtacaaacctccaaatcattcagcaaggtctatcaaactgcttttcagtaaaaatctcacagccaacacttaaagtcctaacaaggcactgtctgacttattcacaccttcattgaacctcatagttgtgccatgatttgatctactgaatcaaatctactgaatcattcacctcacctgaatcatttacctcacctgaatcatacctcattgaatctcgtctttttaaaaaaagtaatatttgtccattgtagatatgcttgcattaattttctcttttgaaaaatactgcattagaaaatcatttatcttgatcactgagtttttttggcaacctcttagattttacctgaggtaagggtctcactcatctcactgtagtttcagtgcaactgcagacctcaaataactttttcacacaaacacccactaaatatttttactcctccagcctttcrttagagtgtattatttattattattgccattattgttattgatagacacacattaatatagaggtgtgaycacttaagccattgcatgaaaacaaacactcctccaggttgtagtttcaacacaggatttccagagaactgtacaacaaagtaaaacccacaggcatgtttgcagagccccagtgaaaccacaaagtggtgttttctctcattctctttctatatatggcaggattccaacacttcctttttcttgaatgcctactctatgatggacattacactagagaactttataagtatctcacttaattctcccaaccttgaaaattagatactacttctttacttccagatgaggaaaatgaggagtcaaaagtgctatatctcccttgaggttatgattcaaaattgtgtggttaccagtatttgaacttgtggaatctgactcccaaattggtgctacttctatcacatctggtatattaagggaaacaaactggccaggctatattctcttcagaagatatcaccatatgaaccatctgttgggggtgggggaagaaattctgagtttatattaagctaattcccttcacacctaaattgccatttatcagccaccagccatagcgtctaattccacagaaacggcacacgccgtatgctccagtgcagagtaggcagttcaccaggcacactacaccacagagacttcatggcaggcaaccttgtatcaaatattctctccactgagataaggagacgcaaatcatttttgtgatcaaacagcaggaagcttttaaataggtagagattacatattacatcttattgctgaaaatctcaataaagataccataaacagaaatccacacatataacaaatcacatttaactgtggttggtatctgatttatgttaggttataaattattgaattgtgtgaatatggtgctggaaaggagcccagaaaaggaaatgtaaaaaagaataaaaaatataaaagatggggaaaaacaatcctctcctctccatctttttctcttctctcctctgctttccctactcgccttcctcctcagagagttttaagcaaaacctgatggaacttgaaatttactcagaatgtattccctcagttggcaatgtactttcgaaataactaaaggtttctcagtttacagtagagtggaaatgaaatgaatggcacaggtagtgaatacttgatgcactgtagacattaatcatcttggtctctcaaacaggtttgtttttttgtgtctacatgatggaacagtgaaaaagggaaagtaatttacatttccactgtgtcaggaaaaacaatgtcccacttaaaaaagaagggggaaaacactgcaatgcagaaaatagttaagaacattgaaaaggcaagattgttttgtttttcaaatattcttctgaaatgtgtgattattgtgaaaattatttttaatataaataaaatcttaatgaaacaatatcctaaattaaaaaaatttaaactcatttttgtattgtttctctttcttcctgyctttcmttaattatttcttgcattctttcattttttgttttctcatcgtcatgcatatgtttgtgtgtgagagagtggcaaacaatatagtattccaaatgtcaagctatgatctgtaagaaggcgacagattgcatctagaccagtgtctgctcacctaaggtaaaatctgaccagtttatatggggaataaatgtgatgtcaatgtaatagccttataatttcgagacggaaaatctatactcacgttaaaacaggtgtgatagcctgaattttaggttctttaacagggtaattgcaatttttattttttaatttttatttattttttattttattattattatactttaagttttagggtacatgtgcacaatatgcaggatagttacatatgtatacatgtgccatactggtgtgctgcacccattaactcatcatttagcattaggtatatctcctaatgctatccctccccgctcccccaaccccacaacagtcctcagagtgtgatgttccccttcctgtgtccatgtgttctcattgttcaattcccacatatgagtgagaacatgcagtgtttggttttttgtcattgtgatagtttactgagaatgatgatttccaatttcatccatgtccctacaaaggacatgaactcatcattttttatggctatatagtattccatggtgtatatgtgccacattttcttaatccaatctatcattgttggacatttgggttggttccaagtctttgctattgataatagtgccgcaataaacatacgtgtgcatgtttctttatagcagcatgatttatagtcctttgggtatatgcccagtaatgggatggctgggtcaaatggtatttctagttctagatccctgaggaatcgccacactgacttccacaatggttgaactagtttgcagtcccaccaacagtgtaaawgtgttcctatttctccacatcctctccagcacctgttgtttcctgactttttaatgattgccattctaattggtgtgagatggtatctcattgtggttttgatttgcatttctctgatggccagtgatggtgagcattttttcatgtgttttttggctgcataaatgtcttcttctgagaagtgtctgttcatgtcctttgcccacttttttggacataggcatgggcaaagacttcatgtctaaaacaccaaaagcaatggcaacaaaagccaaaattgacaaatgggatctaattaaactaaagagcttctgcacagyaaaagaractaccatcagagtgaacaggcaacctacaaaatgggagaaaattttcgcaacctactcatctgacaaagggctaatatccagaatctacaatgaactcaaacaaattttcaggtaattgcaatttttaatgatccagtatctatatgtctgtaagtagagcttctaggaaaactatagcaaaagaaytcaaagccctaaagcaattggcctccttttctttgtagtctgaagcagtgccctggcctaagaaaatggagaatcaggagacaggaagatctcagcaaaaactctggaamtstctctacagctgtaatggaagagttatgctgagtcccaggcaaggtatctggtaggaagagtgggagtagttagaagctcctatgagatgggagctactataatgagaatgccagttgaatttcattttgcatggtaactccaatcacttgggagtggcttccttgacttcatgttaagtgaggaagcattctgggcaagtacctggggtctcaagaaagagagctatgatcractcatgctgctctccatgagcacaataatcatatacacaccaagcacttgccacccctctatgtgcaactgacaaatctccatatcacaataaaagaaagggaagctctattagaaacatataagaagcatattataggggttccaaggagaaagagatgccattcagctggaagaatcagsaaatactttatggagtatgagagtatttgaaatggaccatagagagttgataggatctcagttggcaaagaaaaggaaaattttttttagataaaggatactgtagaaacaaaaccatagaagcagcaatgtttgaggactattcgaagaaataattagtaactttgtttcatcagagggcaagggaagtgggtgagagggatgagagatgaggtaaaaaaaaaaaaaaggtaatttggagagatactagataaggtattgacggctggtataaaaacatattactggtcttggtaggtaatagagagacattgaataattataaggagtagagktaagtaactagagttgggctgtggaataaacttggtaaataattcatatactaaatttgaaggagttgtgtttacaggcaatagggagactggccaaatgactataacctaggggtactgagaggtgagctaatgttagaaagataatatttctttttgtttgtttgttttttgagacagggtctcactctggtgcccaggctggagtgcagttgtgcaatcaaggcttactgaagcctcaacctcccaggctcaagtgatacttccacctcagcctcctgagtagttaggactacaggcatgcgccatcatgcctggctaactttggtatttttggtagagacagggtttcaccatgttgcccaggctggtcttgagctcctgggctcaagtgatctgcccactttggcctcccaaagtgctgggattacaggtatgagccaccatgacctgccagaaagatagtatttcaagacagaattcagataatttattggatactaacaatcaaacataaataagttaaactacagcttcactcaaattctcactcatacgtggaagctaaaaacattgatttcataaaagtagttttcagaggctaggaaggataggagggtgaagagaggttggttaatgaatataaacatacagttrggtagaaggaataagttctggtgtttcacagcacagtagagtgactatagttaacaataatttactgtatatttcaaaataactagaagattttgaaatattctccacacaaagataggaaacatatttgaggtgagggataccctaaatactctgatatgattattacacactgtatgcatgtgtcagaatatcacatgtaccccagaaatctttattatgtatcaataaaaataaataggaatagagactcagcttttgagcctgaatgataaaaactagcactaacagaaataggagatacatttgtaggatggctaaatgtctaattctgaagttagatgtagttctaaattaccttggacaagaagctcaatttatcttaactgcattatatcacctgtacaaagaatataatccttatttcattttatgttttgagattgaaagttaaggtaaagcactaggtagtatcataactgggagacaataatcattcagtaatctacttctggtaattattattattggaaaattcaggaaaagcaatccctcaattggggataatttggttgtaaagaataaaataccacttaaaaattcaagagacagtatgattaatcaaaaacacgtacagaactttcaacaagcccaatgactgccccctaaattctatataaaagcaagtgactgaagaacagcaagaataaaatcattcagcccagtattgctaatctgcctaggaactaaacaatcataaagaaattttttatctctctctctctttcattgtcttctcccttctcctgttgaagattagcttcctttacaaagtttttatttctgtttctctatgaattttgtttgtctggaatccactctgttcctatctgtgtatggacttacaaatggaggggccaatacaaccttattggctcagtctatgaattgtggttttaaatccctggaaatcagaattcagtttccccaacatgtgtccagtgtccattctggcctagcaagcatcttcccaggtatcaggactaatgtagttaaaagttcaccattcctggatattgcaaggggcaggcttgcaaagaaaggagaggttgggggaaggaaaataatggccatttttagtagaaggaattaatgtaggatgaggaaagatgatgtgtccatctttcaccaggtcaagggtctttcaacacattgagaaatcaattttaaagcagcatgtggagctagagtttggaaaggattagttccaagaatatagactggtgagtcatctgcttaggaggtgataattgatgctgcagaggagctaatgaaaatgctacagaaggaaatagtacaagaacagaactgtttgttttggccaactttcttatggcccagaatctgatttctcgtattaacttcataggaaacatttccattgacctcagttacctcagggcacagccatttgtattctgttagcacagaacacagtgacaaatctgaaataataaacacaatagaaaaattggaatcctgtttctttttacaacaggtaaaacaaaactgcaaaacagatgaaccaaagccaaaatactcttatattctttacaaaattggtggagtcatgcatttttgtcattgctgggatgctgaacaagccatcattgaaatgcacagtgtcaaagctaagaggaaagaatgaagccaaggagcaacaaaacctagtgcatcaaagtggcttatgtgattgaaaaagagcttggtgggcccaggtggtctacaagtggaaccacccagccatcggaagccataaccaaaagtgcccttagagatcataaagctaggaatcttcatagaattttaaccccaaacctttcttcaaacacaggcttacttgccttgcctttattacagatatgaaaagacagagcagctatgctgaagtgggagtggaggacctagaataggtaatctgtcctagtatctcaccctaagtgaatagtaaggggacttctctgagaagcagaawttaaaaacactgagagtctgatcyccttgggaccactgaggaaagcccccagggctgatattcaggagacctaggtacagatcctagcagtaatgctgagcttcagataaccagcttcaatttgttgtacaagtaaaacaaattttaatcccagttctggaccatattagttacatgttgagtgcctaaaatttctaattttcatgattattatttctatgttacatgggattattatgatgattcagtagcaaaaagtatcattttacagtgcctagcatcacagtaagccctttggaaaggggaagttataattcctcttactccttgagcaagtcacaatatctttaggcttcagttttcttgtattttgagaaatcaggactaggtgaacccaaatcaaaatctagaaatctatgaagcaaaactggagaaggtaaatcagaaaattcagtcttactttaattgctttcttatgggccacatactctaaagttccttctaatgcctttgaactgtattagtctgcccctaaattccatataaaagcaactgactgaaggacagcaagaataaaatcactcagccagttcattttgagtgtgtgacctactgtgggtcmagtaaaaggaaaatataagtrtaggcaaatgtggtaggaaaatgaatgtaytgagatattgtttgcaatcttccttatatttccccctttacttcttccaaaaatagccaggctgtttctaaagtgcaggcctgagacacaaagttgcttgactgtcacatgtgttttgtgagactgaagttcaacaatgagattgaatttatgaatcggtgtgcgtggtggcggggggaatatccagtggttttgattgcgggggggggggttcaggaatgacagagatattttccgccacattgatcaagggttagaggaggatacagtccataagtcacggaacgctctagctgctcattcttaacatcccaaaaaaggacagagctggaattgatggagatagctaaatagtgtgcttcaggagacaggactcagaaatggggatcccagctttgtaaagactcccactttctgtgtccaggtagatgctgttgtttctgcatgcccaacatccattcttcctttttttctgataacattcttgactttccatcaaagactgctctctccttcacttcctgttgttcatacagaattatctattactgctgtttaatccaattagtgcagtgagagccaattaaaggcacatttttttttttttttgaagagctacagaggtcttttatattcactagaagaaccaggatgtaaggatgggtgcctgggatggcaggcagccaacatttcaccatggggcatgaaactcatccagatatgaaagacagggtcataacgttgtttgagcacctttatctagctgtgtcctaagatcaggctactatccaggacttttcaataatgtgaaaaatagttactatttttgtttaagataggttggattggatttctgtcacttgtaaagccttcagatttaagagtccctgaaggtttggtctatgagcttcccagcactgacacaggtagactatatgacatgcttaattgctttgtgccccatgagacctcagatattaataaaactccagaaaagaacccccttcaatacagtaaagattgaattcctaccagtctctaaaataggggctctgcatagggttataatctaagataatgaaaatagagtatgtggcttttcctgtacattcaaaacaattttatacaatgtaacatccacctcagcagcaaacagtgccctccataggaggtcagctaccttttacttgatggtttttgtggcttccctacagttattgacaagagtcacagcccagttcttcaggtactgaccaatatcaaggaggtcagctagctcttagctgctctcacctttgcaaggttacccaattaaaagagaatggcaatattcagctctgtttcagggctactttagcagcaaatgggaagtgttcagacacttcaataggcttcatatgctcctaatagaagactaagatctttctttctcttaggttaaggactgtacttcaaactacctttcacatcataggagataaagcttatttactcgaatagaatggtagagactaaggtaccaaggacttgttcttgaacaaaaggtgaattttgtttaaaaaaaaaaaaaaagaaaaggatctagatttctaccaagcattagttagaatactccacagttctaattttctttcttaactctgcttttctttccttatgatcatacttggcaatctggttatggagtgatgatgaatggccattttataaaaacatctggctactcaagcaatggctgacacagcataaatttgtgaaactgcytgaaatttcaccattggaaaaccagcatttcatgccaaaattgtcatctctaaatttcctctgtaaaacgcaaatattatgggtgggtctcttgctttaaatcttcaatgttttcctacagatgataatttcaggttactttctttcccaagttgagaagagtgtgaggaaaagggtgtactcaaagtatagaaagagatcaaagtagaatcattctagagtgtaattgtcaaacttcatctggataaaaattgtaaaatgggtkgacgccaggaaagttagatgcgaaaccaggagttacaatggctgcttcttgacaactgcaaggacggactagaaggcaagytgaattacctaagtgtgcatctgttccttgagactccagctataaatatttcatgctgatatccagatttgaagacttttctaagatttaaatgaaagcggcttttcctgtttttaataaattaaatcaaaggagaggggtggaaactgtatttaaaaatattctctgttcaagcacagttctatatctacattgttgcatttactcctcactacaattttgtaaagtagaggttattatctcatttcataccttaggctcagaaaaatcacatgagtttgcaaacatcacagtcattggcaggcagagacaggattcatatccaggatgcctggcttgaaactcatattcctggtgcttcctcatgttacctactgcaaggtcaaacatgctttcttatcctatgaatagcttaagccagaaatgctaatgagtctgccttactttctctaaccattaagtttcagtgatacatgtttccacctgccagatacagtctcactgatccttggagcagatctgagatgatgaaccaaccctgcctcatttttgtgtcagtttgcactttttggctagtgtcactacaggaaacgtgttataacttaactaaattgctgatgttagtaggatgcaggacaaataccaaatgcccttcacagttctcacgtgggctttagtttgtcaagtaagcgattttcatttaagaatttagagaaaaatgccatttcatatttctcaaagtaacaaataaaktcttcccaattgctccttttaattatctgtttcttacattgtasctggatagctttatggtttccaggagacttatatcaccaagatatatatttttcttcccaaggaacttaggctgaagaacttataccataattcaataaaaaaaatcttatgttttcatagaaaagacaytttgtatgttctattaagattgttttatagcacgtggtatttcagctttaacagccaacattacagaaagggttgtataatttaaagtagcaagaaaggaatagagcctaaatggggtgcttctctttgccacattctttctatagctctgtgacattcaaatacatactgtgaaatttgtctttgctgccatcactggtgtatgaaatgtgttattttctgtgtaactgacacaggccagatcagagtatcccccttccctggctcctctcttccattccctgtcctcctatgccttctaagcctagtgctgtgccctggcaccctggcaatgagctgtggacaaggatcactaactatgaagcaggtgggcatacagagggagaagagccaaattcagtacaatcatataggatgaattatgccaaagggtgacgtattcgtgaaactgaaattctcttttatttgtggcacagacaagacataagcgcatgctgatttatctttttaatgtagtctggcttgggcagagcagaaatgaaagtttctctaggctcaagaaatgggtaaagacattgagaacatcacatgtttatcaactttcaagattacgttaaacaggtaggagaacgtgaatatacaagatggtagaattatgaccctggcagcctggagttgtgggtcaaattcaaaagtggaagttaaatgggaataaatgtaatgttcctcacttcctgagaagctgtcacatagcgtttcctaattggctctaaaatagagacctaggaccaatagctgaattataaaaaggcagatttcatcagaaaataagaaatgattataaacatttaataaaattggatgcttctgtgacagttaattcttttcatagaatgcaaacaacaacaacagactagaatgaattgataagaaaacaagcttttgaggagagtggggatggggtaggaaacrcatcagagaggatctaatattcatcttcaattctgagattctgggaaggattctgtgacacaaactatggttttgtgayggttgactttcttgaagagtgaaaattaagggaaaaacagaattaaaagttattttaaagtggtatacaatcatagagtagttcaccaataatgcatagtatacagaaataatcttttatatttgcatacacatcccatctatagatcctaaactagttagtaatgctacattaaagtagctaggaggaaaaatcgactttcccaggtcagggtgtcagtaatgttattttcttgagttaacatcagcgttcttatcaacttccattatcaacatcatcattatcttccatcagcagcatcgccgttattttccatcatcggtatcatagctttcacaaatgagagatgtattgcacagtaaaagacagtagagtacaggctctgcagctagattgcttaaattcaagccctaggtctgccgtattccacccatataaacttgggttaaattacttagtctctctttgttttagttcccttatctgtaaaatggagaaattagtaatatatgcttaaatcagcaaacacatgtgaaagcacttaaatctgcatctggtatataatgttcaatacattttggctattatttttatttatattttaaaaaattatttagcaatgattccctaacttgacaggtgaagaagctaagaaccaaacatgttatgaaagttgcttaatgatacacattaatgttgaaataacaattcaaaggtgtkcctgtgtctggtcctaaatcttatgcatttcttggctacttaatttaagctaacacattgcaatacctaaatagcaactgaagcgattgtcaaccaccgacacaacttgacaaaatgcctagatactagtaatgaacccaaacacccaattcattgcttcctccctactcatcagtcacaaagttgaatctacttgtagatatacaactgaccttaaattgatattttatattccattaccatattccattaccacccttgtaatgctttattttccttggccctttgcagctaaacgtcaagagaagtgtttggagatacagtgggttacatctgctgagctcgtctaatattttttttttctttcttcagaagagacatggctrttcttaccaccaaaagacaaatctgaatattgtaacaaccattctgagtactgtcactaactgccactgaataactggattacctgggaattgttagtttcaattagttctatgaaaatcattgactggctttaarttcacttaaaagtgtaaagaactggaagcaaagagaaatagggaaatggccacatgaggcaggaatggaatagaaataaccttttaaatcaggaagatattaatatgaagtaaaaacaaaagtagatttttaagcattatacaaaggaacttaaaattcaattctgttcagaggccatttactgagcatctgccagacattgtaaagaccagctgatcattggtaggaacagaatctctgttctaatgagatcttgtgctccttctaactgccctcctcactcaaactctctgaggtcttatctgggcccttgcttttttgcctgggaagagtctactttgatcctcctcctgacttcattctttccaaacctaatttatgctccctcttggatcttttttctcaccaagacaaaagtgtctactcccatggctccrgaaactttctataaagctggactcatgcacatttatgaatcacccaacagaagagctgacggagtgaatcacacaaggttttcagattgccagaataggaggaacaatacgtgtcatattttttaatgaacatttaaagatacagagagcctcaggggacacactttgtaccaacgttcagagaatgatgcttggaactatggtgcccatctataaagccacctatgggcatgccagtggaggacaccaccctcaggtgagtaagccaaaaagtcctttattttcactagtataatctcgttcataaattaaaaatggtttatgattcattaacaaagttaaaaaatacaggttgattcttggtaattgcaaatacatattttaaatttatataatatataaatatactatttttaatatgtagatcttagttcatttagcctgatataacaaaatatcgtagactaggtagcttatttctcacaattctggcgacagaagagtccaagatcaaggttcaagcagattcggtatctggtgagagctttgtcttctcactctaacctcacatggtggaaggaaaagaagtctcccttgggcctctaatataagggcagttgtcacaatttcaaaggtctttttagaaaggcactaatcatatccaaaagtgacctattcacttcccagaggccttatcttctagtactatccctttgagggtgaaaatttaaacacatacattttagggaaacataaacattcaaaccatatcaaggtataattttaaatgatttaaaatgtgatagagcacacatggctataaaacctatttgtgtaattataaaatatttaatatagatacatgtttgtgatataatttatatgtgttttatatgacttaaaataatacaatatgtatttttcactgacaaaaatttagaagtgtacgtacacggaaatactaggtggaagtaaatagagtaatatacatatttcctcttttagtataaagactgagtaattttaattttcttttttgcttttccatattttcccattttttacaataaaaatatactactttttaaattaattttttaaatgacaaaaatcaatggaacctttaagaggtaccaaaaaattatgaatctattcatgcctgatgcycagtcttcacatgttatatattaatatgctaattatttaaagaacaataaatcattgatgtactttgcatggcaataaaaakttagcatagtctttacagctatatgattcctcgtgtgtcttataaaatgctacagccctggaaagaagagaactttttgtaaagaaagtgatacattaaaaacttactacaaacatagttaagaagaaacttttgacacattatttcatgatagaaagatgataatgtcctcaactctgctactatttaatatttttctcatatatactccttaaaatcatcagggaaaagataggaactcatccctctacatctgatgttaatacaaataagtacaatcccacctagctttcaaaccaaattagtcagctttaccacagtgttacgtacagtctcatgctgcaattttttttttatggcattctctctgtctggaatgtcacttctccagtttgagttagatatgtctaaatcattccttaatgttccgtacacatgcctttcattcatgacaattttcctgatcctttctccaatcctcagaaacagaagcaatactttttctaaaaccctaccaaagatctaaacctctcatacagagtttatcacttttaaatcatgcattaataattatttatgtgcctctcttatctcccctaatgctcctaatatgcacttgttttaaattatctttgtacttggcaagtactcagaaaccattgaygtgacaaacgaatacatgtgggttctgcaattcataaatggccctgtggccagatcttgtatttccttagtccttcctttatcaatcttctgtcttgctgagataaaacctgtgtctgctcttgtgtctagcattctgaaaccatttgttattcactaaattaaccatagaytcttttatattttttgccacragtttcctgagcttcaacatattattttatatgtgaatgaattaagaaatcatataaatgtgggtgaattcagttgctggcactggaaaattagaaaatgcttgccttcaaagctcctgtcctacgagattagtgccctgtagattttttactttaggagaaaggtaacaatgtaagtgatgagcaagttcacagggtatggtttactcaattattgatgctttgatgacaaggcattggggcaaaaattcatttatttgatgaaggaagttccattgccaggtatayagaagtgaaaactgcctcagccagaagttgcaaccacttgctactggaattgaagaaggtattgacattttaagtctgyatgaattgacttggtctctctaggttacatgtcatcccagctaatgttgatctttttttgtttttttgtttgttttatttttctaatcaataaattctcamacttggttgattttttttggattgatgttgcttttttgttrtttttttcaggctccatctttgagacacaatcgaggagtttttttcagagaggccaatgtaatttccactgatgtcaaaaagtagaattatgcttttaatatttaatgtttctcaaggttctacactctgtggcataacttgtgttatttcctgtatactagtaaataatagagaaattactattactagaataatagaagcgattccactgtatcatgaagaaatttctttatgatcaccaatgccattttagtgggtgaagtgagccttggaaactgaatcatttaaacagaagttagaaatatttcttaagtcttttgccccagggaccaaaacaggactttctttccatgtgttttatttggccaaatatagatgtaaaagttagaagaaacttgttatgagttctctaaaatcatttcataatctgcttgatctctcccagaagggatacttgactttcctaaatgtgattaagtttcagttcaaaccacctcaccttattacaaacacagaattcttcttaactcaggatctcatttggagaagcttgagaaattctgactagtttcaaagagagggcagatatggtgaggctaaagctgtcagtcaccccaggcagctcttctcagtattaatcttctagatttctccttcctaacttgttgctttccaatacagctgtcctttttaatcatttttctatttcttaatggttttctgtacacttttcataggtaatttgtccatgctagctattaacaaatagaactgtgaaatttactttcaktctctcaaatccatttaatatcccttgtatatacctctccaagatatcctcatcaatctaaacaatcacatactatctgagtcccactacaattggtagcctattaacctacatataagaaactagtgattctggctccttctgggtaggagaacttgtagctcgtggacaaatataaagattttcaatgtatatccttaactaagcttatagaatatctgaatattctagcatgcataagtgttaactcttgaagatgttaatatttaaattttaaaacatgatgactcaggattctacccttagtgacactagtagagactgacattatgaaattatgtaatttcagctatgtgtttattagctaatgtgtctcccttccagagacccatcatcaattaacccagatacaatacacacctccttaagataatgttttttttggaaactgtagacaacaaattctgttcacatactttatatacaaggacaattctgctaataagagctgcatataaaacatgcctctgggtccagtctgtcttggacaagcccctagaactctaaagaatggaacacacacacacacggccatatatatacacacatatatagggctatatacatacatatatatgtatacatttatgtgtatatataccttacatgagttctgtatatattatttatggtaatattctatgagagatactataacatagctggggaaaataaacatataaatcttagaagcaggctccctgggtttgaatcctactgtcctgtgcttattagcacttaaagttatgtaattttcttacattttctaggtttcaggattttttaaatagcaaattggagataagaataatgtctaatcctataggatgagtgtaagaagtaaaggagttaacttatgtgaagtacttggagccatcctggcacaggcaatatactcagtaagtgattgaccttttgcctatgtgtgcccttgcgtatatctgatttccgtttctaataattaccattataacttcatccagtctgctctactgcccccaggccttggtagaattctaactactgatcacattttcaaaattaaagaagctcttccaatacccagacctgagaggacttcccatagtcaaaggtactaccagaaaaggatataaaagtacctgccaatcttctcaaccacctagcacgttaacactaaccacccatatttaaaagtggaagtcaactatttcatagtcagtcatctttcaaaagttcccctcatgctctactgctctacccatcatttcccaatcttaatctcaggatatattagagtattttcatgagtttctaatctatctactgtactagaaaataagcacatctgagagttagagcaatgctttcctgtctttttaacactagccaaatgcaggtcactaaatccctgttttttgactattaggcacagaacaaatacattataaagtacattttatttaaaaataactttatttctatagtcagaaagctttgctcttatctaaataaattgctcatcagccacagaattttttttagctttactgttttctattcagcgttgtttgcagtttaactacttttttcattgaacaaagtgtatttaattgtaattacccttcccaaatttaattttgctcttctgtgcccacagctatcaaagcttttgaccccctggtctttctacactatttctcagttctccctggtatttgtaacttccacaaaggaccatctgcagatttaattaacttgttgaattctctttccagatcattaatgaagttgttaaataagactgatctcagagctcatctctgtggcatcttgatggtccttcaaccccaattatgcactatatttccctttaccatttcccatttccccttatttacattccattggtcgtattttaaaccattgaaagctcacgtccaaatcacttgaaattatatttcacataaaatttcatgtgaaatagctcttgcttaaaaaaaaaaaaattctgacttaactatctttagtggaatggcagtttatagtcccaatttcccataacatcctgcaaatttaaaagaataattcaaacatttaatatcttaaataatgctctattggtctttgaaattagataaatactctacttccaaaggggaaatgtctatctttgcagaaagtctctgttgataaatttttgtaaagagtaaatgtcatgcagtataaaataaaattgtattcattccattaaccttttttctttgaaagtggatgacattttatatcatatgactatctttatggtcagttatattattattgtatataagttatcacaatgaccaggacttcttgtgactttttatctatgggaaagaaacagtttcagaactaaggggctagcttttggttaaagatactggcttaaataatcatatttacccctacttttcccctcaaactctaacgagataatactaaagacaaattataaaggatataaaccctcttgggtaaagcacacaggagaaatgataaaagtaacataattttggaatctagaaaagaggtggatgaatgataactcacttagaagacaggagaaaatgactcatagcctggagtggagaaagccaagaagcaacttattgcataggactcagtaattggtggcatcaagtatctctgaaactatggggaacagtgaagctaaaataggaaaattaattggaagctagattaaaaagcagttagattcctcagagcygtttccttaccccagccaggctactgcctttcttttgccccagcaaacactagagatttagtctcagcagagggtaccacaaaggtcagaacatagttgagagcagaaatactatactgagacaggggtattaattaaaaatttacaaactgaattttacaatcttttgtcttattcttccgacctgactctcagaatgctagcaatcaagtttaattgctccagaaatttaattaatttataggattgatttctaggaaacagaaagactcttccctacaagatctgaatggttcaaaagaatgaacctaaaatcattgacatcagcatcccacataggtaaactgagctttaaatcaacttttcataagtggcactctgaaaaatcagcagataaccaaggactactgaatgtttaagaaaaggtgaagataagggaaaaatgcatgcacctgtatgtagtcccagtttctccagaggttgaggtgagaagatcacgtgagcccggctgcagtgagccattactgcattaccgcactccagactgggtagggtgagaccctgtctcaaaaacattcagaaagcaataatgaaacagggtagctacattgaatgaataactcaattaatttggaagataatgttgatgaaatgtctcctccatcaccccacaaaaagaaaaaaataataataaaaagaaaaatatgaaaagtaaggcagaagtaataacacaattagaaaagaaatctgaaaggtttgacacccaaataataagagttccaaaaataaagaacagagaagatgtaggggacatttttttaagtcccagaaatgaaaccagggatttttaagttgaaaggtttttcaaagtctccagcccactgatttaacaatagatgctcacaaagccacatcatcatcaaatttcctgaggatgaaaaaacggccacagtttctcagagagagaaaggtagagtttatataaattaacaagaataggacaatattaagtttctcaaaagttstactaaaaaatgtgacaayacacttaatcctacaatattctgatgaaaaatgttttatataacctagaattctatacccgttcaaactatcaattaagtagaaaggaagaataaaaacattttcagatgtgcaacatttgaacaacttagtttctatgcacccttcctcaagaagttaattgaaaatctgttctataaagataggggtataatccagaaaaggataaatacaaaggattcaggaacaggagattcaacaacaaaaaagagatgatgttgaaaaaaaacctcatggaaacagttgtgttgtagacagaaagagcttccagtatagaatgaagtgggcagaatgttctggaaaaatttatttcatggaattaacattataaaatatcaaatacatgtaaatgtattgggaggacattattattagcagagaatctgaggttgacccaacattgagtgaatgaaaaactgaacaaacagcaataacaaaattaggtaatcattaaatccagagaaagcaaacatttgtgtaataaagaagtaataatagccaacttcatagctcacctataaatattgcttacatatacataataaggtaaacactgaatactgatctaatatacagaatagagaaatgggaagtgtttgggtgcgtgcgcacgtgtgtgtgtgtrtgtgtgtgtgtgtgttcatccacacacactgtggatgagcrgtcgaaaaaagaactcctcatcttccatggtgggaagtcaataggtaacatctaaaactgaaaaaactctagaaatagtaatgtaaatatattatttattattattattattattatcattgttattatagagatgggaaagaaaatgtttgactctggaatagaataggagcaaggagctatagccaatcttatagaactatttgactttttaaaactttgtgctttcaaaaagaacaggtagcacaataaataaaagggccaaattcttaaataggtactttacaagccagtataaccaaatgatcaataagcatatatgttccactaggtaagtcattcagtgaagtacaagttaaaactataatgtaattaccacactaccagtatggctaaaatgaaaaaggcaggtaataagtaagtactgacaaaattacaatgcaattggaattctcatttattgttattaggaatataaatgggtataacaactttgggaaactgggcagtatctactaaaactacacctaagcatgcccagcaattctattcctagatatataggtatatagaaatacatacatatggtcacccaaggacatatacaagaatagttattgcagcaaaatascccaaactggaaacaacccatatgtccaacaatgaaatggattaatacattttgggatatccacaaaataaaatactaytccacagtgagaaataacaaattacaaccaattcacagcatgaataaatcttacaaatttaatgttgaacaaaaggatctggacacaaacaggccttatagtctgattcgatttgtacaacatttaaaaacaggaaaactgacctggagtgttggaagccaggagagtggttcctcttggtgtgcttttctatatayatatcatagttttcaaaagtttgttaactttttgtgagttttccagacctgcttttccctctttctgtactcttagaattatttcaaggcttgagagcagccttaaggaagggagagcagaatgtgacatttactaatccaaagttttactgaataatgattctgctaaaggttataagaattgaggagagaaagacagagtgacttaaatttaaaagcataaattatttttcaggaatactttcaacaatgcagatatttaataacttagaaaaccagaaactgcctattttgccatagatggacatcccagtctcaaacctaacaaacagctgtgtgattattaacatgttacctctttcaagcctcagtttcctcacctataagagagaataataagggcatagatcctataatccatttaagtactacaatggtggctggcacagacccatctgaaaaatactagctattgatatattgatagactgaagagtatgataaggttctctgcttagataaccagcaaatgggggactagtaactattaaaacatgaaaatacgagtgtagtgttcctgtcattggaatgtacttacttgacttaaaaataagttttccttgaaaaaaagaaagatgacagtgttcaaccagggaaggatctataggtatacatgaaactaattttagatgcctattcagaaatttccaaactgttggtacagtagatatctgagaacatctttccggaaatgttatttccctctgggttttaaaattgtatttctctggggatgtattacaccataccttaacatgtggggattttttaggataatgcataattattcatccctgttgaagaaagaggcatcattgagaagctcatgttgctttcattctacttcaagttcaaagcttggagcagtggaactgaatgattcatattagaatgaacttacatgaattatttaacctatatgaatgtatttctttgtgggtaatacgggaattaaacttacttgacactgttttgttgagatgctgcaaagagaaaatgtctttgaaagtgtctgtgactataaagaactatagaaatattagctatgactgataaaattgttcttgttctcaaatacagaagctctagataacagtttgtaccctatgactcttcactacctactaatttatattacctactgtttgctaattagactttctctaatttttataacaatattgggagatacagattgagaagttatataacttgatcaaggtcacatggtgagtggcaaaaaatgcccagctcaaaaaggcatattgtgaccccactgccccgatgtagaaatgccctgtggctacaggtattacaatgtcatctttctgacactttcaatataaaacctccatattaatgatttggcccaagaaaaatgaacacctctgtagaaggaaggctgaaggcagtatggcataccagaaaaaaaaaaaaacatagaattttaaacaccagacaagaatttaagttccagctgtccccttgttcttagctttacaaacataagcaatttctttaacctcttagcctcaattttctcatctgtaaaatcaggatgatgacagtaatataatcctcattaaattgttatgagattttttaaaaagataatatagtgcctggaaaaatgcactagacactttaaagatctgcactaatataaaatattactattatagcaatcccttacaaggaagagtgtattaacctaagaatgatgaagaaagtctctcagaatatcratgtggtgtagatggtatatagggttactatagtaacacactcagaattcagagttcaattgagaaaaaacacagaagatatgagctcttgcagttgtcaaaacttttgttgtattcagccttgcttttgtgagaagagtggtaaaggaagtttttaaaagcctgagctttgaggcacaaagagctgttcaaatcacagctctgacacctcctaatcctataatcttgtccgtactaccttaccagtacataatctcagtttacccaataaattagaataatcattgattcattcattcaataaatatttcttgagtgcaaactgagttccagggactgttccaagagctgggctgtagcagcaaacactgacaaaaaaatctctgcattcatggtgggtgaccatcaagtgggaggaagagacaatacacaagatagattagtgatacttttagtgtctttaatggtgaaaagtgcaatagaaaaaatgaacagcagggaaattaggtgctattatctgggagaagattcagtattgcaattttaatggaatggtagaaaatgccttactaatgagtgacatttaaatagagacctaaaagcaggttaagaaatgaatcctggatatatatggaggaaaaacaccccagaaagagagaacactaggtgcaaacgccctgaggtattgctgatatgtttaaaacatggtcgggggaagggatgtaaaaatatgtggtgaaattagacgagcaatgtggggtgaaggatgttggtcaatgctcaccttctggattatgaagattaagtggcatacatcaatcctgtagcacaaagtctagcttaaatgaaggtctagcctaaacattaaataagagctatgtcgtttaaatggttccttcaccattctgactctaattttcagagactagggaagtattggtactgtgaaagacactgggaaaaatatatgtacaaaaataaatgtaaacatctccaaaaggcgaaggcatagaatttatggagaacatacaagtgaatgcagtatttccacatagctggagaccaagcatctggaaaaatgtcagccttgcccttcagtgttagcatcattttactgaaacagagtaccataataatttgctgacagtagatttaaaagtgcttaatagtgcagtccgcagttctttaaccattccaatcagatggtctgctccaaaagaaactgctgggcaatttaagaaccaggaaaatactatatctggccatgcttatctgatcaggaatgttctatgaaagcctgcagctttgtctatggaaggaagtggggactcacttatcttcctgaaatgaatcatctagtttatgaatatcaaggtttttttaaaaaaagatgttaatgcttctgtcattcagaacatgatacgcaaatccaacatgtcctcatttatgtttcctataattaacaccttggaatgggaagaatggcaccagcaggaaaggaacaaaagaaaaatagtgtttcagtttggagacactctgggttaataattactacatagatttagtaatactttgaagggtttttttttggcgggggtgggggtgattagaaagggaagttaaacaaatgttggttgtaatacagggatgggtggtaagaagagatggaagagaaaacaagtaaacatgaaattaaatgtaatacattttatgaaggaaaaaccaagttgatatggagtgcactggagggaacctaatcttgagcaaggagtctgaaaagtatcttggaagaaaagcttacaatctatgtgagaaaataggaaaagatggggactggatattatgggaaggagaaggaaactagagaaagaaaatccaaagagttccagctagagcaataccatggacagaggcagattgttgctttgataaaatctgacaatgtttagtgcaggaggaatattgattaaaagttaaaatggaaaagctactcggagcgagtcattgatgctactgtaagaaggttggtgtttataatgaaagcactggaaaccatttaagttttttcagcagagaaaacatttgattatatttatattttataaggattataccggctgcaatgccggaagaacatttctgtgagggaggagtaagactggggacttgaagacttgtgttctgaaatcatttcaggcgtaaaacaaatatgagtggtttatactaggaggtaggatggaggggaaaaaaaagatgcactgtagtgattgattgaatggaaaagtgagggagaaggagacatcaaggataactctggctacatatgatccaaaaatatcaggaatgcaggcatgtgattgacgacaatatttttttatccttcccaagacgtatcataacagtattgtggctttagagactaatacgaaactaaaagagcttcttcttgttaaattgtctgctttttcagtaaatgtttcacacagttcctatgtgctaggtactaccctggtctccggaaatataatggcaaagacagaacccctgcccttctggagtttatwttctggctgggcagtgaagccatacgaaaagtactattgtgtcagagagtgataaaggctccgaagaacaataacacagcaatgggaaggaggaaatgtattattttagataggggtcagggcctgtctgaggaggtaatgcttgtgcagaaacgtttttcataggagggaggcgacagtgaaaatatctgagggaagaacattccaagcaaacaaagcagtaaggaaaatatgatgtgagttagttgaaagtaaatacattaaaaaattgtaataaaataatttttaaaaagtaaggaaaacataactgacatgttttatgaaaatgaagaagacattggaaccaacccaaatgtccaacaatgatagactggattaagaaaatgtgtcacatatacaccatggaatactatgcagccataaaaaatgatgagttcatgtcctttgtagggacatggatgaaaatggaaatcatcattctcagtaaactatcgcaagaacaaaaaaccaaacaccgcatattctcactcataggtgggaattgaacaatgaaaacacaaggacacaggaaggggaacatcacactctggggactgttgtggggtggggagaggcgggagggatagcactgggagatatacctaatgctagatgacgagttagtgggtgcagcgcaccagcatggcacatgtatacctatgtaactaacctgcacattktgcacatgtaccctaaaacttaaagtataataataaataaataaatgtaaaaaaaaaagaaaatcaagaagacaattatggccagaaaaaggggataaaaagtgagggagagcacastgaatggtgaggacaaacaaatttaataggyaggtgggcccagagtaactagggccttataggccattgtaataattttgacttttacgcagtgaaaatggggagctataaagaatgtgaagcagaggaatgacaagatataacttaggtttcaataatgtccccttggctactatgttaaaaagagactacaggtgcataacagtggaaggaggatgagttagaggttttatgccatcatctagattagagatgatgatgttgtcatgtaaaagggtgatagcagtggagaycatatgaagttgggatttaagatatattttaaaagttaagccaaagaatttgaatgtgcagtgcaaaataaagaaatcacagatgatttcaagacctcagcccagagaatgtgaaagattatagtttgccatcaaatataatgaaagaagacttagaagaagcaatatgagtctatggccataccacccttaacatgcccgatcttgtctgatcttgagaagccaaagggtcgggcctggttggtactgattagttagtaatattgggtattgtaaaaaaagcattttgaggggggaaaatcaggactattctggattactggaaacactcaataactaatttttctattctttttattaatatcatacttatgtataaatatatatacagatatatttatatatatatatacatatataaatctgtaggtgtgtaatagtcagaaagagtattccaaacaaaagctcagaggtttgaaaaattaaggtgcatttcagtgacttgaagtagtttagaatgggctgcagtttaagatttctttaaggagaagtaggagataaagctggagaggtaggaagaggcccaattatggaagtctttagatattatgtaagttggactttatcttttaagcactgaggaggtcctgaagtgtttttcttagtaagatattctttaataaaataatcttccaggatctcccctcatggactcaacctatttagctgaaattgctgccacccatagataacttcaaggtctctcttaaactggaaaatgctttaaaaccacgttagcccaaaaaaccgaatactgcttatcgtttcagacactaccataataaatgcatagaccttgctgtttgattaatcaattcatcatactttgtatctaagtgaatattttcaggaactactttttctgatcattcagtsagtcctactaggagcaaatgatgcaaatcataagagttacattccttctgagttaggctattggcttcaattagcctttttccacatgatttacagtgcagtgcatattcttggatacaaagacttatggctagttactagggaaagtttgtaacttctgggctccagttgctcacggtttcacagaaagctagattttcttcctatttatcctttgtgtttaaagttacagtggtgtttgtatttcccaggatataggattaaaaatgaggatatgaaccaaactcttgactttcacagttcagtagtgtgtgcttgcttggtgagaagcaggatctgcttgtcatttagtcaagaattattttctgcattactaaataggcaaggtaatctctaacagcttttatttatttgacagagaatgccaatctatttaaaagactagctcccttcattaatggtaaagttacaaagggccctatggaaaggtggactgacaaagctatttgaaatagaccaaaatttctattctattcttgttaatgacatttcttcccccattcttgatataatatactttaacttaggtgtcttttcaataaggtttgaattgaagtgattacaacttgagatctataaaatcaaaagaatggaccatgtgaaattgagggtccttgtctatacttattcatttattcatttatcaaatgtttactgaattcaaatgtaatgtaacaagatataaaaatctgatttttcccatgccagagttttgatagacaataatgtaatagttgttaaggatttctacgtcccaaagttgggtactaaactatgtttgcaacacttgtaaaaatcagttgtgcctgcattaaccattagtcaccttccacatatttggatgattactcccattttacatggaaaagctgaggttgtccctattcacattgctgatgagtagtggaatcggagaatagaatccaggtttcctgatgccaaattgagaattagaatgtttgcctttcttcaatttgaggaatcaacgaagaactaagaaaatatttgtagaaggataagtgggtagccttttgaatgagatctcaactcttcctatgtacagagtcacccatgctatcaataatacagtgagaacttgctgttaaatcttcaattttaactccaagagatgagaagtaaacaatagcaaaaaaaaaaaaaaaaaatcccttccagggaccatacccaagttaaacatgccactattccaggtgctgaatcagctcagtctttccccagagcagaactctgttgcataaattaacttttgttagcttgataagatgttacataaaatgtttgtgggaacagagagaatagagctggaaagatgatacaaataaaatcactttacacttgaattgtacagtgagaggttgtaagaactgatagaagaatgagagagacttcagtagcaaaagataaatataagacatggctttactgtttacctgctgagtatccttgggcaagcagcctattatttctgagtctcaattttatcccctggttaattaaagttatcactagctacaatttctagacactgtgttccaggctttctaccaggtattttaagtacaatatctcatttaatctcacaataaaattatgaagtaagtaatatcaacatctcttttctttttttagtggcaaaccgacacttagaaacgttaagtaaatctgatccagtgttacagagctgggtaaatagtggcagcttaactaaaactaaggtagtgtgacttcagagattgtgctcttcaccccttttttgtttactcttttcctgtcttaggcacaaaaatgttgaaaggaatatgtaaaacaatgcaaatgatcaaataagagattatggctcattactcacaggaaaacataatttactttacctcctgtataatctgttaagtttaattgcccttgggcacagacaaaatgatcacgaggtagcagattataaagcaaagtgtatgaaatttggattcagcaatacacgggttagaatctcaacttgactactgactggctgaatgacacttatacatgtcctcatatatgtccaaaaggataaaagtaactccctcacaggaaataataaatgcaaaatttggggcttacaatagatgtatagtagattaatgtaaatttcacttcacagaggcagatttagtatcaaaactcaggcctctgatcatcaatacagtactcttttcagtatactagactgcatctttattttctcgtccaaattcttgtttgtgaaaaaaaggcattgatgtttccagttaattgaaatgacttgaaaatgtgctgtttgtctggacaatgagagtaaaaacagctggagatatttttccatatgtctgcaacctggaaagatgaaaatccttgcaggatcaaggacagggttgtgaaatagcttcaagtgactctaagaactgtgtgtcaaccccatttttcatccaagggaagtatgctggatctttagcagagatgtcattcaagaaagaagaaaaacattgagtgggtagaactgaagagatgaaaggggttactgaacagggcaagacttctcagctgctccaaacatgatcacattctctcagtcttagcaggtttaagctcctctcatcttctagtttgatgcctctcttctgccattcttaatttctggaaacatccaggacaggaaattcttcaaaccatattcacatttacctgactttaatagaattttaaaagagcatttgcaaccctccttttactagtgggtttaactaaatgggcaatgcagagaaacctcaaatcctcatatttctctttttcaatgatgccatagaagccctgcttactcctttctgagcatcaggcacaagaaaagaagcaacgttgatgatagaagttgccatttactgagcaagtaatcatgtgccagacaacctgagaaagctcaaattgagaaaagttaaataattctcctgtctgctatggatgtaaagatgtacttttgcattcattctccccccagatgcccttgccacagtcctgtgataactggagaggaaatagaataaatattgtattctctgttatgggargggaataagtattcaccttcttaaaaattcttaaaatctcccccagtaacagggatgggtaaagcagttaccaatagatggatgctgatagggatctctcaaaatacaggcaagatataaaatatgaaagagcacagaagtctttgtttctgatcattctttttacctggtaaattgacaatatacttcaggcaaactattactctctgtctacatayctgcaagtccgcggggcacagaaaagagagtagaataaatttttctgcaaaatttttcctttagaaaaggttcaaaaaatcacaagtaactaagaaaaattttgactgttatgttctctttattttaagcttttaaaaatcatttgttattacaaacataatttaaatgtattattttgaaaattggaaaatcatataagcaaaacaggagaaaatcactcaaaattatattgtgaatgaacaaagctgttcaaagttgtttgctttttaccgatatccctaaatattcttgatcagatacttactatatttcaaaaacacttggatactgtgagaggttcaaagcttatgagagtttatttaataatagttacagtaaatgaacctatttctgaacaaatgyggaggagaaagtcaaggtctgctatttttatagcatcagcatattttttccaattattttatactagactgtgttctagcctacaacttgggtagttgtgtccagttctcagtctgattcacaaatcactggttatagatacctgatatctacacaattgtatttatacactctataattcatataatatacaatgtggaaatgtagtataattggcaggcttgtctgtaccactataaataaataacttgatttacagcccagtccaatttcctaccaaaaaaactgattaattgagtggctttgtaatacagaaagcatttcagtgcaaattctccttaaaatgtacaagtgttggccgggcacactttgggaggctgaggcaggtggatctcattaggccaggagtttgagaccctcctgaccaacatggcaaaaccccatctctactaaaaatacaaaaattagctgggtgtggtggagaacatctgtaatcccagctactcgggaggctgaggcacaagaatcgcttgaacccaggaggtggaggatgctgtgagccaagatcacatcactgcactccagccagggcgatggagtgagactctgtctcaaaaaaaaaaaaaaaaaatgtacaagtgtgtgtgtctaagtcttacaccataagagaaattctttcattattacatacatttaaatttttcttctaagaaagaggataagtatactatcttcctttaggagaacacaaggtttggagtcacatgttccttgggtgaagttggagaatcatgtttattccaccattgagagagggtgaacatagagtaggctgagtttccataccaacctggttcctaagactgtaagaaggtgtgcctctcatagcacatgatggatatcatccagtctctggctcttgaatggttaagcattttctaatcacagtaaaccctaagtacttctaaaaatgttcaagagattattaagtgtttttcttgtcaaaaaaagcttataattttcatattattatcaaataacactgagacatgattatctataatatatatatatacatatatatgcatattttttaaaaagactttttaaaatgctacatctagaccacgagttcttaatgggatgaaattttgtctcccaggggatatttggcaacgtctggagaatttttccttaattttactagagactttttaaaagctttatttaattttgaatgctctcaccacaaagaaacgacaaaggtttaaggtgataggtatgaaaacatttttgatggtcacagctggaggtgtactgctaattacatttcatggataaagtccagggatgatgttaaacatcctacaatgcataagacagccctccacaataaagaattatctgaactaaaatgtcaatagtgtcttctaggttaagaaatcctgatctatgacattacaaccagatcccacagaaatacaaaagatccgcacaggctattatgaacaccactacatacacaaactagcaaatctagaggaaatggatgaattcctggaaacacattatctcccaatactgaatcagagagaaattgaaatgctgaatagaccaatatcaagttccaaaactgaatttataataaaattctaccatgcaaaaatgccctggaccagatggattcacagtcaaattctactagacatacaaagagctgaccaattctactaaawctattccaaaaaatcaaaaaaagggactcttccctaactcattctacaaagacagcatcaccctaatagcaaaacctgacaaaggtacaatgataaaagaaaactaaaggccattgtgcctgatgaacatagctgcaaaaattctcaataaaatactagcaaactgcattcaacaggatatgaaaaagttaactcaccatgatgagataagcttcattcctgggatgtgaagttggttcaacaaatacaaatcaataaatgttattcaatacataaacagaattaaaaatgaaaaccatatgattatctccatagatgcagaaaatgcttttgataaaatccaatatctcttcatgatgaaaactctcaacagactagccattgtaggaacacacctcaaaataataggagccatctatgacaaatccacagccaacatcwtactgaatgggcaaaaactggaagcattccccttgagaactggaacaagacaaagatattcactctcaccactcctattcaacatagtattggaggtgctaaccagagcaatatggcaagaggaagaaataaaaggcaacctattaggaaaagaagaagtcaaactgtctctctccatgcacaatacaatcctatatctagaaagtcctaaagactaccaaaaggcttctggarttgataaatgacttcagtaaagtttcaggatagaaaatcaatgtataaaaattagtatcatttctatacaccaataacgttcaaactgacagccaaatcaagaacacaattccatttacaatagccacacaaaaatatacctcgaaatacatctaaccaaggaggtgaaatacttctacaaggagaactacaaagcactgctataataaatcatagatgacacaaacaaatggaaaaacattccatgctcatggattggaagaatcaatatcattaaaatggccatactgcccaaagcaacctacaaaattcagtgtttttcctatcaaactgctgatacaagttttcactgaaccagaaaaaaatattctaaaattcatttggaaccgaaacaaaaagactgcatagcaaagcaatgctaagcataaggaacaaagctagaggcatcacacactacctgacaacaaactatattatatggctacaataaccaaaacagcatggtacttgtaaaaaaagacagagagaccaatggaacagaacagagaacccagaaataaagctgcacacccacagccatctgatcttcaataaagttgacaaaaataagcagtgggaaaaagactccctattcaataaatggtgctgagatagctggctagccatatgcacaagaataaaactggactcctacctttcaccatatacaaaaaattaactcaagatggattaaagaattaaatataagacctcaaactgtagaatcctataaaaaatctagaaaacaccactatggacatcagccttaggaaagaatttatgcctaactcttcataagcaattgcaacaaaaacaaaaattgacaagtaggacttaattcaactaaagagcttcttcacagcaaaataaactatcaacagagtaagcagacaacctacagaatgggagaaaatcttcacaaactatgcttccaacaaaggcctaatattcagaatatataaggaacataagcaattcaacaagcaaaaacagataactccattgacaagagacatgaacaaacacttctcaaaagatgacagacatacaagcagccaacaaatatataaaataatgctcaacattactaatcattggagaaataaaaatcaaaatcacagtgaaataccatctcacaccagtcagaatggctattattaaaaagtcaaaaaacaacagatgctggtgaggctgcagagaaaagggaacacttatacattgttggtgggaatgtaaattagtttagctactgtgtaaagcagtttggagatatctcaaagaacttaaaactactatttgatccagcaatcccattactgtatatatacccaaaataaaacaaatctttctaccaaaaagacacatgcactcacatgttcgttgcagcactattcacagtagacattcacaaatatatagaatcaatctaagtgctcaatagtggagtggataaagaaaatatggtacatatacaccatggaatactaaacagtaataaaagaatgaaatcatgtcctttgcagacacatggatgaaattggaagccattattttaagtcaattaacacaggaacagaaaaccaagtacctcatgttctcactaataagtgggagcgaagcattaggtaaatatggacataaagatggcgatgatagaaactgggaacgactagagtgggaaaggagggggcaaaggctgaaaaactaactattgagtactgttctcagtacctaagtgacaggattactcatcctatatctaggattttattgcatcatgcagtatacacaggtgagaaacctgttcatgtaactcctgaatctaaaataaaagttgaaaaaaggattaagaacacacattaggatcaacctacattcacatccataaactcctgccttcttccttcttctctgtttggatgtgcaagtccacacctgcatgtgcacacacagaagaccatacacacacacacacacacacacacacacacacacacacaagacacacacagtcagttccacacagcctggtagctgaatcccagtttgtggctgttcaacgtcagataagtaaacaatatatcctgttccatgatcaagagtacaagatgtagggagtcaaagactaaaaccagaaaatttcaagggaagtttgagaggtatggaaaaggttccaaagcaaggagtttaaaatcagagccaaggtttgagaataagtaacagggttcacagtgtggtggttttaaaatatgcccacaaatactttgacaatcgtttttttaagaggtggtgcctcattcctctctccttgagtgtgggctagagtgagtctcctctaaggaacagaacgtggccaacgtgaacagcatttgattgagtcacaaaaagcattacagcttcctccttgctttcactctctttctcatcacttgacgtgcaggattccagtggccatgttataaggcctctcacgtagcctgtggagaggcccacaaaatgaaaaactgaggcctcctgccaatcgccacatgagtgagccatcttggaaacagactccccaaccttcagacaatcactggcccagtcaacatcttgactgcaatctcataaaagtccctgagctagaaccactcagctaagctgctctcaaatttcaaaccatagaaactatgagataataaacatttgttgtttaaagccactaaaaaaaaatagaaaaaagtaccaaatagaaaacttagtcttacatacttcttagagggtgattttctgctgttttgtggcagttaacatatctctggatttagtgtagctctttgattttacatgtgaaaattctctaggaggactttgtgttgtttcatgctgttttgtaggtggctacattacatccgtgtggcattctgtccttttagttcttagccaggttgagaagagagcattcaccagcagcccttttccatcctaagagtggcaaaactactcctcttactgattcttcactcatctttctctttacacatctccatgctaattgtaaaaccaaatcaaactaagcacacagagaaggaagttgaagggtaggagaagaactagaattatacgttgtttagaaaccaaaggaggcaaagtgtttgcttaaggggggttatgaaaagtttaaggttactgaaatttcatcaatggaaagtaaatgcagagttgttcatctgtgtgttacataccaaacacaagtgggattattaacatcagacaggaattttctttaacaaattatttaactgattttactaagtgtacttgaattttgaaaggctgaatattgcaagcaatgaataaaaccagtaactagggggataagagaacatgcttcagactaaacataagtggattctatatagctcaaatgggaccatttacttagtcttaaaattaaaacaaatcaaatgaaagatttagtgtaatcatgccacaagacattcacaattcatttgcatttttcctttggcactatgagtctcaaggcatctagcacaactatttgaaggcaaatagacttatttaatgtttattgctaatgatcaacatgacaaaataactcagacaagataatggcacagattttcagtgtttagcctataatttatttagatcccttgcacacaactgactgaaaactatgtactctattcattccatgaaaaatctgatagaatttgagtattggccaatattaagtggaatgactttgctacagatgaagtatagcattaaatgcagagaaatcttgttttattgtattttttccctttatgatgactgtgcaagagttcaagaatatgcaattctccatgtcaactttaatatttacatagggacccatgcttgcctatctctgtctaactttttccctggtcttgattttctcctttatatttttctgacttcacattacaaaccagactgtaagcactgatgcaatcacccacttactcagcagagaaaaggacaaaggacaaatcaagaaggcatgagacaccataatcaattcctcctggtctgctactgatcacaggmcctggtctaaggtaatgtttccctccagttatttctaatgtaaaaaaataagaatgttacagyagttgctatggttaaatatcctgaggtgcttggtgaaaatgcagattcgtgaaaccaccccctgatattccatctagtttggagaggtggcccaagaatatgtattttaataaaaaatccatctagtatccttgaaaaacccatgcaaggtttgataacacaggctttgtgagatacaactgtgttttattctcagttctaataattgcataagttacttacactagctaaattttagtttgattacatataagagtaataatatctaactcctttgtttaatcttaaaatattcatttaaaaatcctaacaattattgcaaataaatgacatatcattagtagtagtatccatgattattggcatcattattaccattctttccccattaattctgtgtattcagtttagggaaatacagcagttctacaggaagcagtaagaatcttttagtttttgttttttttttcattttaaaaaacctacttaaaattaaatgtagttcagtaaagacatgtgtcctaagctacccttaagtttctttgcttttagcaagaattctttagctctatgtggtaattctcttgcgctgcgcaaaggtagtacatggttctttcatatgttttttttaagaaaaaacagttattatttgttatatttttatttgttgataatgtcacaaaatatagaaacagtggtgcaaatattgttcactgacttccttactgaacaattttagttaccttttggcatgtctttaaaaggattagactgcctcataaatatacaggcagtgcaatataacaggttggtcagggtgagaaataataaatgggcacataaaaaaatgttatctaaattcagaagcttctaaacatgaaggaaaggaaacaagaactttgcttatatctctggcaccagatgaagacacctcccccgtcatgtaatagtaaggataataaatgcgacatcctatttccatttttctgtgctatgatatgaaaagcagtaagtgtgacattccagagccagaacaaaaacacaatgcagtgattttaccctaacaaaacacatggaagaacaaactgaaatattcacttttacgtgtcataaaccccttgtttgcactgacacatacattggcattgaacatcaaatttcacttatacacaaataggagggcttctccaatcaataagagttggatttcaccaaacagtgccaaatgtaaacacaacatttattgcaaatagaaagttgcacataatgtaatcttacttacgctaattggcttatattatcaggtctatgaatgataatgttcctaataaaccaatattagaataaaatctcaagcacaccaataaacctgctgctggaattatttaatgtggttttacgcaaggagcatgtgctgctaatttagmttccgttgacacagcagattgttataattctaataactgtgtgtgatgctacccagtagatgataagtgaggcaggtcagttcatcaggctttatctctaattagcactaaaaatgcacactgagctatagcagagaaaatacttgaccttgctaaaattaaatcgttggagggaaggcgaatgaagctctattttcagagagtgggaggcttttaagmaaggtacccactttgggagagctccatccaccgtcacaacacaatgtatcaagtcaacccacagtattatttctaaagaaagagctgttattctttctgaatcaatctttctaccaatctttgtccctatcccccataaaacaagctagattacctttctcrcagtggcttcctgtgaatccagatggacagacacatttgttgggagccacacacgttccaccgtatctgcagccctcttcacagaaagctgttgcaagagaacaaagtatttatcttagataaaatgcaatagataaattcacggtaaacagcaggagcactgaagcaattctttctttgttgcatagggaatacacatctgtattgatacatttaaaaattccatacagaaaaagaaataaatgtaataatacctatttcactggtttatatgaaatcaactgaaataacagatgtaaaatgtttagcatagggctggcatgcgctaaatggtagctagtagtaaccgctataacttttactctcatttatacatttgaaatcaaatagaataaattgagtaactaggaagggtagggtcaggatgaaggtaaaggcctttctaatgttcactattttgtaacctaatcttttccactatacatctcttatgacaataaaaacttttatgttctttaaaaaagatttctgatagtccatatagcttaatatttataatataaatgtaactaatcatttacatttgaatatataagctgtttccaatattttggtaataaaaacaatgccttgtcttaatagctaaaatgcttagcacaacctgaactattcctttatgaaaaatgcctcaatgtggaaatgctggtcccaagggtatggatttttaggttttcttgataagcattgcaaagctattcttactccttcccagtgctatgctgtcagccttcccagaccaggttagttcccgttagtacatacttgcatagcataaaatagctccatgaacctctccattgcaatagtaaatacaattgtaaatttacatataatttattaccatcccctgctttatcaactgaactgtaagacccataagaataagtagcataattgtttttactcaccactgtattgtagcctcagtatgtattcacatagcagatgctcaaaactgatttgttagatgaattaatctacattttacaggttgttctgatagtaaaactctcattctaacaattctgcaactcttccatccagttaatttaatatcaaaccttgctggataaccaagaatttagagtactaaacgtgcaaaatttctcattaatgaagatattgcaactgttaaccctgagtttattttattcacaagaaagataggtgagcaaatgttttaaattttaattgtagtttgaaaaagtcaccctagaaaaatgtcatggttatattttgccatgctcactcaaaattaatatgagtgtaacttcaaaagccacatgatgtgttcagaaagctgaacactattccaaatacgtagaacccctcacaatattgttgttttccacattatttaatatcccttgaatgatttaacatttcatagcttcagcaattaatttcaacttcctctgcctctgccaaaggatagtgtgtaccttagaattcaaacatcatctcctgtttctagcatcttagaacacttcgcctatgcaaaaaaaaaaaaaaaaaaatagtacckaccatggtaagttcatcacagaaaacgaaatatataaaatacacatgtagagatggaggtaaaatctcttgtcccaaaaattataccttgtgggctgtggtgactgacatttcaaagaacagtaaagtgtttttgcaagctaaaaataacagatggaaagccagtaagaaaaagttttaagtagcaccaaaagaaggcagggcttgaaaagagaaggttcagcttgggtttctttagtgcagagttgaaactgcacttcatctaagttttgcagacctggttaggagacttgatgctgtttcatcgtaggtatatgcgtttgatttactcagtctttaagtagaaatgatgatacagtggagggttttatgaggagagcacgagatgtctgtgatgttctaaggatgtgcagatattagaataaacagagtagtacgatgattaaataagttaacatttacaaagaacttaaaatggtgttcggcacatagtgttatataaatatcctgttaaataaaattagctgataacagaattgttatgactgtgaaacacggacacggaccaggaacaaattgtctaatatccagacaatataaacctgatactagaatacaatgtaatcatcatcatacaaggtgttcagcttcaccaagatgggcttaagacataccttttcatttatgcttgatttgtttcctaacaagggtagttttcattcttttcatggaggtatctgataggtatattgttcttattacagaaatggtgaactggaggctctgaaatcaagtgccctaaggctgcataggtagaaagtagcagagacaagattcaagtgaagacatctttgccttcgaaatcttaccccttccttgtttgttacagtgtgggttaatctacaatccggtgttcacaaaggcaggtttattttatttttaaaatagttccataagggctaagggaactgactaaaagttaaaagaaaaaaaaaaaaaacaatgcctaaattgcacatgtcgcattaaaggatagggatgaagagctattcaagttcatgtacctattatctaatttctatttttgcctgagactagtcacatttctcccaatctaggcacacattatttttaatgatctttatctgaaataaccaagaaatcattccctagttgaaccttagacaatataccaaagtaatttcaacacaaagcaaataaagaagggatatgtcatcaaaaacataaaatactttgtggaaattaagatcaattcaagctttctttgaatatgtaataaaatatcagaaatactgatgtatcttagtctaaagattgtgcacggattattcatatatggacaggctcttcttgattgactatgaactcagcatttcaatgaaaaggactctgatatgcagaggactggtaatttgcacagcattatttagttgatggcagaagcaaaacaaggagctgggtcaccgctacattgcctttccagtttgtgaggagatgggctggcagaaattatatggtcctaattctggctctatatttattaactgtatgaactacagcaaatcattccactcctctgtgcctcagttttctcaagaaaaaaagcagctgaggataataataacactcatgctggggggattaaattaagttaccaatgtagacccacacagcataaggcacagccaatggaatgtgctcacgaactggatgtgattgttgttatttatcaccaggactctgcttttccagataacggtacagttatgaaccagtttatgttctagattctaaagatgctgcagtaagacggcaaagatccctgtgccacggagcttattctttagtgaggactcctcgtcactccttccttaacttagtgccctttgtaatatcgtgtggtttgcaatgcaacttagaatcatagctcctttgaaaactcagagaaactcaggtaccatggatatgtgacttcatatgttggttcttcttcaactgctacccagattctgaagtgtggcaaaaatagattgtgtgtgtgtgtgtgtgtgtgtgtgtgtgtgtagtaagataaacctgaatctgtcattatagtgccatttgttattaacttgctgcactggaggagatgttagattggatcaactgtaaaatggtatgcttctaatattgaaagaactcttttcattgtgcaagaaaataaaatcacaaaattcatatttgagagaggttcaatccacagaaagagtacttttttatattaaaatataaaatattctcagcatgtaaaataaaatgtgggtattaaggggaacaaaatgagaaggtrggtttgcagatgccaggtttgtggatgtccagtaccatcaccatgtactcaattcaacaaaagcagttctacactaataaaaagtaatagcccttcactttctaaacacttctcataatcttcttaaagtttattgacatatatttagttcctagggacaccctgaaatcctgaaacagtaagtaaacatacaaatttcaacaccatctgttagaaggtaaaccttttcttccttcctagtttccttgaggaagaattttccttgaggcagcattttcctgaagctaatttctgacctctgcctgctgactttgctcattctaccccatggaggtggagggatttattttgttggtaaatttgagaaagataaatatcaggatgatgctgctcaagtggaagaggcagaaggatggtttgggaagctctatgtgcttcgatgcgacaattgttgcatttccagctttattttgggtagcatgttagtaggtatgaattatattattaaaaataactgtttaaataaataaaagctggcccctatagacagtgattacaaggtgtcaggaaccaaaggttataattaatttgaccatgtctgcctaaaatccaaaatgggaaggaaatcattaaaatctggtcatgttcagcaaaggaccatgcctgccattcttctttcttgagaatgagctgacttcagacattatcagttttccttacttctttaatgacactttcctctctggaactcagcggataagtcggccttcttctgtgttcatttttatcaagccagctcagtttacaaacagaaactcatttctccaacccagctctgtaaataataarggtgatatcatcacctttacatttgctttttggtttcattcctcaccttgttcagagcatatttatcaaacgcccctcaaacatttttggttgtcacaagatgaagggaggaacaatgtggtcctattacttggtgagtcgagaccatgaatgtttaaacatcctacaatgcacaggacagccctatatgacaaagaatgatctggcccaaaatgtcaatagtggtgakgttgagaaattctgccccaactttacacaattaagttgatgaagtgtcttcaggagcaaaattgtattattttaatcctgttttccattcctcccccctcaacctctcccccaaaatagtttaaaatatcgaggaaagataagagtaaaaatcagtaacatggccagttgaatataaaaacaaacatccagaagtctacratacttgcttttcatattatcattctcttctaaagcacagagtatattacaaaatttaattatttacttcaaaaatcacttttgacactatcagttactatatacgtttgtatcagcagttccagtagccatttccactgtcctttcaacagtaatcataataataatgacagcaatactaatggtaaattctgtttgttgaaaacttatcaaatgccaggcactgcagtaaagcctgatatcataattccatttcatccttacagtaacactgtcgattaatcatattatactcactgccagatgagaaagctggcttagataagctaaataagttatcgaagtttgcaccactgcacagtggcatcctgggtttcaagcccagagtcttaaccacatcactaagctttctccgtttagggctctaccacctactatgcgcagataatgtactgggtgttgggaagtctacaactagtcatgaaaattgtccccatccccaagaatctcatagtggaatagcagagagaaaggcatataaaaccaagcataataaaatgtgataaatgctactgcagtagcacgaacacagtgttgaaagaacaaagaggagaaaatgattaactatgcccggtggactgatgcaaagctgcgcaaaacagctagcatttgagatgggcctggaagaatgaatgggctttttgccaggtgaagtacaggaaaagagacatttcaggtcaaagttttgtcctgaggaaaggyacttaatagaagaaaatgaaaaggtgtttataactcacactgaggtgagaggctgaatatttaaaaagaatgcagtaagccattcagagaagcaggagcattttagaatctgtgaaccatccccttcaccttctcatctccctgctacctcttggatttgttggttaccttaaggcacaatcatttaccacctacatatctgcatacagacttttgccctgtctattatttgagttagtcagtttaagactatgcattgctaactttagaagaatatgaaataaaatttttattaaagacctttatatgcacatataaacagaaacataaaatgtattcttagtatgtataatgcattctgatattttctactctattgtactctattctatatcatttataaagtgcggctacgatccaatgacttgtttttgcaatccactaaaactgaagtttaaaaaccacttgtttacccttttagtccatagcattttgtgataggataggggaatgaagtcttttttttttttttttttttttttttttgagacagagtcttgctgtgtctcccaggctggaatgccrtggtgtgatctcggctcactgcaacctctgtctcatgggttcatgccattctactgcctcggcctcccgagtagctaggattataggcacccgccaccacgcccagctaatttttttgtatttttagtagagatggggtttcaccatgttagccaggatggtctcgatctcctgaccttgtgatccacccacctcggcctcccaaagtgctgggattacaggcgtgagccaccacgcctggcctgaagtcttttacattactcctgaaatcttcaaattgagatgttgctcttagttttagaaatatttatataagaaaatgtctacaagtgctatcttccatgaatgtaggtataacagagacaatatggcctccacaggtgaaaatatttattatccaggcctctgcagaaaatctctactatagaggataaattagatgggagaggcatgggttgaggagacagataatgcattcctctgcatttcatttttggccagtgtatatgcttctctaaccagactgtgagattcttagggactaagatcacattttttgcaattctgaattcctgtatatcatcttgaacctgtgtgataataaacatgtatttgttattgaagtaaatttattatatgagaaaataaaaattttgagaggatagtcttatagtaactatatcataatatttgagataaacatttaaagtcagatcaatccagcttaaaatatcaagagattctggggaagatggcggataggagacaaagctaacatgtagctcccacatgtatggacagaacagcatttggagactcacaccatgatcttttgttccaagaaccactgcagaaacataccaggaaaactgaaggaattcaccaatcctttgaaagaagcaaattctgtgaaacaggtgaaaaactgtgagtgcccaaaatgtgaaagggggaaaaacctacctctgaacacacatctccacttggcaatctgaaaatccagatcaccaaagaaggattttaccttacctagagatgaaatgggtttagggagtcgcaagaaatttgaaagtacaagtagcacaggaagtaccttgaacatactcccagcctccaacttgagccccaggaagccatcccttcactatatctcacaggggacctcggggcaggcaaccagtggaattgggaaagggtcttggggcaaaggaagctcycacctgaaattggcagtggttttgactgggtacaaattttcttgagtgaagtctgggggatgtgggagcatctgtagataggagctttctcagaagagtagctcatggcctggggcaaggcctgagcagagcactgcgggagtgagactggtctcgccaactgtatgggagctgggtgagacctctcgctatcccccacttccctgatgaaccatataacacagcagaggtggccaagatcccctctggaacataaccccattgacctgaggaccattcccccattctccactgtggctgcagcaagccccacccaaggagagtctgarccragacttgcgtaagcctcccccacctgataatatttatctacccaccctggtagcctaacacaaaagacaatctcttgggagttttatggcccatccctttgcctgagaaaccaaaatacttaccctggccatcttagggcaagcttagagccccctactactaccgcagctaattctctcttgaaagtaccacctcttggctggaggccaaccaactccattatagcaattcaggacagaataactctgatctcagaaagaagaagacgacacctaattccaatgcccacaacatcttggctaaccagaagtcgtaagggtgtctatgtgacaacttcactgctagtataaccagcattcaagaaagctagcacactaaacatatccacaaccaaggaccctcatagagtctacttcacttccctgtcacatctaacagagtaggtgctggtatccatggctggaagatttgaagaccgattacatcacaggacttttgcagmccccctctaccaccagcctggagcatggtagctctgctgggtggctagaaccaaaagagccataacaattactgcagtccagctctcaggaagtcccatctctggggaaagtgggagagcattatatcaggggatcatcctctggcacaagagaatctgaacagcaggccttgagtttcagacctctccactgaattcgtccactcaaatgaaaaaacaaaaaaagaaaagtaaaataattctggtaatatgacaaaacagggctctacaacactcctcaaaatcacaccagttccctagcaatggagccaaacccagaagaagtctctgaattgctagataaagaatttgaaaggttgattattaagctactcaaagaaataccagagaaaggtgaaaaccaacttaaagaaattaaaaaacagtataggatatgggtgaaaaattcctcagataaatagatatcataaaggaaaaacaatcacaacttctagaaatgaaaggmatacttagagaaatacaaaattcagtggaaacattcaacaatagactagaacaagtagaagaaggagcttcagagctaaaaggcaaggctttcaaattaacccactaagacaaagacaaagaaaaaagaataaaaacatgaacaaagcctccaagaaatgtgggattctgttaaatgggcaaacataaggataattggtgttcctgaagaagaagaaaaatctgaaagtttggaaaacttatttgagagaataatagaggaaaacttccctggtcttactagagatctagacatccaaatgtgataagctcaaagaacacctggaaaattcatcacaaaaagaccatcacataggcatgcagtcattagtttatctaatgtcaggacaaaggaaagaatcttaagaggtgtgagacaaaagtatcagttaacctataaaggaaaatctatcagattaatagcagacgtctcagcagaaaccttacaagcaagaagggattggggtctcatcttcagtttcctgaaactaaaaaaaaaaaaaaaaaaaaaattgtcacacaaggaatttgtatctagcaaagctagtttcataaatgaaggagaaataaaacatttttaacacaaacaaacgctgagagaattcaccactaccaagccagcattacaagaaatggtaaaaggagttctaaatcttgaaacaaaacttcaaaatatacaaaaaaagaaactccttaaagcatacatttcacaggacttgtaaaagaataacacagtgggggaaaaagaacaaggtataaaggcaccaactagcatgatgaatagaacagtacctcacatctcaatattagcgttgaatgtaaatggcrtaaatgccccacttaaaaagatgcagaatggcagaatggatagaagtccaccaaacaagtatctgctgtcttcaagagactcacctaacacataaagacttaagggaatggagcagataaagatattctgtgcaaatggacaccaaaagtgagcaggagtagctattattatgtcagacaaaacagactttaaagcaataacaattaaaacaaagaggaacattatataaagatgaaggatcaaacaggaaaatacatatgcacctaatactggagctcccaaatttacaaaacaattactactagacctaagaaataaggtagatggcaacttaataatagtgggaaacttcaataccccactaacagcactagacagattatcaagatggaaagtcaacaaagaaaaaatagacttaaactataccctagaacaaatggacttaacagatatttacagagcattctacccaacaactgtataatatacattcttttcttcaatacatgaaacattgtctaaaatagaccatatgataggccacaaaacaagtttcaatacatttttaaaaattgaaattatatcaagtatcctctcagaccccagtggaataaaactggaagtcaactccaaaggaacccccaaaactatacaaatacatagaaattaaataatctgctcttgaattatctttgggtcaacaaagaaatcaagatggaaatttaaattttttttgagttgaatgataatggtgacacaacgtaacagaatctctaggatacagcaaaagcaatgctaagagtaacgttcacagcattaaatgcctacatcaaaaagtctgaaagagcacaaatagatgatctaagatcacacttcaaggaactagagaaacaaggagaaaaccaagccaaaatgcagcagcagaaaagaaataacaaagatcagagcagaactaaatgaaattgaaacaaagaaatcaatacaaaagataaataaaataaaatgctggttcttgaaaagataaacaaaattgatagaacattagtgatattaaccaagaaagaagagaggaggtccaaataagctcaattagaaatgaaacaagaaatattacgacgataccacagaaatacaaaagatcattcaaggttactgtgaacacctaatgcacacaaactaaaaaatctagaggagatggataagttcctggaaatatacacccctctcagattaaatcaggatgaaatagaacaaaccaataacaattagtgagattgaaacagtaattttaaaattgccaacaaaaaaagtccaggaccagatggattcacagctgacttctattagacattgaaagaagaattggtaccaatctcactgaaactattccaaaagacaaagagggaatcctccctaaattattttatgaagccagtattaccctaattccaaaaccagtaaaggacataacaaaaaaacaaaactgcagaacaatatccctggtgaacatagatgcatacatcttcaataaaatactagcatacatcttcaacaaaatactagctaacagaatccaacagcatatcaaaaagataatacaccattatcaagtgggtttcataccaaggatgtagggatggtttaacatacacaagtcaataaatgtgatatatcacataaacagaattaaaagcaaaaatcataggatcatctcaatagatgcagaaaaattatctgacaaaattcagtgtgactttatgattaaaaccttcagcaaaatttacatagaaggaacatacctcaaggtaataaaaaatcaatctatgacaaacccatacccaacattacactcaaaagggaaatgttgaaagcattccccttgagaactggaacacgacaagaatgcccagttttaccacttctattcaacatagtgccggaagtcctagctagaccaatcaaacaagagaaagaaataaagggcatccaaatcagtaaagaggaagtcaaattgttgctgtttgccaattgtatacctagaaaaccttaaaaactcatccaaaaagctcctagatctgataaatgagttcagtcaagtttaaagatacaatgtacacaaatcagtagcactggtacatatcaacaatgcccaagctgagaaacaaatcaagaactcaatcccctttacaacagctgcaacaacaacaacaacaacaacaacaaaaaggccgggcacggtgggtcacgcctgtaatcccaccactttgggaggctgaggcaggcggatcacccgaggtcaggagttcaagaccagcctgaccaatatggcaaaaccccatctctactaaaaatccaaaaaaaaaaaaaaaaaaaaaaattatcagggcatggtggcatgtgtctgtaatcccagctactcaggaggctgaggcaggagaatcgcttgaacctgggagcagaggttgcagtgagcggagatcatgccactgcactccagcctgggagacagtgcaagactctgcctcaaaaaaaacaaaacaaaacaaaaaaaaccttacaaatataccacctagccccaaggaggtgaaagacctctacaagaaaaactacaaaacattgctgaaagaaattatagatgacacaaacaaatggagacacatcctatgctcatggatgagtagaatcaatattgtgaaaatcacatactgccaaaagtaatctacagattcaatgtgattcccatcgaaggaccatcatcattcttcacagagctagaaaaagcaatcctaaaattcatatagaaccgaaaaagaccccacatagtcaaagcaatactaagcaaaaagaacaaatctggaggcatcacactacccaacttcaaactatgctacaaggctatagttatcaaaacagcgtgatactagtataaaaataggcatgtagaccaatggaacagaatagagaaagcagaaataacaccaaatacttatagtcaagtgatcttctacaaagcaaacaaaaacataaactggggaaacgacaccctattcaacgaatggtgctgggataactggcaggccatgtggagaagaataaaactggatccttatctctcaccttatacaaaaatcaactcaagatggatcaaagacttaaagctaagacttgaaacctaaaaattctagaagataacatcagtaaaactcttctagttgttggcttaggcaaagagttaattaccaagagcgcaaaagcaaatgcaacaataacaaacataaatagataggacttaattaaactaaaaagcttctgcacagcaaaagaaataatcagcaaacagacaacccacagaacaggagaaaatattcactaactatggacaacaaaggactactatccagactcttcaaggaactcaaataagtcagcaagaaaaaacaaataatcctttaaaaagtgggctaaggacatgaatggacaattctcaaaataagatatacaaatggccaacgaatatacaaaaaaattctcaacatcactaattatcagggaaatgcaaattaaaaccacaatgagctacctcactcctgcaagaatggccataaataaaaagtaaaaaaacaataaagatgttggcatggatgtggtgagaaggaacacttttacactgctggtgagaatacaaactattacaaccactatagaaaacagtatggagattccttaaagaactaaaagtagagaactaccatttgacccagcaatcccactacagggtatctacccggaggaaaagaagtcactttatgaaaaagacacctgcgcacacatgtttagagcagcacaattcacaattgcaaaaatatggaaccagcctaaatgcccatcaaccaatgtgtgaataaagaaaatgtggtatatatacagcatggaataatactcagccataaaaaggaatgaagaaatggcatttgcagcaacctacatggagttggagaccattattctaagtgaagtaactcaggaatggaaaaccaaatatcgtatgttctcactgataagtgggagctaagctgtgaggacagaaaggcctaagaataatacaatggactttggggatgcaggatgaaggagggagcggttcaagggataaaagactacacattgggtaaagtgtacactgcttgggtgatgggtgaaccagaacctcagtaattaccactaaagatcgtatccatgtaaccaaaaaccctgttccccaaaaactattttaataaacaaattaattgtaaaatattatcaagcatctactatgcgctacagtattattatatgctctagtaatatagatcctgttctccaggatctttgagtctaaaacagtgtttgcgcggaggacaatgccccccatttgcaggagatatttagtaatgtctggtgacactctcagttatcccagttggatgtcacaactgctactagtgggtctactggtgagcagaaaccagagatgttgctaaatatcttacaggttagcagtacaggacagtcctgcaacaaagaattatctagctccctatctcaacagtgtcaaaggtgaaaaaaggcagacagtccttcattcagtcattcaataaatatatattgtgcaccctctctgtaccagagattactcagaaccagggctcaagtagttaacagaacagataaaaatatttctgatgggtttacattctcatagagaagagacagaataaataaatgtttatattcttatggagaagagacaggtaaaataaatgtgagacataggatattagatgatagcaagtgataggagaaaaagcagacacagtgtgggaagtgtgtcagtggggaaggttgcaattaaatagggtgacatataacgggtgatcactgaaaagagatcatttgagtagagacctaaaggggaaaagagtgagccatgaaattatcaagcaaagaatgttccaggcaaaggttacagcaagtgcaaaggccccaaggaatgaagtgtgcagatcacgtagtgacttagagatccaagcaatactgcctgtacaagtcaagaggaggtgccaagaaggaaaactcttctgaccagaaggtcaagaatggctccatagaactgatgctgaatttgaaaaagtttttatgaatttaaactctccagaatgtagaaatgaaagatttattaaaaggaagggcaattcaacagataatcaccaagaacttaggagtgaggagtatttaatcctaaccttgtggtcaatcatggacacattttccaaaacaactcaagtacctgagtacttcytccatacagcctttggcttagtaaaagcatgattctagaaacagatctatcttctagtcctggtttcacttcttatttgctgactgattttgccaaattgcttaatctctatgaagtatcaccttccttatctgtataatcaggtcaataagggaacctgtatcatactggtaaaactggaattaaatgaggtagtgcatgtaaagcacttggcatagtgcccacccatagtgagtgctcaaaatggtgagcactttttaaatatatcagccccgttttctctaggttaattcatatagcagagaattttcttctcaaatatcaaaaactctttgcagtctgcctctcactaactggtgcacacatcagtgtcagactttgagagcttgttgggcactggaatcaacagcaaggaaaatgatgkgacattaagacaaaaaggtatgaagaggaatagaataaaagatgatgttcacattytaacatgcaaaattcaagaaattaattcaggactccctaggacactaaagcaacatcaaattatatctttgcagtaaaacctctgaaagcagttcaaaatttggcattcaacatttacaggagcactaggaartgggagcctgaaagggctatctgtgaaaagcagttgaagagaaagccccaggtaagaaggtcagaaggtttcctattacactgctatatcagagccaaygcttatattagccctggaggtcacagtctagagacttttaaagagataaattccagcaaactctcccaggtaaaagcattctgcaactttatataactgcatggaattacatgttaaatcttgaaagaaatacgaatccaacctgcagtgatagtagctgggtaattcgggtggaccagagttctcaagagagcttctttgtttcccatctccaacctgaaacctgaacaacttctcagatttgtaaagcattttctgcttttgtttaaaaagcacttcacaataatcttaaaaggtaatttgtaattatatctgcattctggagttggggaagctgaaaggagaaaagttagatagctagcccggagaaagttaattatgaggctgagamtaaattccaggtgctgggattctagtcacacccaggattcagcagaacatcaggtgcctgagaagcaatgccagtttcacccaatgagagaaacctggtttgaagttttaactaagtgaagcgggaaggagaggagagtagaaagaaggagggaggaaaagaggaataatacaaacaataaataaagaaaagaaaaaaccatcatatctcgcaacttagccatcatatcctgcagacaatactgtccctgcccctaaccccaccccttcaaatacttaacacatgcagagacttggtctttcagacaatgggctcctggatgtggggagcctcgcacaaatctcacatatgccattttctagctatgtgacattgggctcatctagaaactgcggtaagacttatcttctttttgacaaaataaaatgttaaaacagcaccttctttatatagttgttgtgaggaataatgtaaccacasgtccagcgttaagtttcagctgcttcaaaggtactaattattgttgacatcattggtttattagacacatacatgtggggaaagccatcttgggaaaaatacactgatgtgagaaattaaggcaaatgaaaccctaatttatggggttaacagtctgtcatatgtattttgttgaaaatttactacttttaattccatgtttgaagagctcaaccaaggaagtaagcattagaattattaattatcatttttagaaaataaagaattcaaaagagctctgcttgctgtagaattcaaaagcatatattcgacctttctttggctgccttcaaagtcaaaacccagggtcctcttaagcgagcgtgtctgattaatagctgctttcatgctgcacacagccgctggcactggagcccagygatctgcctttctagatgtttagctatatctcatctacaacatgggctgcccttgttcttgtgctaaagttatttttgaaaggtttaagctcaaatccctcaaaatgtatttctaatttataggcagcatggtggaggtaaaagcatagtctgtggaaaaacagacaaatctggatttaatcaccacctgtgtgaccttcagcaagttacctcctctgtgcctcagtttcctcacttgtgaaatgaatacctcttcttcaagttgggatgaagtttaaatgacaagggaaatatgaaagtaagtgcctcatacctcaaagatttttactttccactgttcaccagtagcaagttctatagccttatccaactaggtatagttcctcaatcatgctgaatttgctttttttacccatctgtttagtccacatgatactggccatgaagggatcaagcaagatgccttgtctgactatttcctgagggtgctataatgaagtttccataatgttcatctttctgcccaactggagagctattctcaactcagactctcagctggaaaggaatctactcatgtcctcatgttgagatctttaaagtgcttctcccatatccacagtatgcagaaaacatggaatctcattagtgtattatgatcaaaacaaagaaaggacaggcacagagtacccaggtaagagggacaaaaagaagtggcatctcacggcttcatccaacatttgcagagtacacaggagagaagcaaagtttcccagagaaatcatttaataacatttgggcctcaaggactatattctttctttctgtaagagtaataagaattaaggacaagagagctcacgtaagaaaagcagtttgcaatagaaactagcctatgggggataagaacatcactgaacaggatccaaaattgatcaaacctgttattaaagccacaccaattaagggccatccccaatttatttgtgtgtatttttcgtgagaagaaatgaggaattaatatcagacmccactgcagcctttgtaatctgttttaagtaatattgcacttaaaatttattgagtttttcctaataaagcatggacccagaaattctcatcaaacattttgaatgcttctatgaatttcccagttaaaaaaaatcttctatgtattgttcatccatccattcaaaaactatcaatcaaaatactactatgtgccaagtactctcctaagcacttaacaataacaatgatcaaaacagataatgttcctggtcatatgcaacttatcctctagtggagaaaaatataaactaaacaaataaatacacaataatccaaattatagtaagcgatacgggaaaaactaaagcagggtaaaggagataagaaatattggtagaggggttactatttatttaggatgatcacaaaaggcctaataaactgacattttggcacaaacataaaggaagaccgagaacaggccaggcagatggtgtggtgatgagtactctagacaaagagaatagcttagcataaaggcttcatggaggaccatacttagtatgtccaggaattgcaaaaaggccaagtgagtcagaggctgagttgtaggagacggtaacagaaaattcataaagcatcagttctcctacggtcattaggatgtttaaagactttattttattgttctgaacgcaattaagaagcattggaagattttgtgctacagaatgacattatgttacttaggtttcaatagacgctctctctgactaacgtgttaagaaaaatagaacttgggctggcataagcaatggtgaatgcaaataaactagttaaaagctattacaataattcaggagagaaatttatggtcccctcaatcagtgtgatggaagtggagatgtgagagaagacaataatctatgtactacagagatccacagaaggtagaccacatagtagagatcagatctttgtccggagtagacaaaactgggtgagcagcatatctctttccttccacctatagaattagaaatttaaaaagtttcttttttttttttttactggaaataatatggactgcatttacacttacttttttctgcctgcaattatttttcccattagtaaatcaggtaactctcacttgacctgcaaatctcagctgaaatgttccctgaactgggaggccttgtaattacctgatgaccatctccagtcccagacctccagtctagcttaaagacctgtattagcttcccagagtcgccatatccaaattaccacagacttggtgacttaaaccaacaaaaaaaatattcactcagtttgaaatcaaggtgtcggctggataggttcacattggaggatctgaaggaaaatctgttccatgtgctctgtcctagcttctggtggctgctagcagttcttgatattccttggcttgtagcattataactccaatctctgccttcatctttatgtgactttcctctaggtgctctgtgtcgaattgccctctcattttccttattactgatatcatttatascaatccaattataccagtaattggatttaggacccatgctaaatccaagatgataccatcttaagatctttaacttaactacaccggtaaaggtcctattcccaaataaggtcacgttaataagtaatgagggttaggacttggacatatttttttaggtccactattcaacccagtacagagtccctcctgtattcctccagggaatctttgttgtactcatataacatttatcaaactgtcctataattgtcttcccactgatctgtttagcctaatagattcttgagcttctgaaacatacagatggtgtctttcaactctctgtctccagttccaagcaaaattcctgcacataatacataatcaatcactccttattgaataaattaattacaaatcccagagtaaacttaaaaaaccagcagagttagcgagtctcaccaggccatttaaacctgccagaagagtcactcaggtgttttcacctaatgttggccttttataaatgctttggcttctattttgttcttcarcagaatggaatgcacaggatgaaattataaacatatgcattgggcaatgaagtttttttccttttggattcttaactatatggacaatggtatttgttaaatattagtggttattaaagttttttttttttaaaaagatcttgctcagtagttaaatcatttttctcttcttttattagccattactagtgctgttagtttccatttgatgattctcaaaattgggatcaggaacttccaacatccagaataataccatatccaatagttatacccaagaattactggcattaagaaagactatcaaagcagtgagcatgagagaaaatgtctaaataattaaataaagtgaatcaaaatatcatccaaaaatgttttaattctgtctcaaatcagaaaaaaatggatgtgatgatcactggatataaaagtttgaagcctcccaagcatgactgctgaggtgtcctatcatctatcagatttttaaaaattattggctatgttkgacagcaagtaaaaggtctaagtcttaattattttaagaggtgcacagttaattgaaatgattacaatatagtagattgtgaaacatttaataaaaggccatatcaaattatattcataatattggcttcatagggcattattgtaataagatacagccatattgaggacacatggacctatctaggatctcagacttatgttcactacagtaggtcaccaagctaaactataatgcagcaatgtactgcaacctacactgtagcatttgcacaagcagcaaagatataaaggtctctctatccacagacaatataacatatacattcccaaactcaagtgatcaaaatcagtctcttcctctgattcactgctttaaaaaaaaaaggacactattttactaggaaaacacaatagactgagttctgtattattttttcaaaataaaggcatttcagagtgacagaaagcattgtagatttaaaattaaaaccaataaccataacaccatgaattttcaaaaccattttctggggttttcagcaaagtcttttttgaatgcagtacattccctgagcagtttttcatgctgataaaactaaggttgatgctcccaatacttgccaaatagactcaggcaggtgtttgtgaattacatttccctgcaactatatagaccatggataggctaactattgtcwtacatgttaatgcttttccagcttccataaaataatatcactgatgagtggcacatttcaactcctacagctgtctaaggcatcacacatataccagttgccttaaaagcaagaatttttttttcctcttgttattttctctttccattcacccaagagttgtagctctaatacagaatcatcctctgtgattctacccaggcacatggttgccaaatgaccttttgtgctttcctctacatctcattagtgttggttcagacacacctgatttcctgttatttcactcctctgcataaagacctgtgaaggctcttcgtaattacttaaagaagtgtttcttgacatgatatatgaagccattcataatctgaccccagcccaactttcctaaagtttctcttaatgttttccatatatgttacctaattgtttgataaacaaaattctcctccagaaagtttcctagtatttcacatgactgttcactctgtaattccttccccatttatcaattcagccttcaagacttagtagtcctatggggatttttccaggcccagataaaataagtcattttttgctccatgctaccacaaccccttgctggtatcaaagccctttaaaaatgcatttagcatgtagcatgtgccaggtaatgtactaaacattttaacactgttttttttcttttcttttaaccccaccccaaaatgccataaggtaggtgctatttttatccaaacattataaatcaagaaataaatgcttaaatatcttatcaaatttatatagctcatgaatggtaaagcaccagacacattttattaaaattattggtttacatgtactttacttttattccagcttacaaaagagaaagagccctaaaatcctcatttctgtatctccccyagagctcagcacagggtccggtacacataagtaagtgaataccacatgttcagtgactaactaaaaggatgtcaaattcaaagaacattctttgttctaatatattctaccatatttttacatttcatcttatatccaaagtcttcactctactgaggaaatagaagtaaggtttgggaaatagcctgagcatgcctctacctcctaatgttatcttaatgattctatctagaaagccatatcttatattaaatagaaaaaattattctggaagacattgcaacccaagttgcacaacaataattcaccctgtcttggagcttctagccacatcaggtcacaacactccttgtcctgtcatatccttgttagctcagccttttcagttccaaagctttatcctccattctctttccagctcctaagattggcaaccttcttttgaactacttacttcaaatcagacatgcgccccttttctggacacaatttggtcccttggctccacatactaccaatgccaatataaggcaccggtggttaccttccactggctcccaggactctgcctggaaaaatctgcacttgactcagctccaaactttcaagaagggtgactaaatggatagaaattcttactaataataatgactcagtatttaattttatatatgtccataatttgttaaaagataaaattgaagatcttaagaaaaatgacacctctagtaaatgtcctgttatggtttcttttgttgttgttgtttgtttgttttaggcagagttttgctcttgttgcccagcctggagtacaatggcgcagtcttggctcactgcaacctctgcctcccaggttcaagcgattctcctgcctcagcctcccaggtagctgggattacaggcatgcaccaccacactcggctaattttttgtatttagtagagatggggtttcaccatgttggtcaggctggtctcaaactcccgacctcaggtgatccacctacctcagcctcccgaagtgctgggatgacaggcatgagccaccaagaccagccccgttatgattttattcttcaaacaagccaaactcttttccactttagggcctttacacttgttgttccctttgactagaacactcacctccaagttgttcacatagctcatagcatcacttcattctcttctccactcaaatgtcaactcctcggaaatgscttgcatgacctaggatttcttaaacaacaccactgccactctgtgcctttaccctgctttgtcttccctcacagcacttgtctctccatgatgttcaagtgtcagcaacagcagcagcagcattgttaagtttatagagcacataacttttgccaaagattgtcttaagcactttatatgratcaggcatataatctcctaaactagcttaacagttggttattattattgtatgccacgttataataagaggctatagaggttctgtaagttaccccaagatcatctacatagtaaatggcttttgagtagagttagaaggtgaagtaggagtttttcaagtaagtgagagagcaaggcattttagcagtgaacatggcataggcattttagtgtgtgtagtgaatattttgtgattttttcctgttaagcatctatgcttcattaatagtcacacattatatatcatatatattatatatttaatttgatattataaattgatattatatcatataattaatatatatttgatacagcatatatatcaaatatcatacattatatattatatttatcatatatattattatatcaaataccacatattattatatatcatatataataaattatatayaatttatttaatattttaaatttaataattgaattatattgatataatttatttcaggaatccctcttaccctttctctccatttatatggcttgggtacagttggctgcatgtcccagttccaagaatggaagtatataactcaatcaattcaaagagaattttttcttgatgctattgtggggttggggctggtgggaagtactcttgattcaatggaattcactagctaatataattctggacccagcagtggccatcttttcttcttcttgttagaacctgcctgagaacaaagtctaatgcagaaaaattcagatagaaggaaagaggagagagacagaggaagagagagatgtttcctcacactaatttggaagtcttgagtccagccatgcttgctctatccctggatttttagtttcaggaaccaaaaaatccaaggtgatcttaagccagtttgacttaggtttgcaacagttctcagagaaacacattttactaatatggcacaaaagcaggctatcatgtatttgggaacttcaactaatagtattggtggaatctaaagtgctaagaaaaagttataggacatgaggtttgaggcagaagcacactgtgattgcaagtaggtaaaagctgatatgaaggtgccagttattcctattgctggtcgtgcagatctcatacataaggctgtaagttctgtgaaaaattcaaagcacacaaacagtgatattgaagaaactgctctggaacatgaaaaactcatttgggaaaagacatcttctatctttaggaagatgatttattttacagcagtcagcgaagtcrtgctactgcagaggttatgcagcattaatattgcatgttatagtagacaaggcatagtccaatagcatgaaacataatgtcttgggatgatactaggacctgtggtcagaagatctgttttcatgtcccagcatctttccctgagcatacacccactaagtgactgaggaaaagtcacttgacactcatgaaatggagagaatggcccctgctctgtcaacttcacagctttggagatgtctaaataagatatggatatgcaaatgctttgaaaatagtaaagctttgagaaaatgttcattaatgttaatgttgtcagaaggtggggatagggtacacttaaacactcattttgtgtgtgacattgagcaactcattaaacccttgggatttcagtttatttccttctaagaagggattggacttaatggtgttcagtgttccttcaaactataacattatttcagtcattccctaaatcttcctttkcagaagaggcaaatagcccaaattaacaaagtgactaattggaatttttccagaaggctaaaccaagctacttctgggctcaatcacaggtaaatcccacagtcagcagcacctacagctacaacatgaatcacagaagcagaaatcccagtgttaactctgagccataaatgggttcaatttgcataaactattcagtttaataaagcagttagtttattgtgcattctttgggaaagacttcaataaaaattattaaaattaaaggattaaattacaaggaaaattcacttagtgttgacacattttttttttcctggagaagcagaataattaaggtgctcataaaacaacaactatcattgcagagcattttcacagccaaaaattgctttgaagtycactgaaacactaataaggcaggcaggtataatccccattgtaaagatagaaaaaccgatgcgttggctatcacttgattcacagccaaaacacagagttaacaggtagaacagctggaatttgaaggttgagtcttttgacttccaattctctttctattaggttatatttcctctttataccatctatcccagacttacaattaaataccactgctattccttttatgttatgcacatacaggatactgctgagtttttaaacagagaaaaaaaaaagaaaattgttatgagaggcctagaacagctgaatgttattcagctgagttcacatgagtttgctgtctgggtttacacaaccaaatacacattaaataatactatagcttctacaccagatttcaagcccagtgcccacatgtatgactgacagaactcaattagtactgctctctgctgcctgatttcttagtgacaccaagttatctcagcatgttatggctgctgaaatctctctaccagctcctgctgcaattgagtattgattgaaaaattctattactgtacttagttacacagctttcaataaacagttcacagacaacactggctggtttcaaggaaagccacaacatttgagggcaataggatacccgagaaaattagaagccttagatgctcagacagaatgcgcagatctctgtgttagaatgtgacctggtaatttagtatgtactgatttgcttctgttcttcaaatggggcacatctgcttggtacaaaattaaaaatgttcaacagcaacctgattatacttcaaataaaagcaagaataaaaacaagaatcagcacctggcacatgatgatttggagggcatagtacactcccagttcaattaacattgattgagcccctcctttaacacagacactgagctaggtgctacagaatctaagaaagataagaggatccccatcctcaagaggcttagattaggggttggcaacctacaacccactggagaaatccaccctgccatctatttttttgtaagtaaactattggaaccacagtgaagctcattaatttacatattgtctttggctgtttttgtgttacaaaggcaaaactgggtaattttgatgaagaccatatgctacacaaagctaaaatatctaatacctggttctttacagaagaagtttgcccacccatggcctagactgttgtggcagcaacagacactaatggatgatttgaaggcaatgtcctaaattcctgataatcagatcacagagtaattaaaaaaacattaaggaagggtacctaagctttccaaaggctgccaagaggaagtgatgcatgagctgtgtctaagagattgagcagagtaggctaggtgaagaaagataaggaaagagagggaggctgcaaagcagatgatcctgcacaagccaaagtgcagactcgttgagcaacgagatcatgaatcatatacatttgtgaaaatgcatcctgcatagaagcagctgaattatataagtcttaagaggaagacagggctttggacatgaagaatcttgtatgccatgctggggagtctggactttatttgtatggaatggcaattagagtaaacaaaggaataatatagtcaaatttatattttgaatagagctttcttggtgcaaagagcagtatctattgcaagagacaaaaccaaaagctgttagacttaggaggcagttgaatagtccaagcgacmggtctctggggcctaggctgtggttgtggtgagctttscattcaacagtattaaaagaagaacaacaaagaggaagatgtgcttcctggaggaatttccttataaatgatgctaaccaaaaacacagtcaacatttctgcatctgatataaagagtaatggaaaatcactgtaaggaatgttcagtggatactgaatgtaataagaaaaagaagagaaaggtaaccagtagctcagcatttgtttggcaccagacacaatgctaagttcctcacatgcatactattctctttctttctctttctctctctctctctctctctctctccctcttccttcctttcctatctctttcytttcyttttcyttttcttttttttttttttttaaagacagtctctctctgtcatccaggctggagtgcagtggcatgatcatggctcactccagcctcgactacctgggctcaagtgattctccctccttagtctcccaggtagctgtaactacaggcacatgccaccatgcctgctaatttgtttataatgtgtagaaatgtggtcttgctatgttgcccaggctggtctcgaactcctggcctcaagtgaccccccccscmacttaagcctctcaaagcactgggattacaggcacaagccaccatgcccagcagtatttaagtctttctattgctataaacagataagtaaatgctattgcacccatgttaaagtgaaagaagggatatcccttgagattatgtaaagtgcttagtagggagcctgggacatgacaggtgctcaaaaagttttggcatctttccttacaggaatgtttgaaaaaattatccttcctggatccaaccaggaatgagggttttatcattcaacagatgttttttatataccttctctcacccaggctttctgtaggcactccacatacagtgaagacaatggtattacagaagttacagtccatggtattgctatcgacaactcatttaggttagtgaagctatattatggaagcaaaaatcatttagagagtttgagtcaatccatatattaataactcatacacataaacaagtttatgtgaaccactaacagtggaaatgtttagaaaacgtgaacaagaaaaatgagatctcaattgatttcttctccaaaaaaaatgtattattacatataaagatttctttaaaggaactctaaaagctctaaggctctaaatttcaagtgaagttytcttgctctttctttgaaaccagtatagattatacacaagttaagaaagtgagttttaagacttggttcctcatttagcatagtgtgatgtgtgaataagcagttaataaacgccttttgatagatgtaatggcttggtctggggaacagtttcagctactggccatgcgctcttagctggagaaattatccttctttaccctccagtatcaattcactcccgattaatataattcatcacatatactccagactcctacagtcataaacactaattactttgaattaccaacatgaggctttgtttacaaatgcctgagtttcctatttggaatgattcccctttgcctgccacacactcatgtgtaagaattaaaaaatatgtacagaatacgccaaatatgaactcttgctttttggtgatatgaggaaaacacagagatagaatagaatttctcatagtcaatagtttgttttgtagttctggaggcttatggtgtaactctccctttcctgaactctatcacaatgtagatgtcaaacctgcaacattctgcctttgytgatttctagtggtcttacgaattagattagtcttgctgaacactgtaggcgttttcaagaagaggacatatcatatttctttttwtcagtcagtgctcaacccaggtctaactacacacttatttttaaataggaataaaggctatattagcttatatttccagggaaacagagctgaggacaattttgaatgcttactcattataggggggcagagatggagttgtcacaatccaatgacagcaagaataagagaatgtgagaagtatggtagagaaataggtacgttgatttactagtgttgccataacaaagtaccacaaatttggtgctaaacagcataaatttactgtctcacagttctagaggctagaagtctaagatcaaggtgtcaacagggttggttccttctgaaggctacaaaggagggccattttcatgcatctctcccatcttcacaatctttggcattccttagcttgtagaaatatcaccccaatatttgccttcatcttcaaatggagtgttctctctctctctcattctctctcattctgtgtgtgtgtgtgtgtgtgtgtgtgtgtgtgtgtgtgtgtaacccgtcataaagggttaggtgcccaccctaccctactccactatgccctcatcttaactaattatatctgcaatgaccttatttccaagtaaagtcccattctgatacacattgggttacgagttcaacacataaatttaattcaactcataaaagtaggtaaagctggctgggcgcrgtggctcacgcctgtaatcccagcactttgggaggccaaggcaggcgaatcacaaggtcaggagatcgagaccatcttggctaacactgtgaaacaccatctctactaaaaatacaaaaaattagccaggtatggcggtgggcgcctgtagtcccagctactcgggaggctgaggtgggagaatggcatgaacctggggggcagagcttgcagtgagccaagatcgcgccattgcactccagcctgggcgacagagtgagactccgtctcaaaaacaaaaacaaaagcaaaaacaaaaagtaggtaaagcaaaaataataaccttgtgtatgatgagctggctaaagctttccaagaaagtagcaatggtttcttggttaaataggataactcaggaaagccactgtagagcctctgcatctctgaacagtttctaagatgggaggaagacagaacaattcatggtctgtctccttatgactcctgtattcccttaaagtttgcctcacggagcatttactgccctgcaactccagttgatgttagccagcccctgtggagcttttggggaagctggggcctctwtaggtctagtcaggttggacttggacatggaaactgctgcagcttctgccagagctagcatgatgaaggtggccctaaagcctggcacttgagcccagaaaggtggtagaattagtacattcttattggtagctacaattttgattgtgggaatggcagaagccattgttcagcagttccagccaggaaacagagcaagtcaccaaggaccagcggaccctgattgcctggagaggtgcctaaactaggtctggtaaacatgaattttaaaaaccaggaaacataattatcagtattggcactgacacgatgaaaagaaatgtaccagtttggagagttagctatagtgagtgtatttgtttccttgggctaccataagaaacttaatgtcttaaacaacagaaattcattgtctcacagttctataggctgaagtctgaaatcaagctgttgtcagtgctctgttccctttgaaggctctaagggagaaactttccttgactcttcttagcttctagtggtggtaagccatcagtatcctttggctttcagttgtgtaactccaatctctgcctttacctttatacggttgtcttgctatgtgtacctgccttcacagggagaattcctcttcttataatggattagggacatcttcatgattttatatgaacttaattacatctgcagttacatccctattccacatacagtcacattcttaggtaccaaatgttagaactttgacaatatttttgaggggacacaatttagcccagaacagtggggattagaatagggcttcagaactggattcagcgctgattaattatttgatcttaggtatgtatttaaatctatttagactggagattccatctttttaaaatgagattagtggctcttaatgtttataggtggacccttctccataaaaatgcatagaaccaaatacacacaaatgtttctggggattcacaggcttcctaaagcccatccctggatcactgagaccaatctctgctcctcttgaaactttgcaaagttacagtcttgtcatttacttccatgctttataaacattttgctcaagttttatgagcctttccaagtcctgctgcagggatagctcccttcagacattgaacaaaaaaaaaggaaatgtttgtttcctccgtgcaagacaattcatgccagtagtttcaagggatgaatgatgttggctattttatgaggattcagagtgtctctgttcctataagtctggggtaaatcctcatgaaacaaaagagtagtcrccatctgtacccaccctggaaaccctggaaactctggggtcaataaccttttcaggaacatttatagatctgggccttctctagaatagaaaatctcacacattttaggctatacagagaatcccatgtccatccagcaaagtctgagaacctctgacacgatgcacatacccagttaaagtgtgtgtgatgggcaaccatatgtattttctccaaggttctccatttgtgattgtcctctctaaagcagaaggattacactttctttacctgtttaacatgtgctcacagtgctctgatttgcatttagcaagcactgttgagtgtagaacaatattcaatcaattcccacagcacaacacctgtcgaaattgcatgacaccggcattttatttttacattgcattgtcattatatctgtacatcacatctctctcacaggacggaaagcaacttgaagttaggaatcatgtttgactcttacatattgctcaacttagaaacaacctgtcacagaatagcaggactagggcaagaaaagcacctagggcacacagtttaggatgcattcacccttagggtcatgcaagtattctataggatagatgtataatttgttaaatagtggctaaaygcaaaagaaatacaaaaaggtgaagaaagaccagcactgaaagaaagaaagaaagaaagaaagaaagaaagaaagaaagaaagaaagaaagaaagaaagaaaagaaagaaagaaagaaagaaggaaagcaagaaagaaagaaggaaagaaagaaagaaagaaagaaagaaagaaagaaagaaagaaagaaagaaagaaagaaagaaaggaaagaaagaaaagaatgaaaagcgggaaagggaaaagcagggtgccagcaggaaggagggtagaaataattcgtgggtcagagacatcattctctaaataatcacttgttcttttacatatttctcagtttcccttgtagctggcctgggccatgtgactaattctagccaatgggctatgagcagaagtgacaggggccatgtaagagctcctgtatgctgtctagccttcttttctgttgttgcagtgatcttggaagacatattttccatttggcatagctataaaatggaagagcawgayccaaagcatatcagattttatgtgagcaagaaatacacttttatagaataagctactgagattgggtgatttaccattagaacaacatagtttttctatcctgattaatacaaggacatatcaaatstgatggatggaattatgtggacttttgttcctacattatttttcatcatagaagaaaaaacaaaaagaacccagtttattatgatagtaaattatatagactgactagtacacccyaggcccctccattttggttccattttcaggaaatactgcactctgtactctcaagctaagtaccttgaaaactgtcatttcattaagaaaagcctaactagctgcctatttctacttgcatgaagaattctttccatttcaacaatttacagaaaagttctttcttacaacatcatctgttcaaatgrtcacatattgtttaactgagcataatatttgctgagatttcacatgcaaaattggtctcaaattcaacccaggtatctctttatttaagcattattctctcagcatctcaataagattctcaaagggaataacttttatttcctgtgatttctagaatttaagttgttcttccaatacttctttaatataataacttcagtaattagaatttttaaagggccaactgagtacagcagtgaaaaacagacagtaaaactaaaaaaagaagagttcaaatacaaagcatttcattctgatttctgtttaatgtgtgtgtgtgtgtgtgtgtgkrtatatatatatatatayacayacwcatatgaagcagtaagtgtcatgccaagagcaacatgttagaagaaaaagacctgaattctagtgtagcctttgtctgttcaattaactttatgatcttgagcaaatccactgtttggtccttcttttttttgtgggggcagataattttgagaaaaccaggttagactggaaagcaaagtggaaacaacctagattctgaatagaacagtactgggtataaaacctaacttgcccacttgttgactttgtcttgggcaagccacaaatttctacaaacctcaagtgattcactgttaacaatgggtacaaacgtatggagagttgtgagcttcaataagatactgtatataaaaaggcttagcacagttcctggctaacagtaaacactaagtatttgtgtttctgtaagttctacatagatgcaggatgttgttcttattactcatatatacataaaaaggttctagtttaatgtctaagggcaggtttaatgtcatagcctgagaaagtttacgaaaaaaacactgaggctttgacatctcaataacagtttttataataaactaaggttgtatataaataatgttgaaaaattttatatgtattgaatagtgtaccttaattaatgctatataaatgtccattgttgatttcrcatgaaattaagactaaaacagatttgtagtaaactatgttaaggcctaatatttatacagaactaaagcaaactttgcttaagaatggcaggctttggtgtctattgcctctgtcttttgggctgggctgaacatgcaaacagagatgatttataaaacatgttaaggccatcagtcaattggctctctcatccattaagatgtacttggcatcatatamaaaacataatggcttgaccaaaattttacttgctaactgaatgttgtgtacaaatggattygmgtttttagagggtggggaaaggacctaataatgtcataagctttatttgactgtcttcaggtagacaacttcccagatgccctgacagtggggatccatctgcttctgaaagatcccctgtgaagggaatgttttaatytccattggcagataacaaataaaaggcattggaaatttcacacccagatgaagggtgatgcttaatccaaagtgatttatggcttgagccacacgattattattgacaattccttgattagatctttggcattttcctcagtcatagctttttcccactctaaataaaataggataagaaaaaactcaggtactgacacaagtaataggaaagtgagaaaaatagagagagagagaggaaatagttaaagtcaaattgattgcataaggatatttgtccttttctagctcttgatgwaactgcaaaaaatayttagaaatatctataggaaatatctcaggatagaattaaaatagaatgaataaaattcagaacacttttaagtgattcaggcatttaaaatgctattttaaaacatttcaacttttatgttttgaaatatcttccatattatgagttttaaagggtaataagtggtctttttttccttaattgaatttgattccacttttggagcctcttcaaatggcttaatgtgttcagagaggacaccatgcctctaattctgttgacgcaaagagattttttttaaactgtgaaacaatggataaccaaaacaacatgtttgctaatcctgctctgggacagctaggcattttatctgtttttttctcttcctctttctgctccctcagtacctgctctcaatctccttctccagctgcctcagcagatacagcatattgacatacaatatattgatggattaacccagctcctggtaaagcatctacacaattgcagttactcaacgacacagtcaccagaacattgtatgaaaactaataaaatggttaaaattctcagaagacacaaataggcagccaaattaagataccagaaaattgtaggcgtgagggtatgtattccatacatatttttgaattctacaaagatataatagaaatagaaagaaagagagagggacttagaaataggggaaaacagagagacagagacaggtctcttacacagtcctttaggagaatagtgaccacagaaattctttaggtgggggtattatcttarcatactctattatgaatataatgtttgtctaatcagacaaactgtagcctgtggcctgttttcgtaagggctttgtgacttaattttttttagatataaaatatttttaaaacttaccaacaaggcattttggtaagaagaattgttccattttgcctattggctcaaaaagcctaaaatattactgtctttctctttaccaaaatagttttagactcctggcctccaatatttaccayccataatatctgcacttctcctttgtagcattcattatacctatgttctttttatgctctaatgtttgtctattcttctacacacgttccttgaaggtaggaataagttctatggtttttacatatcaatgtcctcagtaccaaacacagtgcttaagacatagaaatcactcaacaatgatttaatttaaaaattaataaatgaatgaactccaatgcacatgcagaaatttctatggcccttaagtaattgtgtgttccaacccaaaaatggacattaaagaagaagggacctgccccaaatctcacgactcagcagtggagaaaaaggaatttcaattcagtgataccaactccaattccagtaaaattctaccacagacttcctttgagcaaacaagaaaagagccaattttgtgtgacctggtttaaacatatgtgcatggagaatagataagccagggacagcagtcacttactggacaaggaaaagtgacacaatcactactaggtctccttttcctcctcatcactttccccagccaaatgcttcaatgctttagtgaatctctttacaaagtccaggagctgaatatagacgacaacccatggtgacagtaaatggaaagagatktatcgatgggaaccatgtgatgaaactaaatacacacatatgtgtatacatacatatggaagaaagtttgaaagcacataatccacattatgctatttaatttattacaaagaaagcaaaggctagatcatatgacttcatccttgtctactcaaactgcatcttcatcttttaatctttctatttctatttctataatcacaacaatgatggtggccgtagtgatgatatggcaagaatggtttacctacattgtctgatttcaccttaaccgtaacctagaaagaaaggaagtaaatgatagaattcaaaactaggtctttctgactgcaagtctggccatggtatccattgtcttaaatgagaaacacccactttggatgctgctttgccctttagtctttacatcctagtccttatgtcctcattttcatttttattggttttaagcaaattttaccttttaaaaggaagcacacagtattatctgtcttaatcttatatcwcccaagaatgaccttaagtccatggaacaaaattgatatacatgaattctaaaataatgaaaaatgacattcaaccactttcctgtgatatgcacttattgatttatttataccacatcattttctacaagttgtttaaagaaatttagaataaaagacacacaaaaccatcttataacttataccaaaaataatctyagtagactgaatattaattataaaaagtgaagcccctcaaacacccatgaaagaaattctaggaaaatgtttgttctctagttggaagaaattattaaaaaaataatttcagttatataaaaattaaaatatggaaatcataaaactgtaaaataatttaaaagtgaatgacacaaaggaaaatattgttagctaatacaacagacaaaaatcaaaattttgaatttttaaggagcttggtcaaataagaaaaacacaaagccacaaaaatcaaagamaggacttccacttcttcccatgaagatttagtttgtatgagactataccttctaccataagcaatcataattgtataaaatatataaaacaactgttttcagacatcaaacaaggagtagcaaaggatataatgacacatagaagggatacaaataaagggatccccaagattgcctcaactttgtgtctgcaggtatattctagaaaaatggcataggataagcaactctaaacagggcacagtactcttgctgcaatcaggagacaatgattagagtttgaagaagccaaggtgactggaattaagggggcagagtacctaacaggaggaaactgtacagagaacastttggaaatctccataggagcccccttggacctttgaaygcaaagcagtgcatccttagaataatacacagaaaagccagtcaaagaataaccaatggggcattatgacaagaacgtatggaagcttaataagtctgggagacattaaagttctgatcagtaagagctgagagtccagttgaatacttgagtaattcaatagagacctcagaaagaccatctatagaaatagttctagaactaactgagccctagggtaaagtctatattagactgacacgaaccaaacttagaaggaagcctcaacatgccacaaggggaaagagckccaaagagctcctcaaaatcactgattttatttagaaaagagagtggggaagttcaagctttagggcattctcaaaaaccaggaagatttcaacaataagcaattaagagaaggctgatacctccataagagcaataaactaaaccacaagtcagctagtttatcagagtgaactgggaaagagacagcaataaagagacctcctgtggttagaacatacttcaaagcctggcctcaaaaaacttctgcaaagaggtctgaaattaattggatcagattgtagggtaatttatttcccacagcattgtccaaaacaataaagtgactgactgaaaattagcaaacactaatacctgagtgtattaccagtagagtcaggcagtttaccagcaagaccaaagaagggaagagtcaaggatagttctgagaaaactactgtctcccagagtgactgtgagcatgccaaagcctgcatcctctgaggaacaacatcagaggctttacactgctttacactgccagtgtcactaaatttattcagccaagtcactaaacaaataagcatgcaaataaayaaaagataagaaaaagcagttttagggaaggggacactgctacattatattatctaaaatgcctactgttctaaaaaaaagggaaacatgcaaataaacaggaaagtataactcatgcacagaaaaataaaaataaaaagcagacaacaagaggtgccatgagaaggactagatatgaacatgacaaagactctaaagcaactacaataaatatgttcaaagtactaaagaaaaatatgcttagagaggttaaggaagatatgagggcaatatctcatcaaataaaaaataagaattatttttacaagaatctaatggaaattctgyagtaggaaactaatataactgaaatgaaaaatgtactagagggtctcaaaaactgatttgagtgggtagaagaatcagctaacctggagacagacgaataaagattatgcaatctgaacaacagaaaagcaatgaagaaaaattttaaaagtttcagagatatgaagaccaccattaattgtaccaatatatgcaaaattggggtgccagaagaagagaaaaaacagaaaggaacaaaaatatttttaataaataatggttaatactttgcaaatttcacagaaagaattgacacatccaagaagctcaaaaaaattccaagtaagataaacacagatatacacccagacacatcatagtaaaaatgttgaaagtaaaatacaaagagaaaatcaggaaaacagcaaaggaaaaatgacttattatacataaaagaatcccaggcagattaacaactgacatctcaccagaaacagtggaggccagaatatagtgagatgacatgcatattcaaagtgctgaaagaataaaactaacaaatttctcattcccagaaaaactatctttcaaaaatgaagaaaaaaagagccattttcagaggaacaaaattgacagaatttgttgctagtaaaggcacttgcaayaactattaaaagaatttcttcagtctaaaaccaactgacccccaaatggaattctattccacatggtgtgagggaggagaagcacaagtaaaggtaattaagcaatttttaaagacagtataaatgcatattttccttttttctcttaacatgtttwaaatggaattgcataatatgatgtgtatgcawttgtwttgttaagcctataacatatgtaaatatctatacttaacaacatatgtaaatatttatacttgccacacaaagaaggtagttaggagcaaagctatattgaagtagggagaatatattaattggttaccgagatccacaggaaaaaaggaagagaaccaacaatggtaaataagaagtttactatgacaaaatttacaaacatataatttattttcttctctcagctactttaaaagacattaagctatatatagaaataattattgtaattcattattgggtttataacatatagatgtaacatgtacagtataacaacagtggcacaaagaagaagagaaaacagaactatgtgagaataacatctctatagatcactggtattaaattactattaatctgacatagattctcattaggtacatatggtaagccctagaggaatgatttacaaaaattacccaagacatctagtaaaaaaggatcattaaagtaattaaaacattacacaaaaaagcatttacctaatgccaaagtatacagtgtactttaaaaaggcttatatgtatactttaaaaagtgggtttaaaaagaaggataatttatactgtatatagaattcatgctaagtgagtagattctagttgctattacaatatttaactatatgagatgatgaatatgttaatttgcttcactataatcaccttttcacatctatagtgttttagtccattctcacactgctaataaargcatactcaagactgggtaatttatagtggaaagaagtttaattgactcacagttcagcatgattagggaggtctcatgaaacttacaaccatggtggaaggggaaacaagcaatccttcttcacatggcagcagcaaggagaaatactgagcaaaagggggraaarccccttataaaaccatcctgtgagaactcactaactgtcatgagaacagcatgagggtaactgccctcatgattaaattacctcccactgggtccctcttacaacatgtggagattatggaaactacaagatgagatttgggtaaggatacagatgaaccatatcattctgcttctggaccctcccaaatctcaagttctcatgtttygtaacataatcatgcctttcccaatagttctccaaagtcttaactcatttcagcattagcccaaaagtccaagtccatagtcttatctgatacaaggcaagtctcttctgcctatgagcctgtaaaatcaaaagtaagatagttacytcctagatataatagaggtatgggcattgggtaaatacacccattaaaaatgggagaaattggccaaaacaaaggggctacaggcctcatgcaagtttgaaatccaatagggcagtcattaaaccttaaagtttcaaaatgatgtcttttgactccatgtctcacatccaggtcatgctgatgcaagaggtgggctcccatagtcttgggcagctctgcctctgtggctttgcagggtatagctcccctcctggatgctttcatgagctggtgttgagtgtctgcagtttttccaggggtatggtgcaagctgttggtggatataccattctggagtcaggagaayggtggccctcttctcacagctccaccaggcagtgccccagtgggaactctgtgtggaggctccaaccttacatttctcttccacactgccataggagaggttctccatgagggttctacccctacagcatacttctgcctggacatccaggtgtttccatacatcctctgaaatctaggcggaagttcccaaacctcaattcttgacttctgtgcacctacaggctcaacaccacgtgtaagctgccaaggctgaaggcttgcaccctctaaagcaacagcctgaactgtacatcggccccttttagccctggctacaactgaaacatctaggacataggacaacctgtcccaagctgcatagagcagtgaggccataggtccagcccataaaacaattttttcctcctaagcctccaggcctgtgatgggaggggttgccatgaaggtctctgataacccctggagacattttccccattgtcttgctaattaacacttgggccctcattacttgtgcaaatttctgcagccagcttgaatttctccacagaaaatagggttttcttttctaacacatcatcacattgtaaatcatccaaacatttatgctctgcttcctcttgaacactttcctgcttagaaatttcttccccagataccctaaatcatctctcccgarttcaaagttccacagatctccagggcagatgcaaaatgccaccagtctctttgcatagcaagagtaacctttactccagttcccaacaagttcctcatctccatccgagaccacctcagtatggacttcattgtccatatcattactagcattttggtcaaagccattcaagaagtctctaggaagttccaaactttcccacatctttctatcttcttctgagacctccaaacttttccaaccccttcctgttacccagttccaaagtcacttccacatttttgggtatctttccagtggtgccccactacacagtacaaatttactgtattagtctgttctcatgctgctaagaaagacacactggagactaggtaatttataaaggaaagaggtttaattgactcacagttcagcatgactggggaggcctcaggaaacttacaatcatggtggaaggggaaggaaacacatccttcttcacatggcagcagcaataagaagtgccaagcaaaatggggaaaagccccttataaaaccatcagatttttttttttatactttaagttttagggtacatgtgcacaatgtgcaggttagttacatatgtatacatgtgccatgttggtgtgctgcacccagtaactcgtcatttaacattaggtatatctccaaatgctatccctccccccttcctacaccccacaacagtcccccccacaaaaaaaaaaaaaaaacatcagatctcatgagaactcactgtcacaagaacagcataagggtaactgcctctatgattaaataacctcccaccagttccctcccacaacatgtcaggattatgggaaccacattcaagatgagatttggatggggacacagccaaaccatatcatataggtatccataatatcatgtcctatactttaatacacacaatgaaactcatttaaaaacaaaaggacacaagacgtagaaaacaaaaagtaaaatggcaggcataaatccaatccaactatttaaataacattaaatgcaaatagattaaccatccaatcataagacagagatattcagtctgsattttttttcaaagccagaagacaaagaatgacatgttttaagtcttaagaaaaaaaagtagtctataattctataatcagtgaaaatatttaaaaatgtaggcaaaagacagaatttttcagacagtaaaaactgagggacattaccaccagcaaatttgcaccctattaaatgaagttcttcaggtagaaggaaatgatatcagacagaaatttggatccaaacaaaaaaataaagatcgctagggatggtaaatatgtgaccaaatgtagaagatatttttaactttttaaaaattaactattaaaatttttttaaatcatgtatttgagagtttataacatgcataaatttaaaatgtgtaacaatgaagacacagacattggaccagggaaattaaaatttacccttttaaatattttagtttaaacatgaacaaaaatcctattatttgaagtttgtctctgatgagtttaagtgaaataccgcaaatcgttgagcaaccattggaaaaacaaaaaaagaagacatacagccaataagccaatagtgtagataaagtggaatagtaaaaactattctgttcatccaaaaagaaggcaaaaaaaatgagtaacaaaaggaacaaggaataagtggaacaaatagaaaaaaaaatagcaaaatggtagatataaagccaaaaagaattagtgtaagagtgttcatttaagctttactcaaaatagccaaaaamamaaacaaamaaaaaaaaaaaactaggattaacacaaatatccgtggtggataaacaaattgtgggtctattcatataattaaatactactcagcaataaaatgggataaactactgatatacccaaccatgagaataaacctcaaaaacatactggatgaaagaaacttgtcaaaaagagttttatattatgttattacatttatatgaagttctaggacaggaaaaattattgtgaaagaaatcagatcagttgttgcctgtggctgagaattgatggacagtgattgactgaaaagcagcacaagggaattttctgagataatagtaataatttatatctttatagtgatgagattaaacaattgaatacacttttcatagcttgtttaaaagtacacttgtgatttacgtatttcactgtatgcaattttgcctcaaaaaattaaatgagcaaaataagttaatattaaaaaaatgcaaaggaccagtatagaaatggggaaaaaaatcaatcttattagcaatgaaaaggttcaccttaaaaaatggaatattatttttgtaccccaaaataggcacacaaatttagaagaaagggtggcaaaacaagaattctcatgccacactggtaagaaactaaattggtgtagccttagtggaaatcctttggtctaaattattgtttccaatgatctatttagaggaaataaatcagagatgttgacaaagcttaaggtaaaaaatcctctgaagcattatttataatcaggtaacatcagaaacaacctaaatgtttaataaattctaacaaaaacaagtcagaaaacagaattatatattcagtctgacaaaacacgatataagagagattaaagtagtcatactacaagggaatcaacaatagtactttatctgagtgatggaattatcggtgcatttgtacttttttgtattttaagaatttcctccaaggtgttttattccaagaagaaaaggaaacccctatttaagacacacagaaggactaataaggagaaagtcagagtcaacttgcaaaaaataaaatacaaatatgctataaaacaaagatggggggaggttggaaagtaaggatgattctaaaacactcaggagacagagaagaaaggggaaacacaaacacataactctctttttaaacaaggagaaagaaatgcatttctcagtgaagagtcagtgttttcaagaccttactctataacatcagttckctttcctcttccttctgggcctcacctattctctcttccctcttctgttacttgtggaatgaagagagaacaatcatattttgagtgatctctgttctctagcaccttggcaaggaagtaccagttcaatatttccattgaacggtaaggtgcttgagagcagcctttgtacttactaaatcctttctcctaagattcccatcatactgcctggaacctacaggcacttacaaaacatcaatgttgactgaaaaatcactaatctgtttcaaggaagttgccactagggtttctttaggaagcaggtatttgtatcagcatcacagtatctgaagaaaatgtagaacaaatattagaagaaaatgtaaaatctcttgaggaaaatcaayagtactccttttatgagaatcaagatagaatctgctaactttattttcaatttttatccawtaatttttgaaacacttaataagataattctccatgaaagkcccaaagagatgcaaatataagggaaaataaaatagagtcaaaagctcttttgtccgaatcccagctctgccatttactagctaaatgaattgggaaaaaaatttcttgagcttttaagtctggaatcctcatcttcaaaatggggtaataatgactgtctcatagggttgcagtgaggaaaaaataaaacaatgctagcaaagtatccagcaccatgactggcacatgggtagtttattacactcctaaattaatgaaatgttaatmcttccccttaggagcttactatttggcaaaagatgtcaacatttacataagaaatggccatccaaagcaggaagtgaggtaagagcaagttgcttgagaatgaaagaaaggagagattatttttagcttggagttagkgggtggacagtaaacacctaatatcattcaacatatttttgctcaaccctgattctgtgagggagcgttatgccttctggggtacagtagggggcagatagagtctttatcttcagtggaacctgtatgtcactggaaggtatcagataacaaacacagataaaaataaataagaaaaattcagatggtaaaaagtgttgtaaaataaaagagggtaatatgacaaagacgggaagctagttcagtgaagtgtttcagaaaaggctttttttgaggtgacattttagttaagagctagatgaagagggcagccatcttggagacatgtcagaggtaaaayggaaggtgttatcagaagtaaataaccctggttaaagtggaaaacccaatagatataaatattttactacatttataggttttcctaggtcactaagaaatggggcaaaaattaaatgatgcccatcactaatggaagcagaagagaacaccagaaattaagtattcatgtagatttggctaaatgaccactttcttctcccctgtccttattattagcttcccaagcaataaattagagttcctgtcaggaaatacttcatgaagagaaccatcagcgagctttaaacacactgttctgtctcacaatgtgatgtagtcactgtctgagatcccctagtgtttagagctttcagcctcagtttaaaaatttgttacattcccacaataatttctccatcaagtgaaagagagaccaaccagataataataaagccacttcaaaagctgcaagtactctacttcattgttttgtacagacgaatatgggtgattattttttctctccagttaaactccatgcattagagaattttaaagagccctttgatgactgagtgaagcagttttattccaggctgaattggccgatcacttttttatacaacaatggcttgtgcttctatcctaagggggcactttcaattcacttaaaggatagcagagggtctaatggcatcatggaggcaaagcaggaaattgggagaaattgcttgcctagtcaaagagggaggaatgaacaccccagagggcaatggggcatttgctcagaagtctgaggaataaatatgtatatttttgttaatcttctaaagcaagcaggaggcaaacatggcttgaccttgagaaactcttcctggaagtctggtttcrtggaaccaggctcagctagtgggttattaaatgtatatgaaatcaatttattggatcacagtcaacacttgcacaaaaatgaaacatagtagactagaccagactagaatggaataccatagagtatttcagagtatataagtaatagcattttataccattttctgatgtgtgtgtatgtgtgtgtgcttttgtactgactcacaatgtaaaatttattttttattattattggttatagtcaacaaaattaaaatctactcttgtaggagataccacatcttgaagaggacaaatgggtgtatgccctccaatcycagggcatacaccaactaaactcataaactcagaatcacagagcatctgatttagaaggaaccatagatgccatttaattttgtctcacagatggggaaataagctaaagaagtgaaattacattccccaaatgacaaggggcccaagacatgaagcagggtcttttaactcatagtctagtgctctgcattacactataaagtcagagcttaaaattggaaagggattgttctgagttgtccacgcatttcctgtcattgcaaaacaggagagttgtcttagactttaggagcacagaatccatcattccatgggatcatcctggcccacacatctcccagaaagtaagcacagtctgatttatttggaattcatctatttatttcaatctctcctatctttcccagagactacttcaagatgagactccaggagttggtgtttagaaacaatagagtatagaagttaacagttcagatattacagtgacataaatctagattcaaatcctgctggactataaaccctgtgagggcagagccctgcccactttgttgactgctgtattctcaataccttacaccatgtgtgggactgtgcaggagattgatgcatgtttgttcaaagaaagaagataaagaaaaggagtcctggttctgccacttatcagctgtgtggcctggacaagtgatttcacatctccagctgcagctttcttatctataaaatggaagtaatggaaatactcatagagttatttataggatcaagtgagagagctggaatttagtacaattttcagcacgtagcaaatatcagtgtctgttattataataagctctctcctattctatatcagttattttttacttttaaccagtagaactcttattttttaagataacatttatatgagataaaaagagaaaacttgtctggcatgctgctggttgacctcctcccctgcccaccactccgcgcagccccccaccctctagcaatgcccccacttcaatcacctctgagggatctcagagttaatcagaattctgcatgaaaatcactcccctgggccatgayctttccctcttcctggcaggattactgctgagggtgagatggattgctgatgctgggtaggaaatgaaggcccacaatgagcacctgtcagcaccaagcaattacaaatctcctgggagacagcatcccattgctcatgtacagcaccaaaggtgcattttcagagccagggaatttcagagttgcagaaaatatcatgtcctgtgatggaagacaatggatgaagaaagagttctaaaacaaatcctagaacctgtggaaattaatgtcaaagtcatgtgcaaatctactaaatttytagaatgtattgattgccccacatgtaacagcttcctccaggcacacatttgcatatggaaatgtgcaatgcttttcattcattctcatttctttcttaatgttaaattaacttggtcaataaaccacaggaagtattacttgaaatttgactttgatcactattaacataaaatatttaaatgtgcatagaaagcatatttcaggggtctcatcctggacagcagcaagtggaatggaaaatcagaattccctgtcaggtaaaggaaataagcttttagagctgatgtctagctggcaatgagaccaaatggaaccaaatgtgggggctttcgctatttggaagagtcagagattctaagagagcaattaagagcctcagccctgatggaataaacagcaattccagccaaccactttagtacagtgtcttcatctgtcaaataggaatcacaccatccacttttcaggggcattgtgaggacaagataacatataagaaagtgcattgagttccttgccaggacagcaccatattcacaccaaatattttcaatatttattctgatacttcatcactgtctcagtgcagctgttagtgcctctctatcacggtgatgtaaatgcacaatgttatgtttaaagtattttaataaaagattaaaggcttccatctcttcccatgatctctcgagcagttttctgaagagtttagcatttgatttccagaggaaaaacaaaaataattattattattataaacaatacacagtgacacaggctcacattcaagtagatctgctttgaacaggacctgagccagtgttttgagcaaccatataactgttatcagcaggagaagaagaaaaagggatgaaccatcccactgaaacatggcagcaaggctctggcaggcatagaagtagctggagtgatgtagaaggtatgaagtcccgtgatctactggataaacacttttgcagggattttgaggtatatccccaattcctatactctccctccacccatcagccttcatactctcctatactctctgcttcttgttgaatttcataagccggcacaaataaaaaggtacagtcctagctctcatggagtttagagtctaaagcaggtcataaggctgacagatttaacagttatcagtgctttgatgagctgaaccttccacattacctatatcaattctgttcagtaaatgtatttttagtagagacggggtttcaccgtgttagccaggatgatctcaatctcctgacctcatgatccacctgcctcggcctcccaaagtgctgggattacaggcatgagccaccgcacctagcccaagagtttgtttttgaatagtttccggctgggcgcggtgacacacgcttgtaatcccagcactttgaaaggcagaggcgggcagatcacttgagtccaggagttcaagaccagcctgatcaacatgttaaaaacctgtctctactaaaaatatatatatatatatatatataaatttagctgggcatggtggctcatgcctgtaatcccagcactttggaaggtcaaggcaggtggatcatttgaggccaggagtttgagaccaacctggccaacatggtgaaaacctgtctgtactgaaaaataaaaaataataaaataaaaattagccgtgcatagtggtgcacacctctaattccagctacttgggaggctgaggcacgcaaattgtttgaacccagaaggtggaagttgcagtgagccgagatcatgtcactgcactccagcctgggtgacatagcaagactctgtctcaaaaacacaaaataaaataatatgtatacatacatatacacacacacacacacacacacacmtattgctgagatgtcactcttagtagttaaacgaggctctacttagaatattctaatttgaggaatcatatttacatgcatataagtaataatgaagaaacaagtaacacaatgttctaagcaagctcattacaagtattacctcatttaatccaaagaagagccttataaagtaattccatttcacagatgaatacactgagggacaaaaagcctagccatttactatggttagtcacacagctcggaagaactagagtcgggattttaactcaccccatctgactctagggcaagtactcttaacgattttgayttactcctagcagaaataaagcaaagtaggaacacaacagaaagaaaaaatgtcttattaggaaaattaacccatcacttatttctgtatctatttaataaacatttattgaatacctactatgtgttgaaagttgggaaggctaagatatattacaagcattctgctmtggagtttgcacactagtgaagaagataaataaatgtttaattgataaactggttatattaaaaaatagaggtattatgagggtgaggtccttcctgaaagaaggagttctcgagtggggccggaagtatggataagacatatatggtctgatagagcaataataactttgtttcaaagaagttacaaaggtagcaactttggaaagatggagaagcccctagaaatgattttctgggaagaggtaaactattctgtgtccttcaaacacacaacttctggaaattactggccatggccccatcctaaatcactgyttccctgacctcaaagggcagatggtgtctactggattaagaacatgaattacatactgtcctatctctgcacaccaatgtcaggtttgacttgatttatgtttccttaattttataagaaattctctttacagtacaggagaaagagcatgctatgctatagaatccagtcaaggtcagggaaacaaattaatatccttataggctgtagagggtaacaggaactttgaagtcttaaattgttcacaattgacatataccaccataaatcttccaggattaatagctgtcttctggaaatgatagccttcatttgaaagcacatagaggcaccatgtcttaccccataagaaatacatattttagaattcaagcaacacataggatttttctttcaagatacggataatttttacttaacttacatggttacataataataatattagaattctgaggaagtttataatcaaatgatctaatcttttggatttataatctattgagcagaagcccagagactataaatgccttgtccagggtcagaactcattgttacagtcacacaaatcacaaacatttagaaaaagtaaactctgtgctcaaaaatcaaggcctttactttttgacatctggttttgctaatgtttcctctgcctgaaatgccttctttcctataccactcactttctatgtccatacttatctatatgctgtcaaatgccgcaagraagggtctgcgctgtcctgaggaacatataaaatatcctccttggcagccagaaragtgccttccacctaraatgcttagtgtgagtgccacagagagataaaatatgtaaggcagaaactctcaccaatccctggtggcagtgtgaattacacaaacctgaaaagtaaatagcaaaatttgtactaataatcccaccttgatgaatatatcctaaggaaaaaatctataacaatgaaacaacaaggaagctttatgtgccaggatgatcacagcagcattattaataagtggaaggagaaataaaccctagaaacagtcctttacttcagtaagagaaagattaagtaaattttaatttatgcaatcaatggaatagtatatagctactacaattatgtttacgaagagttttggaaatagtaatgtagtggctaagagcataaattcttgctctagtctcagcttctctacttaaaataaacactatatatgtgttaattattatgattcttattatcaattctagtatttatactaacctaggacaataaaatgtttacattagatgaaatatattaactagaataaagtgttatgtaagaaaatgataattacattatgatcataatcatacctacataatataaaaactcatatcaggataataatgtatgtgttcccaccccagcctttgtgcttatgaatcgttttcattatagtctgaaggcccacccctttccctgcctcttccccagctctacctccaggaggaagccctacccacaagagactctgagcatcattctctttgctgtcagtgaggagcagctgccagcatttttcctgagaatgacccagcagaaatgccacctgctagaatcttaaaagtttccccacttacatctgacccatttttagggagacaattctctattcagtaatctgggatactgttgagtccccaggatcagagggggcactctggacaccacagaagtatgattggaggtggggacacctgaccatgttgagactagatgaagccagtttgagatttcttactaagacagagcatggcacccctgtgactggaactccaccataactgtgacactaaatgtgaagaaaagattggaaggaaatataccaacacgtaagcagtgatattatcctttgagtgatttggcttccttctttttaagtgttttcaaaaattgttcaactgactacattttaattttaataatgggagaaaaattaactttttaaatgtgtaaaaaccaagcctatcatctcgtgttttaaaaaagctttgacggtgtgatgtcaaataaaagtcataacttgacagtgttttcatgttataaattttctttaaaaagtcccctgggtattagcagctttaaaaatcagggatttagctgtggtgatggaagggattcaagctgtggatgacacaaaggggagagaaagctggcatattgaggatattactataagtcaacatatttttgacaaattgatattcacaaactgtcccaaaaatacgttctgagaaacactagaccttatagaaggagaagaaaacttatggaaagaatataaagtaataggtaaaaagtaatatttgtaactaaatcttagcttttaaaacactccatagccaaaaaacaaagcaaacacacacacacacacacacacacacactcacaccaccaccaccaccaccaccaccaacacattcaaataaagtcattcctttcactgactcactggacaacagttttaaagctctgcaatatgtttggagggaaaataaatccagcaccaaacacattgggggaaaatgctgttgattatatcctagtttgaaagtgactaactctgcaggggaaacaatcacaaggttctaaatattctccataaatgtggcaatcattcagaaaggaggtatcaagaccttagcaaatctccaagattcaagaacacttttgaaaaaaacataactgagcttactaatgcagtgatctgagaaatttcagtgaccttcatcagacatttgttaagcattaccttaagcagagtgactgagagacaaagcctggcttgtttgccacatccaatctttcaccaagttctgtccattctttaacctaaacccatcctgaatctggtgcactgctttccttggccactgtctctatactattccaatcgacccttgtgtcttaactgggtcactgaactaagcaagatcatgtagctaggagcatagattctggttccaatctcagttcaccacttacagttctgtgacacatagtttaataaactataaaaggtttctcttatctatttctgacttttccacctgtttatgtttgcactatatacaaaagtgtttatagttaaggcagtttgtgtactggttaagagctctcagccaggcatggtggctcatgcctgtaatcccagcactttgggaggccaaggcagacggatcacctgaggtcaggagttcaagacctgcctggccaacatggagacacgccaactctactaaaaatacaaaaattatctgggtgtggtggtggactcctgtaatcccagctatttgggaggctgaggcagaagaatcatttgaacccaggaggtggaggttgcagtragctgatattgcgccactgcactccagcctgggcgtcagagtgagatttgtctcaaaaaaaaaaagccctcttgctgtatycactgcactttcttccagtccatccagccatcagccaataatctttccaaaggtaaatctaaaatgtcagctcaccttaaccacttcaatggcttcccattactcttaagtataaggctaaattttatatatacaaagtacctgtcctctgcctgtttcacaggccataataacttcttctgcttttcgtactccaggcatgctgagtattctttcagatcctsaaatactggctgcataagggcagggaccatgtctaggtttgctcatcattttatatccagcatcctgtagagtacctaaaaatgctgctcttggtaataacagctaacatttattaagcctttactgtgtctcagatgttatgctaaagtgccttatttctactatctcattatactctcaccacagttctatggcatcattactaatagtattcacatttcacagatgaagagcaagaagtctaaaaagatcaataaacttgctcaacattgcagagttattaaaagctatggtttaaatatttgtctcctctgaaactcattttgaaacttaatccccaatgtaacagtattggaagtggggtatttaaaagtgattgggccatgaatggatcaacccatttgtgttaggtcattcttgcattgctgtaaagaaatacctgacactgggtaatttataagaaaagaggtttaactgggtctcggttctgcaggctgtataggaagcacagcagcatctgctcctggggaggcctcagggagctattaatcatggtggaggtaaagccagaataggcacttcacatggcaaaagcaggagcaagtgggggtcgcggrggggggggggggggcagagtgtaggttccatacacttttaaacaaccagatctcgcaagaacttactatcacaagaacagcacaaagtggatggtgctaaactgttcacaagatatccacygccatgatgcaatcacctctcaccaggcccctcctccaatactagggattacaattcaatatgagatttggaggggaatatatcaagggttaatgaagtaatggattaatgggttatcacaggagtgagtcttataaaggccaggtttggctgtttctcaaaagcctcttaccatgtgatgccctgcactacctagagctgctgctgtgagcccccaccagcaagaaggccctcaccagatgcagccctttgaccttggacttcccagcctctagaactgtaagaagtatattggtttcctttataaactacctagtatcaggtatccagtcatagaaagagaaaatggactaagacagtaggtgacagtggggatttaaaccttggaaagcagactctggagcttgtgcctcagtcactgtaacaggcgctctagaagtgtttgttgaatgcctaattggataactccctattttcggagtgctaatgacttgattctcaagcctaaaagatcccaatcagtgtatcatcaaaattgagaattatcccatgtcaatggtctttggatttgcctaaaaatagtcaaagccaaaaaagttaaagacatggaaacaaaacatgcattacagagaatctaaggtcatcttgctgatagattcaacagatcacactcactctaagctcttctatctttctcattgaatttgatgctttttaagagaagagatcatgcctcattcacctttataaatcctaaatgacagctgrcaagggatctgtctcatgatttttattattttattattttattttattttattttattttgagacggggagtgcagtggcatgatcttggctcattgcaatctcttcctctcaggttcaagggattcttgcacctcagcctcccaagtagctgggattacaggtgggagactattgctataaaagggttacttatgtggaggaaagacatcccctgatctccctctcctctgagaggtgagtaagaggagatggcttcattaaatgcagtgacatttaggtttataaaactgcagtgccatacttcatattttaataaactataaaatgttttttatccattcctgtctatttcacttatccatattttcattgcatgcaaaggtatgtgtagttgtggcaattctgtgtactgggcaagaacatgtacttgtgcattgctgagacttaatctacagacttacatttgtcactgaagggacagtttacttcaatcctctaaccttctgtgtgctagtctgagaaaagagaatactcatacctccctcaaagatgtaagaatgaaatgagaaaatgtaaggtactgaagccagtgtctggcaggtaatcagggtgtgattgatggcagttgctattttcctccttctaatcaatgttattaaattatttttctggatagttagttaatttggaaagcaatgtgttaacttaaagttggacaaagtaatcattccaaaartaaagaaaaaactatcatacaaaaaaaaaaaatcctttctaaaagagccatcatacactggaatagagctcttccgggtagttgctaagagtagggactcaccagtcaaactagctggattcatacccacgctctaactctcattagttgtgtggactaagcaagttacttaaccaatctacacctcagtttacttactgccttagttcattcacactgttataacaaaataccatacacagagtaacttacaaacaataaaaattgaattctctggaggctgggaaatccaaaatcaaggtgctggcagattcagtgtctggtaagggcctacttttttggttcacagatggtgctttcttgatgtgtccttgcatggtggaaggacctaactagttctcttttatgaaggcactaatcccactgttgaaaaggcaccaagcttataacctaatcacatcccaaagatcctgccttctaatacaataatatttgtgattatgtttcaacatatttattttgagaggagacaggcacagacattcagacaatagtaccatgtataaaatgaaataataatacctctgagtttgagagaattaactgagacaatatgtaaagtagctggcacatatagtaggtgctcaataaatgctagctgatattttcatgggcattagaagaaattatttgacctctttttatgaaaatgttcagcattatccattatgaaggataggttcaacatgctctagagacagtcccaattcttgcattaaaagttaattgaggcattaatagtcacactttattttagaggttcttaaacaggatcccggctacacagtggcaggttgttaatatttgtgtaaaaagagataaaaattatgtatttgattttatgcaaatataaaaaagcagttcccaaaatacatatgccttcaaagccccaaatatacgtatgtaaacaagaaggacaaattgggcaaaataatgcacttattttcccaggcatgtgaaatacacactttagtaaaaaggtaattaaacctacctatcagtacagagtaacaaaataatcgccttaaagacatatattccacacagatttatgctgtctttctgttctaatataattttataacatttagtttacaaaaattgactaaagagatatttagtatattgctttgcaatgcaacatttaattttatagcatgggtaatgcatttctttttacaaatgtatcagtttcctgacagcatcaataagctgcttcagagtcattaaacactatgagaagccagtaaagctacagattttgttactgaaacgcacagattaattttcagctcataaagccagtacatgggttacttgcttggtgtctgctgcccatataccgaagcttgaaaagaaagctcagtcaacttgaatgacagattatattcaaattaaaacctttcaatgaattctcagcacccatcagatacagatgaatatatctaacatgcactcaggtctctgcaggatctagcccacattaccttctgagacttctccccttccactccaacatggaaagttcctcccatctctgaacctgcatagcatcaacaagctgattccattctatacatagcctataacaacattttctgcttggacaccatctttccaaatcgcatcctgtgttagatttctataatgcaacatcaacctcacagatgatcaaaaggaatgtcagcaaattttgataccttcttagttcaacctgtgatttcctcatgatggccttccttgacccaggagctaggtcaagtttataatcatacactcaatattacttcacagtatgtaccacaattgtcctattatgtgaaatgatacatcttctgacwagattaccaatattaggaggaccgaaaccatgtttgtttttgctttacattgccaaccatgatgcttgacacatagcagccactcagtgaatatttgctgagtgaaatttatattactccttgcatagcactaaatgtcaaggtaataccgtaattatcagcatgtctggatattaatcacagtgatagtcaatgttagtattatttattaggattgatgtaaaagaaagcacacatgtttcagggccaggtagatctggtttcaaatmtgagttctgccacatactagttctacataggcttaacaagtaaatagttattttgaacctcattcttcttatctattattttaaattaaatagctgttttctcatatagttcttttgaggttaaaaaataattcatctaatgtacttatcagaactccctacatattctattaagtagaaatgcctttatgtgaagactaagaagttgtatctgccatgcctatcctatctaaaataaactacatcattaagatcataagtcttatggtttagctgtgtccccaccaaaatctcaccttgaattgtaactcccacaattcccacatcatgggaggaacccagggggaggtgactgaattaatggggtgcgtctttcctgcactgttctcatgatagtgaatgagtctcacaagatctgatggtttcaaaactgggactttccctgtacaagctctctctttgcctgacrccatccatataagacgtgacttactcctccttgccttctgccgtgattgtgaggcctccccagccatgtggaactgtaactccattaagcctcttttccttcccagtctcaggtatgtctttatcagtagcatgaaaatggactaatacaataagcaacattagaataccgactggaatgaagaataagttagtatttgtaaagtgaaagattaaaaataacttacaatttctaaaagttcccatccactcattcaatttggaaggggtaaggtaaactcattttaaggaatatttgttttcacatcatttcttattgtggaagtagagtttgaataataaaaagcaggaaagtcaagcattttaaaaatcattctaagaaatgatagaaagtttattcatattcaggaaatatatatatatatatatatatatacatatatatatatatacatatatatatatatatwcatatatatatttagagtgggtttttttaataggctttaagaggcatacatagagtaataaaaccagctttggagtttgacctgaatcaaactgcttgttatgtgaccttaataacattaactttctctgtccagctgattctttaataaaatagggacaatacccttactatacaaaataaatgtaaaacttaaatgaaagcatatgctaaatgtctaaaatgatgtctggctcaaataagtgtttcccaaaaatgataactacttgggtttagcygaaagttaacaccacccaggaactttgcttttttttcaaggcattttagagccttcttgctcctaaactcttttccttttgataaaattcctataatgtaatagcaaccccatgggatgatcaaaaggaacatgtttgacatactgtatgtgagtggttcaaggaggaaattaagcactttactatgtgtataattagaaataatgtcagtggcttatgatcctatcacaagataatgtaataaggaaatggtttcccacagctagataaacttcaaagtaaagttgaagaattgatagtgaattgggggaggagggagagaagatgaaagtagaattttggaggaakgaaatttaaaaattgagatcctgatcrtcccttcaaaaacatctttctccctagaacagacagtaatcttggaaattaaaccataagctccatgataaaagaataagacacttattgattattccttatagattatgctgctttcatcacattttcattcctatatactccttaaacatatttctttaaattgagaaagaaatgcagagtcttacagtccagaggagtcccctcttatgacctattacccagccttctcagagggagtggagaggctaaatatgctcttgttctcagcagcttgcttccttgatgtcttagctcagaaaccagattttcaaatctagtgagttttctttaacagtttctacatttagcaacatggttatctttaatagctttctactatgatacactatagcctccttcgcatacattatctctcttaaggttcacagcaaccccacgaggtatttcctattactatccttattgataaagacactgagagtcagagcagttgagtaatttgctaaaggttacccagtgataagtggcaaagccggcgttccaacctagagctatgtgattccacatgagtcaggctttttcctgtatgtaagtaatcatacttagcattttgttccatatgaccaatttagtttggctcctattcatgacaaatggccctaaatctttctgaggtgcaataaaaacaaagaactttactcaataatttttaaaaaattaactctgagtacaaggttacttgtttttttacttgctaattaaaatttgaccttgggttcatattgaactgtggctcaatctgcttgcttaaagtaagggttcatataggcctctcttttgaaagagtataaataaattttgcctgttatcttagaataaagctagggagatgtgtcactactatattttgtcaaggtaaagaccatggaaccagtttgtgtcctgggtccatttttaaggatctggttagatctctactccattgggcagaatatccagaatatccttaacatcctggatattcagaacaaaatccagaaagaaaccatgcttggctgagtttaaaaatgataatacatttattatgagccattgctctttggagaggtattttcctgtgtgtgagtgtaccggtaaatatgtaggtgtgtgtttgggaataagtgtagaataaagaaagaagaaattgccctttttttcttttttttctgttacataaatttacttttatcttatcaatacacatgtacaaaaacatacacacacrcacacaaacacacacacatccagggttagctgcaaatggattaaattrttggactatttcatctacagtaaatcagatataatcttattacagctgcatgaatactaccatcttttaaattttaattagtcaaagagctgtcgatgttgacagccatgacayctgcaagaggaaaacggtgtcccctgatgcagggtcaccaaggctcattacagcacagcaataatgcaggacaaaattaacagtgtctatttttagagcaaatatccagacataaataaattacttaaatgaataggaaatcatggaaaaaggcacgctattgactcaataccctaattcttcataaaacaaacatataattcaagaatctaattccaattaatggcatgaggtaagactgaaagaattcagaccccttttatgcctgctgaccttagctcctattgcatcttaaatgttattacattctatgctcatgatggcaaagttgggagacagcatccctgctaatgaaaaactttcacaaactcaggtggaaaaaaatattcttctctttcacgtacagtgtaataaccttgtgctcataattttggatagtttccgtgtaccttgatctggcatgaatccaactgcagagtagaacctatgataaatgagggaatgagctttctcatttattaggtgaagttgatgagagtttcatctgagtaaaggtcactgaaaagagagaactgaggctgttaattttaaagggataattgctctcagaacacccaatgagaaagaaaataaaaacatcgacatactgcaattagtgcagaggttcctagtatatgtggaaaacagatgtttcttgaactttccatcatcattattattatacttcagtaagaatcagaaaagaggtgcttgtgcactcatgagcaagtcgtgaactagcttatgcagtttattcttttattttcagctctactttctaacatgatttattgggagcacctttactctaccagatgttccatttaattgatccactcttatagatgaaatgacccgtcatgtcagtagattgaccaactgttccaataaattgattaattgtttcagtatattgacaatttggcttgactgagacttggctttttgtgtacgtagaattctgagtgtgatatccaaatgaaaaacaccaggctccaaaagataaaatatccaatggcatgagcaggcatttcagagaagagcaaacaactggctaataaatataatctcaacctcagtaatactaatctataaaaacactaacaagtgccaattttaaccaaattggcatacagaattgatgcaaaaataatttatatcctttgatccagtaatttcactgcgagtatgggctctctggagaacgatccttaatacagagaaaaaacaaacagtgcagaaagatattgattgtagtggtaattatgattatgaaaatttgaaatcttaaatgtccaaaagtgtataaagcttttatatagttttgtaattgttcaaaatagaataatatgcagctattttaaaaggattatgaaatgcttgtaacaaatgtaatatatatatagaatctatactgtctagatatgtagtgtacatatatatagaatctatactgtctagatatgtagtgtacatatatatagaatctatactgtctagatatgtagtatacactactagataygtagtttggtagcctctgttcattcacaacatcgcyttgtagcatcagtcttttgacttgctatttatcatattctttttatgttttggaagcacacttttgaaaaacacactgctgcatttcacttgctagaatggcaattatgattaatttggatgcatttatgcttgtcacccatcaggcatcaaacgatactctaagtacccttagaatctatgtgcttctcaagtcttttacagtgtaacaatcctctaaatagcagacttttactgctaaattaaatttaaaattcaattaccataaataaggacgaacacatctgcatctgcacatttttctcactgagctcagagtacaatatcacttcttatttctttgatggctcttgtcatttcccaagaaagattgaccatacatttgagcataaagttaaatgacactttcaaatacaattaagcctcaagggttgtttcttagaatcaaccattgcactcctagaattttggtccactaacaagtcctggagataaaactagctttctatcacctaacaaaatctggactctttcatataacatggaagaccctcttaattgtgcatcctgcctacagtcccatcttcttttattgtttccccacagaaataaaaatcattctaataccagtacaccaatgtcttcttgtttcttgttacatcatattttctatccttacttcctatcttctcctcccactcccatcttcctttaaaaagtgtgcatcatattatttattaggagtctcccatgtgcctggaaattttggtggcactggtatttgcaccctactgcaggggaaatggaagaaacaatatagaataattaagtcgatgatacagaatattaggtgatatatactctttaaaaaaatacaacagggcaagacaaaataggagtgcagaagatttacaatgtaagctgtcaggaaaatataagctctaaattaccatagaaatgtaggctgtagactcctatgctttaaaggagagagagagaaaaaaaaaaacagacaaaagaagctgatttgtacaggataacatattagttggttcagccctaaggactggaactcaagtgtcctgaacactattccaatccttttcccactgcaatcctttccccactgcatcacttctgtgtcacacagtggtagagacaatagacttcggagtcaaagggaccagggttcaagccctgtytctgactcctgagaaagtaacaattcctaagactttgttatctaggtaatgaagataattacagtacatatacaaaggcatctacagagataaaaggaaataatacataggacgcatttagacagtgtgtggaatagtctaagtacatgttaaatggcatggtggtttttctttggctttgtatctcattagaatacccgacacttgtattataaccatgatcagtaagttctgcttagaaattaaaattaaatgagcatgtgaccattcaaaatggtttgaatgatggtttccccgaaattcatgttgcaaattaatccccagtgcaagagtattaagaggagtggccactgggaggtgattaattctgccccatgaataggattagcacacttataaaagggctcaaggttaaagagaggactcttttgcccttttgccttccaccatgtgaggacgcagtgattatcccctccagtggactcagcaatgaggcaccaccttggaggcagagatcaagctttctccagcaccttgatcctgggtttcccagcctcctaaactgtaagaaacatgtttctgtyttcttatagtttcaacctgagtgatggacgcttaggttgattccacaactttgctatcgtgaatagtgctgtgataaacatacaagtgcatgtatctttttggtatattgatttcttttcctttgagtaactacgcagaagtgagaytgctgaatagaatggtagttctagttttagatctttgagaaatctccacgctgttttctatagaggttgtactaatttacattcccactaacagtgcataagagttatattttctccacatcctcatggagagggaatcatacataaggctacagtcagatggaaacccattaggctttttgactttttaataatagcaattctgactagggtaagataatatctcattgtggttataatttgcatttctctgatgattagtggtgaccattttttcacatacctgttagcaatttgtatgtcttcttttgaaaaacatcagccttctaaaaaaacaatttgcaatatatcttaaagtatacattttatctacaaacatgcattcatatgttttagataaccagctggtagcatattttctcctagacactaagcaccttgagggaacggcccatgtcttacactgktatttatttgtttctatttatctatctatatatgtatgtatgtgtatagatagacagaagatagatatagatatagatatagatatagatatagatatagatatagatatagatatagagcaaaagagagatatggggtcttgctcttgtgcccaggttggcatgaagcagcatgatcatggcttgctctattctcaaataccagggccccagtgatcctcccgcttcagtctcttgagttcctaggaccacaggcatgtgctgccatgccaagctatttttttttttaatttttttgtagagatagggtctcactatactgcccaggctgatctcaaactcctcacatcaagtgatcctcccacctaggccttccaaaatgctgaaattccaggcatgaatcactgtgcctagcccccattctcctttttgttttctcccacagaacctagagcagtgtttcactcacaggaaaaaaaccaacaaatgtctaatcaacacatgagttaataaatatctggtgccttagtctatctttaattactgagaagagggccctgatattctacaaaagaggaaaccattcccctacatttctatctaaaggcagaagccaaaataataatattataggtatgggttggttccataaatgagcccacctttcatgtagattcttttttaagtttaatttcataactggccatatgaattactctgaggtaataacatcatcaaatgtaattcatgctgagcttgataaccatttgcacattagaacatggttttctggaagcttccttgtcagaatccatctatcattcagtaagaaattctgtctaacataatggtggtttagaagtcacatggaggaaaacaagagacacctcagccaagtagtaccaactactagccatgacagtgaaggcatctgggaggcctcaggctgtgatgggcttctatctgactgcaacctcacatataattccagtcaacaacatatggaacagaagaaccacccagctgagcctggtcaacccacgaatcatgagaaatcataaatttttgttgtttaaagccacaacactttgggttggttttatatgtagcagtagataactaaaacagaggagaagatgagcaagtgaacagatcatgggcttaagagccaagcatggaacctatactgcctctgccacttgccagttttgagatatcttcacctattgcagaacatattagtacctcaatttcttcattgatggagtaaataatgacacctgccttacagaattgctgtgaggattaaaagaaataatgctacattattaaatatcccccaaatccttagctatcattgtgagcattagaaataatatggagttttgttgccttctgttggcttttgtacaaaagcaaaatttgacaaatgggatctaattaaactaaagagcttctgcacagcaaaagaaactaccatcagagtgaatggttaacctacagaatgggagaaaatttttacaatctacccatctgacaaagggataatatccagaaactaccaagaacttaagcaaatttacaagaaaaaatcaaataaccccatcaaaaagtgggcaaaggatatgaacagacacttctcaaaagaagacatttgtgcagccaaaagacacatgaaaaaatgctcatcatcactggtcatcagagaaatgaaaatgaaaaccacaatgagataccattgcatgccagttagaatggcgatcattaaaaagtcctgaaacaataggtgctggagaggatgtggagaaataggaatgcttttacactgttggtgggactgtaaactagttcaaccattgtggaagacagtgtggcrattcctcaaggatctaaaactagaaataccatttgacccagccatcccattactgggtatatacccaaaggattataaatcatgctgctataaagacacatgcacacgtatgtttattgtggcactattcacaatagcaaagacttggaaccaactcaaatgtccatcaatgacagactggattaagaaaatgtggcacatatacaccatggaataatatgcagtcataaaaaagatgagttcatgttctttgtggggacgtggatgaagctggaaaccatcattctcagcaaactatcgcaaggacagaaaaccaaacactgcatgttctcactcataggtgggaattgaacaatgagaacacttggacacaggatggggaacatcacacattggggcctgttgtggggtggggagagggatagcattaggagatatacctaatgtaaagacaagttaatgggtacagcatgccaacatgggacatgtatacatatgtaaccaacctcgacgttgtgcccgtgtaccctagagcttaaagtataataattaaaaaaagaaataatatggagttaatttgaaaatgttattggtgcgaatctcattcagtagtccaacctgaactgcattgtgtcattatttctcaccttcccccaagcttctaccagactcacacatgagaaaagtgttagaagaagagaaaatggaaaagcctctattttggactgctagagcccactatagcctcctgagtaccctcctcctaacctctactctcattttccaatgatggtccctcatccacacagcagccaaagtgatctgtctaaaggtataaaccacttctcatcactcttcagcttattaaaaaacccatgtcctagcccagaaatgtgaataaacctaaagcccttyttctggcctccaggtcctacctcacttgtccctaccttcctttttcatttcattaccttcctccttctcctctgtaatattctctcaagccagaaaagtattcttgcttctttaaacatcctgagctcatccctgactcacagctttgcctttgctgttccttcaacattcacatgtctccctggcatcattcagagaacacctcagatgctatcttagagaagtcttctctaagcagctaatgcagcccatgccctcagtcctcttaccaccaggggttttcagtcacaacagctgttttgttttgttttgttttcctttcttcctagcacttagaatttgaaataatattcattatttgtgtgtttacgtgatcattgtctaatttctctacgaaagtcacaagaggtcggggtttctgtcctgtttattacttaagctgctttgcctatagcagaggttcaccaattatggcctgcaggcttatttagtatggcatgggagcaaatgatggctcatatttttgtatagttgaaaaacaaattaaagaaaatattacatgttatataaaagtattcaaaatataaattacaatgtccataaataaagtcttcttagaggacagccacttattagtctacatattatctatggctcctattgctttcagatgtcaaagttaaatagttgcgatgaagaccataaagtctacagtgcctaaaatgtttactatctgaccctttacatatgcacagattgctcaccctgacctaaaacagtgtctaacttattacaggtgaccaatctaccaatttatatgggtccaaaaaataaacacacacacacacacacacacacacacacacacacacacacacatataagacaataaaatgttgaaatttcccaggacccagacacaggcartatctaatcaggactactttttcccatgaaaagtcaattaagcacaagtttctggctgggtgattgaaggtgttccaggttctttactctcctccaaatgtactgtgatcctggaaggagcagaatgcaatggaaggagcagaatgcgatgtctgcattctcatcaagtgatctaattgatccacacacagagaaaagctaaatgaacaggactgaaaatgctgcaaaaattaaacacagatttcttaataaagctgaaaatagcttaataaaactgaaaatagtctcctggcatcccaaggcatgtttatttctgtttaaatagatgacttcccatagactgttatcaactcagtggggatcctgggagagaagtactttcctcctcctgtgaattttaagctttttccaatgaaatccagccacagactgtaaaaagcatctgccaatctgtataaaaactataaccatggtcaagtaatgctagtaacttcagttgcccacttctggagtgctctagrcaaatacaaaatagcctcacaggagagagaagatggagagcagataatcttttttcgggggaaaggtgatttcttgggaaaagatgaggaaagtatcaggtagaagagtgacagggtcattttcactggaaatgttgttgttgctgctgctgctgctgtttatttacttgaacctgaggggcatgcaaatattttgaccatttcctgatggcaccgaatggtccagatggtatacatcctgctactactgcagaaaagtggtaatgggaattaccatagaccctgggcagaaactggcctattggtggcttctcagagctcttggcaagagtagattatgccacctgctctaggaaggctgactaaggagggtgatggataagatttcagcagaaactcctgcaggctccttgaaagaaagcacatcaattctcagacctactacttccagaaagagtaagagatcaaaacggtgtcagagaggtgagctcactctggagctgagcaccaaagaagggaagatgagatccatttcactactaaggagacatctgagaagagaagaaataaataagaagtgaactgaaaataacaaattgataaaacatgagctcagagaaactgacattgagatagaatcatgacaaagaatagaaaaggtttgcagagctactgatggtgctgggaactagcttaaggaaaataataaatcctaatcacaagaattagaaccaaccacagtgagattttgaatcaggttaattaaccaatgtaaagagtatcattgaaacaaaaacatttcatagaaaaatcagctgttcaccttaaatcttgaaaatctttccatatagattaaaaacataatcagggcagactttttggggtaaaatgagttcaacaataattatagggtacaaaataaaaaatgatggaggaaaaagtaaaaggtttgcatgtcaagcaatgggcaggtgatggcagccctctcagccctattttgctctcctcttctctcctctctctttctctttctctactccctccctccttctgtccctcatcctaaactttgtcaaggctcatctgagacaggagttactctggagaggttactatgatttcccttccccgcctctgtcctctcatagatcctgcttatacctccattacaatacttattatgctccattataattgcctgattattgttgattctctcagccctgtgggctccttgagagaaagcacaacaattttcagagctgcartctcagtgcttgcacagtttatggctcaaagcaagtattcaatggaagacaaagaacattgagagacaagtaaaggagtcaaagaatgaatggatgaggttactgagtatacacagatcttgctgctggtaaaaataaaacagatcaaaataacttaattctatcacaacctgcacactggaaaaggatgaatccagaggcttttcttaccttggagaaaacagttcatttaatcatgaggtttttcaacatctttttctgaagcttatcataaagtgacactgtacaccttcaacagaaattacatrttttataaatttaaaatatcaaaactagatgaagtaccataggtgtgctctagtaccagccttaagtagttaaacataacttcatttgaaattccttgtctatgaccatatcaccctgaatgtagcctatcttgtcttaaattcctttgcatttctttccataatactatcgatatgtccagaaaccctggcttcttcctttgctattatagatttcttcgcaataacttcaaaatctcctttgatcccttttcccacagaatgctgcagataggagaaaatgtaaatgcctacatagaaataaattccaaatataattaaaataattattttttttaattaatgacaacatctaaagaatgaaaaaaaattctagaccaacttgaataactttaaggaatatattaaataaatatctgtataatatttgatttatgggttcagttattaggcatagctatattaagtatatcatttcatggactatattatatattagtatagaaatattatcttttctttactataaaaatattaaataattttatttaatttcttcccatgaatcttgacctaaaggatttccccaacccagagccacttttcaagttctctcagattttccaaattcatcaccattccatctgtctaagttgtttgagataaagcactttttgaatctgtatttgatgccttttccagcaaagtcacacgaatccaactgcatagtatcagcgcttcttccttccccatttgtctaataggtctgtatttgtgatctttacaatgtaaccaaacactgaactgtgttattaagtgttttgtatggttatcagtatttacatttgtattttttcaagatttactgaagtataattgataattttaaattccatatatttaaagtatacaacttgatgattagagatatatatatatacacatataatgcagaattgtcatcacaatcaagctaattaaacaatgacattcaatatttgcaattgtgagactacgctcccaggaataataactaattatttgttgagagggggttttttggtctttttttaaaatttattctccagataatttcaattaaaatcataagctggcatagataatgtcattttttctccccaaaatagtttcttgtgttcaaaataacagaactgggataatacccggtattatgagaacatttataaggatttgaatttaaggcatttcctttttatgagggatagaaaggaaaaaagtagtaaccttgtgtttagacatatacaatattttctctctcttttgtggcaacatttattcatttacatctattgtgtatgcactaaatttggcattaactgtagcaaaccagatgcttaaactgatcagagcccatatgagagtcttcatcagtagactgtttttactcaggctgagttggtttttaagtatttgcaaaattggtaacaagacattccaattttttaactgcctttgtgaagttaagtcatttttttccacttcaaatatgtctcttttctcttttccttgcatttcctggagcaatcacagtagcttcccatatcagtgtaagcaaattcattttgatgtgaagaacaatttaccacactgagttccaatgttatgcaagttgtcagggaaactccaaggaccaagtgcctcccttcaaaaaatgtctagctccttaatcagcttcctgcagaaattatgcgtattcccaactgagcctttagtgatgtcaccttttcgcaactgctgtaatgacccagaactggctacatttcttacaaatcctcttcttacttgcaaaattctttgtgtctactccatatcattattttagcaattcttttgtttcaatagcacatcattcctgttttaagtgttctctctttttgtctgtcattactctaaggaaataagttgactatttgatttaccattcttgaaatgtcatctgtcttcaatatttgatgcttggttctggtaccaaatgatctcgtttgtctggatagtcttcctttttcgttcacaaatatctagttaatccaacattttgagagatagctttagtagtatggttatactccagtgccctgggctgggttttaatcctggttccctacttactatctgtaattgaccttgagcaagtcagtgagctggtctgtgcttcaggttctttatcaacataatgggtgaatgtgagaattaaatttattaatatttgtaaaccaattacaaccatacctgacatatggtaagtatttttaaaagtcagaaatggcatttcctacaggtcacatcaggagatagctgtggaataacagaacgaaaacttcatctgaaatcagaagatgtggattctcattctgtctcagctatgtagtagttgtgagattgaggcaactgactttgccttcttgggcttcagcttttgcaaaactgagctttctttacatttcttaaattctgtgagtctatagtatttttttcaaaagcagatattgatctgtcgctgaaacctagtccactttcacataaatgtgtgaaaattcacaatgtacaaacactcatgaccatttaaatacttgggttttagagccaaacccyttgacttttaaaggtggcctcaactcctgttagttgtgtgacctcaggtaaatttcttaacacctttgtccctcagttttctcaaccataaaatcaggattacaataataatcatcagattaggtcgatacgaaaataaataaatacaaatcatgtagaacaacatatgacatcataaactcaataatgcataataactataatcactattatcttcaatccaatttgccatgcaattaattaccagattgcaccaaccatatgtaaggcactgtgctgggtaatacaaggtccagaatgttgattgaatatgtttcctactctcaaggtacatatgattcattaaggctaaactcaagtagatgtccaattaatacaagacaaaatgtgaaataaagaagttcaaatttgagactagttcracaactttttaaatagtccttgagatggtataagcacagaataaactagatgaatgaagggaaccaacaaagggtacactatggggacagaagtggcaggtagtgaagctaaagatgtaggagggaaacagtcaaggctgataacagttgcctctgattaagcaatgcccatgtgactggcactgtgttaacagttttttgccatttttatatacttcattttattacttttttaaattatactttaagtgctaggatacatgtgcagaacataccagtttgttacataagtatacacgtggaatagtggtttgctgcactcatcaactcatctacattagttatttctcctattgctatccctcccctagtcccccactctccaagaagcttcagtgtgtaatgttgccctccctgtttccatgtgttttcattgttcaacttccaattatgagtgagatcatgtggtgtttggttttctgttcttgtgttagtttgctgagaattatggtttccagctttatgcatgtcctggcaaaggacatgaacccatctttttcatggctgcatagtattccatggtgtrtatgtgccacattttctttatccagtctatcactgatgcacagttgggttggctccaagtctttgctattgtggacagtgctgcaataaacacacatgtgcatgtgtctttatagtagaatgacttacaaacctttaagtatatacccagtaatggcattgctgggtcaaatggtatttctggttctagatccttgaggaatcaccacactgtcttccacaatggttgaactagtttacactcccaccaacagtgtaaaagcattcctatttctccacatcctctccagcatctgttgtctcctgactttttaatgatcgtcattgtaactggcatgagatagtatctcactgtgatcttgatttgtatttctctaatgaccagtgatgatgagtttttttcatatgtttgttagctgcatgtcttcttttgagaagtgtctgttgatatccttcacccactttttgatggggttttttgttgtttgttttttttcttgtaaatttgtttaagttccttgtagattctggatattagccctttgtcagatggatagattgcaaaaattttctcccattctgtaggttgcctgttcactccgatgatagtttcttatgctgtgcagaagctcttcagtttatttagatcccatttgtctatttgggcttttgttgccattgtttttggtgtttgagtcatgaagactttgcccatgcctatgtcctgaatggtattgcctaggttttcttctagggtttttatggttttaggtcttatatttaagcctttaatccatcttaagttttgtataaggtgtcaggaaggggtccagtttcagttttctgcatatggctagccagttttcccaatagcatttattaaatagggaatcctttccccatggcttatgtcaggtttgtcaaaaatcagatggttgtagatgtgtagcattatgagcatttctgaggcctctgttctgttccattggtctatatatctgttttggtatcagtaccatgatgttttggttactgtaggcttgcagtatagtttgaagtcaggtaccatgatgcctccagctttgttctttttgcttaggattgtcttgtctatgcaggctcctttttggttccatataaaatttaaatttgtttttttctaactctgtgaagaaagtcaatggtagctttatggggagagcattgaatctataaattactttaggcagtatggccattttcacgatactgattcttcctatccatgagcatggaatgtttttgcatttgtttgtgtcctctcttatttctttgagcagtagtttgtagttctcctggaagaggtccttcacatccctcataagttgtattcctaggtattttattctcttggtagcaattgtgaataggagttgactcatgattttgcactgtttgtctattactggtgtatagtaatgcttgtgatttttgcacattgattttctatcctgagactttgctgaagctgattatcaggtaggttaaggagattttgggctgacaggatagggtgttctaaatatacaatcatgtcatctgcaaacagagacaatttgacttcctctctttctatttgaatacactttatttctttctcttgcctcattgccctggccagaacttccaatactgtgttgaataggaatgttgagagagggcatccttgtcctgtgtggttttcaaagggaatgcttccggcttttacccattcggtatgatattggctgtgggtttgtcataaatagctcttattattttgagacacgttccatcaatacctagtttattgagagtttttagcatgaaggggtgttgagttttgtcaaaggccttttctgcatctattgagataatcatgtggtttttatcatcggttctgtttatctgatgggttacgttttttgatttgtgtatgttgaaccaggcttgcatcccagggatgaagctgacttgatcttggtggataaactttttgatgtgctgctggatttggtttgccagtattttactgaggatttctgcactgatgttcatcagggaatactggcatgaaatattctttttttgttgttgtatctctgccaggttttggtatcaggatgatgctggccccataaaatgagttagggaggagttcctatttttctattgtttggaaaagtttcagaaggaatggtactaactcctctttgtccctatggtagaactgggctgtgaatctatctagtcttgggctttttctggctggtagtctattaattatcatctcaattgatctattctgctttcttccatgggcatttagtgctataaatttccctctaaacactgctttagctgtgtcccagagattctggtacgttgtgtctttgctctcattggtttcaaaaaacttgtttctgccttaatttcattatatcgttaataatgatatcctgtcttccacttgatcaattcggctattgatacttgtgtgtgcttcacaaagttctcctgctatgttcttcagctccatcaggtcatttatgttcttctctgaactggttattctggttagcaattcctctagccatttttcaatgttcttagcttccttgctttgggttagaacatgctcctttagctcagagagtttgctgttacccaccttctgaagaatacttctgtcaattcatgaaactcattctctgtccagtttcgttcccttactggagaggagctgtgatgctttgggggagaagaggcattcttgtttttggaattttcagcctttttgcactggtttttcctcatcttcatggatttatcyacctttggttttttatgttggtgatcttcggatggggtttctgtgtggatgtcctttttgttgatgttgatgctaytcctttctgttagttttccttgtaacagtcaggcccctctgcagcaggtctgctggagtttgctgaaggtccactccwgaccctgtttccctgggtatcaccagcagaggctgcagaacagcaaagactgttgcctgttccttcctctggaagctttgycccagaggggcacctgccatatgccagccagagctttcctgtatgaggtgtctctcaacccctcctgggatgtgtctcccagtcaggaggcacaggggtcagggacccacttgaggaggcagtctgtcccttagcagaggttgagaactgtgctgggagaaccactgctctcttcagagccagcaggaagaaatatttatttatttatttatttatttatttatttatttatctatttattttatttatttatttattttttgagatggcgtcttgctctgtcacccaggctggagtgcggtggcgcaatcttggctcactgcaagctccacctcccgggttcacgccattctcctgcctcagcctcccaagtagctgggactacaggcacccaccaccacgcccagctaattttttgtatttttagtagagacggggtttcaccgtgttagacaggatggtctcgatctcctgacctcgtgatccgcccacctcggcctcccaaagtgctgggattacaggcgtgagccaccgcgtccagccgggaatatttaaatctgcttaagctgcacccacagatgccccttcccccaggtgctatgtccgagggagatgggaattttatctataaacccctgactggggctgcttcctttcttttagagatgctactcccagagaggaggaatctagagaggcagtctggctaagtggcttttcggagctgtggtaggctccacccagtttgaacttcctggcagctttgtttacactgtgaggggaaaattgcctactcaagcctcagtaatggcggatgcccctccctccaccaagctcaagcattccaggttgacttcagactgctgtgctggcagtggatcttagcttcttgggctccgtaggggtggaatccaatgagctagaccacctggctccctggcttcagccttttccaggagagtgaatggttctgtcttgctggcattccaggtgccactggagtatgaaaaaaaactccttcagttagctccctgtctgcgcaaactgccacccagttttgtgcttgaaacccagggcctggtgatacaggcacccaagggaatctcctggtctgcaagttgcgaagaccatgggaaaagcatagtatctgggtcagaatgcactgttcctcacggcacagtccctcatggcttcccttggctaggggagggagttccctgaccccttgcacttcccaggtgaggaaccgccccaccctgctttggctcaccctccgtgggctgcacccactgtctaatcagtcccaatgagatgagccaggtattttagttggaaatgcagaaatcacccgccttctgcattgatcttgctgggagccacacactggagctgtttttattgggccatcttgcccaagagttttaaatacattttcatggtggtagagcatgtttccaaaaatggtcacatcaatagtgctcctcacctatgtgcccctttgtaatgtgaccytgtcattctctcatcaagagtcagaatttgttcccccattcttaaatctggtctaccctattattgcctaatttgatcaacagaatatagtagaaagggcattaagcaactttcatgtctgagccttaagaggtctacagccttggtcttcgcttcttagaacactccttcttagaacccaggtgccattgctgtgaggagatcaaaataccacataccacatacgacaaccaggtggagaaaaatggaggccccctgactgacaatcattagtagcaactgccagccatgtgaatgaggtgattctggagctcttagccatcctactgctgataagaagaaccccccgactaatctacataatcatgacaaataattgctggtcattcgaactcactaatgtttggatagtttgttttacagcaatagacaaccaaaacaatcttacttaattttgacaacaatcccatgaaggtacacatttacctttattgcacagataagcaactagaaatcagagaggttaagcaacttatccaatgtcacactgctcctgtgtggcagagttgggatgaatgtcagtcagctattaaatctgaatgactgagtaatttgtaagaccagtaaccaaaacaaatctgtaaagagaaggagtaatttagagaaaaatcagacaacttgttgatgccattttttataacaccagaattgtaaacaaagcacagtaaactgataaaggctaaratgaaattatccaacaaatgcagtacagacattttctcaggaaagagaggcagcctgccaaccaactgttttactgacttgagggctttagtcttctttagagaggagtaattttgtaagatagtttcatagactgaagtcagacaagagcattttgcaatagattagctcttccagttccctactcctaagccattaggagtaagcccttccttcctttctttccttcccttccttccttcctttcattccttcccttccttccttcctctttccttccctcttttctccttctcccttccttatttccttctttccttccttcccttctttccttccttcccttattttttctttctttccttccttctttccttcccttatttcttttcttccttccttctattctcttcttttctttagagtgagtatgaactaagagcctgtccctatcctaggttctgatgctatagtgatgaatgacttcactcctattgccaagggatgcattgtacagtaaagttaacgagggatggtggggataaaacatgtaatcacaatcagagaaataaatactagatagtgtatatagagagctgtggcaggggacactgagagttaccccctcaatctcagcaaaaaatgggaagaggggtaaaaagataagactccccaaaaaaggtgatgattaagttgagtcctgaagcatgaggagaaattcatctaatgaagaagaaaggaaccaagactgtatacaaaggcctgatctagagagaatagatggtcctttaacaataaattctgttatagtcttgttggaatgccacattgcattgatattggaatgagggtggggggacagacatggtgaacctgaggaagggaaaatgaggccagaacattagatggttttcatgctatgctccactgcctttcttttacagaaaaaatgaagcctttgaataaaggttttaagtaagaaagggacatgatctctttgcctgtcagaaagatcatgctggatgcattgtgaaaatagattcaacagggctaaactacaggcaagacatcagttaggaagctatacttgcagtaagagaaattaggaagttaccaatgataagaaaagctaatgaggaagaaggtgttggtgaaaaaaaagaggggttgccagattcaagaaataaaaaggagctagaataaggagacttgatgaatcagcagatatgatttgcttttctatttaaaagttggccgcaaaccaaaaatctataatgaattaataaaattcactcagttctattcagaattatcttttagaatggtatattctgtgtaataaggaatataataatttctaaaatacactaagcacttataggcacaacaacacaggttttacgtgaattttctccgtctttccaacaaccctataaggcaggtacagttatcacactttacagataaaaaagtgtagcggtatcaaccataacactcatattttggttgattcaacaaacatgtattccatgcattatgtaccagccattatgttacagactacaaaggacaaggaaagaaaacacgtggagcttaccctagagatgttcatatctaagtgagagcatctaacagtggaaatgaaaaattttactatggtgtactaggtgtcactgcagcagtctggtccaagaattgcaatgggattctgaaaatgaccatctttaacagatagagamattttaactgaagtgtatcataaacccccattgctaaatagaagccaacaactgggccactgtcttttgttaagctgattgtgccataaataaatccttgtcatcataaaaaagagtggtaygagtggatagtatgggttaaagtaagatcagttagcgtggcattggaggtgcagggggccatctggctaaaatccgccccttgctccacttgaaaagaacatgcctttggtgcacgtctagatcagcccagaggtgggcaccrtttgggctagtggcagccctggacagtgacatgtctaatggccagtaaagtgactatcagggtcattttatacatagactctttcctgtttgccttattcttcaagaaagacttctagatagggtttcaggtagtcactttcttttcagactaaatcctctcaaactagctttcagttgtccaaatcctggccctgactttatgcccaattaggaaaggttagaccaaggtaatatgattaaggcagagcctggtggaaactgtaagaaactttctatggtctaagtgtctttaacttgtgacctattaaccaggcagagatccaaaggtaataggcgagacacacatttccacaatgtagaattcattatttttctctgtctcatttctatctacaggcctttcctactgataaaactactgtaagtttttacagtcattgtgtttttaatttcctaattaagtaacaatttccaagcaccaataaagttattttagtttgtctcccaactataactttaaaaaatactacaaataaaataggataaagtgacagtaaacatttagctcagtgctttttgttttcttttgttttgttttatacacacattctttctttgaaagattgaaagtaaaccgtaaaagactgtgaaacactgaccaaagagtttacaatcgatagttctctgtttcgcaaaatgttgtgggtctagtgcctgttaactggggttttgacctctacactcttgagtccagctggaagaattcaagaatcccctttccagaagagctgcagtgcctaaaaatgttcatgtgtgaaacagaacactggagaaaattcctaacgtaaaggtcataaataagaccataggaaagatgggctatctaggaaggagtggaagcattctatgtcagctctgctgtatgttgtcctatttattagaaaagttacaatgtatattttttaggcaaagtttattgcactaattaactcattaacgacckctagagagaagccaggcttctctgcaggctggtttgctgaatgttaatgaccaagataaagagaaaatcagtgtgccaagctctgggaaagccccaggactccacaaacagctctgatttattcagtatataatatcgtagagaagggagaattgtggaytaaaatagataagaatgtcctcaattcatttagataaaattgtcctcaatttaaacaaaaaatttttatggcatttcaatttaatgggaaaaaaatcagttttggttcacrcaggcccccaccctgccctgcttgtgaattaaaggataagctggtttcttgtggagtctgcagtagctaagctggctagggtttttaaagcagaaagagtggaggtaacaagtaggacaggacagactttgagggatagcttagcctccaaggcacagaacaattaattgacatttcaaatgtggtctatgatgttttgaatgatgtccaatgtggtaccctggcctccaaggtctgcagtgtggacacttttgttgtccaaggatgccaagactgcagtattaatgtgggtggcataggagtggagtttgaggtaatccagcatgatacaaattgccagcagcatggcggtagggtttgccagatttgtattgactaaattgtcacattgccttgaagctgtctcaaacactgcatacatatagacatagttggctccaggcacaaggcctgccccaccaatcaaacctgtgcagacactgttgataacattgccataaagactgagcattaccatgacatcaaactgttggggctgggatackcactgcattgtggcattctccacaatcatgtcttctaaggtgagctgaggatagcgggatgccacctcccccacagcactggaggaagagaccatctcccagtttcgtgatgttgaccttgtgcacagccatcacttttttgcatcccatcttctgggccagctggaaggcatattcagcaatgcrcaaagacttggccttagtcatgatctttaggctctctgtcactcctttcacactctcatgctccagattgctatactcaccctctgtgttttcccaaacaactaggatgtctacatctttgtgccrggtctccacgtttggcaaattttttaaatgaatgacactggcatagagatctagggtggtatgcaacatgttgttgaaggatttgtatgatggtggcagggtgtcgtcagttttaacgctactcttcaaagccacacggtttcaatgaactgccatgatggcattatgaatttcctcttcatgtgaggcaraggtggaggtcactgacattccctcaaagtccacaggcacacacasatgtctgaacataatcttgacaggcagcataagttcagtcccagtgccatctccaggaatcatagtcactgtgtgctgcccaccacacttcgctgatggaggaattgtgtgagaaaaagagaagcttctcagggggatctcacagccaagtaaaatatcccaggagtagccaagaatggtaggttggaaaattgccttcacagagccactggctactgtcagcatcttcaataccaaaatcatgaagttgagatctattcaattgtgtgaaaagctgtgctctttctctggctttgaactagcttccttgggtggaattctggacccatgattcttgcttgggtcataattctctctccttccttgtgttctrtttcacagacattctactttgtgagagagatagctagacagatgatgtaatgtgttatatagtagaaaatacaactattttggatctagataataattcactagacaaattcagtgtgtgaaactctgtatcayatgcttttaaaaacacagactttatttttagagcagtgttagggtcacagcgaaattgagtggagggtacaaacatgtcctgttttctcttggtccaaaataagcacaacctcttccactaccaaaatcccacacgagagtgctcaatttgttctatcttattttttaattttttaaaaaatatttatttttaatttttgtgggtacaatagtgtgtgtatgtatttatagattgctatgagacatttcgatacaggcatgcaatgcataataatcacatgagggtaaatgggatatccatcacctcaaacatttatcttttatatataatccaactacactcatttagttatttaaaaatgtacacaaattattattgactacagtcactctgttgtgctagtgaatactaggtcttattcattctttctagtttttgtacccattaaccatccccacctcccccacactcccccactatccttcccagcttctttcactatcctttactttctatctccatgagtccaattatttgaatttttagctcccacaaataagtaagaacatacacaatttgtcattctgtgcctggcttatttcacttaacataatgacctccagttctattcatgttgttgcaaatgataggatctcattcttttttatggctgaatagtactccattgtgtataagtacctcattttctttgtctattcatttctttatggacacttacattgcttcaatatcttggctattgtgactagtgctgagacaaacatgagagtacacatatattttctatgcactgatttcctttctttcaggtatatacctagcagtgggattgctagatgctatggtggctctattttcagttttctgaggaacttccaaactgttctccatagtggtcagattaatttacattcccaccaacagtgttgggtgttcccttttctctacacccttgccggcatcttattgctgatcttttgcatataagccttttttttttttttttttttgagacagagtctcactgtgttgcccctgctggagtgcatggtatgatgtcagctcactacaacctccacctctcaagctcaagcgattcccgtgcctcagcctaaacgctgtttctattaaaamcacaaaaattagccaggtgtggtggtatataagtcattttaactggcctgagattatatcttattgtagttttgatttgcatttctctgatgatcagtgatgaacaccttttcatatgcttgtttgccatttgtatgtcttcttttgagaaacgtctattcagatcttttgctcatttttaattagattgttagatttttttttcctatagagttgtttgagatccttatatattctggttattaatctcttgtcagatrgatagttggcaaaatattttctcccatctgtaggttgtctttcactttgtggactatttcctttgctgtgaagaagctttttaacttaatgtgatcccatttgcccacttttgcttttgttgtctatgcgtgtaaattattacacaagaagaatttttgcccaggcaaatatccaggagacttcctctgatgtttttgtgtagtagtttcatagtttgaggtcttagatttaagtctaatccatttttatttatttttgtatatgacgagagataggcatctcctagatgtagcaccttaatggtcttagatgagatccggaagaattatctggattaccatgcagagactcttcttctctttccttactttctcccaaacaaatggagtctctctctctctctggatctgggggtgsagtgacacaagtacccctgtggctaccaccactggaactatgctgggtcagtccttaagccatcaaagcactgggccttgtccaaggtctgctgtaaccactaactggctaccccctaagttcactcaaggccctgggtctrcaatctgtggatagtgaagccagccaggcttgcatccttctcttcagggaagcaagttcctccaggccctggttgggtacagaggtgccatccaggagccagggactggagtcagaaaccttagaagtctacctggtattctattgtattgcaattgaactggcactcaaatcataagacacagtccctccaacccttccctcccrtttccacaggcagaggagcctcacctcacagccactattaccataagcctcttyagtcagcaggtgaagggtctttctaagactgggtccttaccttcatggcagcaggttcccttctggctcrgggggtgtccagaaatgatgttcaggagctggggcatggcaagggggccttatgactctgactgtgactggtgcctatcctactgtgactgagctggtatccaagatggaagacaaagtcctccccactcttccctctcctcaagcagaagaaaggggtctccttgggaactgtaagctgtgcagcctggggttggaggagggacggtgcaagcactcccttagctggcctggctggtgtctcaataggttgcctgttctccaggtccactggctctgagtccagttcaggactaggacatgcctaggagttgtaatccctgtggcctagactgtttagagcctaggctttggaaccttaaataatgtttattattaacttaaattgttatttattaaacttaaaattgttacttaattggaacttaaattgttatttaagtttattaaacttaaataaacattatttaacgccccatagcattttagcccgctttgctgaggcttgcagtaactcaagttctgactgttgggatggtgattctcctctggctagggctggtttaaatactccctccgtgggctggtrttactaaagttcagcccagttttgtcttctgctgtgacaaggcagaattgagttcaatgcaatatctcagaatcactatgctctccccctcccacaaatgcacagattctctcttcatgtcacatggctcctgctgagtgatggggaaaaggtggcatcagtgattcaacactgtctttcctaccctcttcaatacctctttcagtggtatgaagttaaaatcaggtactgtgaatgctcacctgatttttggttcttatgaaagtgtgtttttgcacagataattgttaaattgttgaccatgtaggtggaacgattggtacagccttctatttggccgtcttgctctgccattctccattttttataaccaatgaaccaacactgatgcatcagtatcaaccaaagtccatagtttacattaggtttcactcttggtattttacattgtacaggtttggaccaatgtataatgataggtatccaccattgtagtatcattacagagtagtttcactgccttaaaaatcctctatttgagcaccttttatctctcccttcccccaacctctggaatcccctgaagattttactgtcttcatagttttgcctttttcatcatgtcatataagtgaaatcacatgtgacatttgcagatcggcttctgtcacctagtattgtgcatttacgtttcctccgtttcttttcatggcttgatagttcatttctttttggcatagaacaatattccattgtctagatgtaacaaagtttatcctttcaactcctggaagacatttttattgcttccaagtttggrtggttatgaataaagctgctctaaacaatctgtntgcaggttttggtgaggacagagtttacaactcatttggaaaaataccaagaagcacaattgctgtatcgcatggtaagaacatgcttagctttgtgagaaactgcttttttccaaagtgatggtagagttcctggtgcttcataaccttttgaggatttggtgctgttagtgtgtcagattttggccattccaataggtgtgtagtgtatgtcactgttgttttagtttgtagttccttaataacataaaatgttgagcatcttctcatatgtttattagctacctagtgaggtgtctgttaggtctttgcccattttttaatcaggttgttcatttgctttttgtcagtttaaagagttctttgtatatttcggacaacagtcctttatcagatgtgtcttttgcaactattttctcccactcaatgacttgccttctcactttcttgacagtgtcttttctagaacaaacgttacaaatttaatgaatttcatattattattctttcatgaactgttcccttgactgtatctaaaaaataattgccatactataggtcacctagaatttctcctgttatcttctaggagttcgagtttttcattttcattaccatttatgatccattttgatttatttttactagagttttaagatctgtgtctacatttatcaatttattttggcatgtggatgtagtttttctagcaccatttgctgagatgacaattttccttcatgatattgtgtttgctcctttgtctaagatcagttgactatattactatagatctatttctggctctctagtctcttgcattgacttgtttgtctattcttcatcagtactacactgttttgattactgtagcttcatagtaagtcttcacatctggtagtgtcaattcttcacctttgttctcctttagtactctgttggttattctgagtctttgtctgtccatataaactttggaatcagtttatcaatatccacaaagtaactccctacgatttttattgggattgcataaaatcttgaatcaaatttggtagaactgacatcctaacaatattgagtcttcctatccataaacatggattatctctctatttagttctttgattttttttaaactgagttttatagttttcctcttatagatctcgtccatgttttgttagatttaaatctaagtatatcattttggggttgctaatataaccggcattgtttttaattttaaatttcacttgttcattgccagtatacagaaaaaactatcgacttttgtacattaaccttatattctgccactatgctatagtcacttactagtttcagaagggattttttaattgattttttaaaaaatttctacttagataatcatggtatgtaaaagcaaatgcagttttatttctttctttccagtaactacaccttttattttattttcttaatacattagctatgatttagaatactatgctaagaaaaaaacagtggtaagaggggatatacttgccttcttcctaatttggcagcaaatcttgtagtttctcattattgtgtgacattgctgtagggtttttgtatatgttctttatcaagttgaggaagttcgcttctattattccttgtttactgagggtttttatcaatgataggtgttggattttgtcaaatgctttttctyyctttttttttattatacttcaagttttagggtacatgtgcacaacgtgcaggttagttacatatgcatacatgtgccatgttggtgtgctgcacccagcaactcgtcatttaacattaggtatatctcctaatgctatccctcccccttccctcaccccacaacaggccccggtgtgtgatgttcctattcctgtgtccgtgtgttctcattgttcaattcccacctatgactgagaacacgcagtgtttggttttttgtccttgcaacagtttgctgaggatgatggtttccagcttcatccacgtccctaaaaaggacaagaactcatccttttttatggatgcatagtattccatggtatatacgtgccacattttcttaatccagtctatcactgatgggtatttggcttggttccaagtttttgctattatgaatagtgccgcaataaacatacatgtgcatgtgtctttatagcagcaagatttataatcctttgggtatatacccagtaatgggatggctgggtcaaatggtatttctagttctagatccctgaggaatcgccacactgacttccacaatggttgaactagtttacagtcccaacaacagtgtaaaagtgttcctatttctccacatcctctccagcacctgttgtttcctgactttttaatgattgccattctagctggtgtgagatggtatctcattgtagttttgatttgcatttctctgatggccagtgatgatgagcattttttcatgtgtcttttggctgcataaatgtcttcttttgagaagtgtctgttcatatccttcacccactttttgatggggctgtttgtttttttcttgtagatttgtttgagttcattgtagattctggatattagccctttgtcagatgagtagattgcaaaaattttctcccattctgtaggttgcctgttcactctgatggtagtttcttttgctgtgcagaagctctttagtttaattagatcccatttgtcaattttggcttttgttgccattgcttttggtgttttagacatgaagtccttgcccatgcctatgtcctgaatggtattgcctaggttttcttctagggtttttatggttttaggtctaacatttaagtctttaatccatcttgaattaatttttgtataagatgtaaggaagggatccagtttcagctttctacgtatggctagccagtttccccagcgccattgattaaacagggaatcctttccccattgcttgtttttgtcaggtttgtcaaagatcagatggttgtagatatgtggcattatttctgagggctccgttctgttccattggtctatatctctgttttggcaccagtaccatgctgttttggttactgtagccttgtagtatagtttgaagtcaggtagtgtgatgcctccagctttgttcttttggcttaggattgacttggcaatgcrggctcttttttggttccatatgaactttaaagtagttttttccaattctgtgaagaaagtcattggtagcttgatggtgatggcactgaatctataaattaccttgggcagtatggccattttcacgatattgattcttcctaccaatgagcatggaatgttcttccatttctctgtatcctcttttatttcattgagcagtggtttgtagttctcctggaaaaggtccttcacgtcccttgcaagttggattcctaggtattttattctctttgaagcaattgtgaatgggagttcactcatgatttggctgtctgtctgttattggtgtataagaatgcttgtgatttttgcacattgattttgtatcctgagactttgctgaagttgcctatcagcttaaggagattttgggttgagacgatggggttttctaaatatacaatcatgtcatctgcaaacagggacaatttgacttcctcttttcctaattgaataccctttatttccttctcctgcctgattgccctggccagaacttccaatactatgttgaataggagtggtgagagacggcatccctgtcttgtgccagttttcaaagggaatgcttccagtttttgcctattcagtatgatattggctgtggrtttgtcatagatagctcttattattttgagatatgtccaatcaatacataatttattgagagtttctaggatgaagcgttgttgaattttgtcaaaggccttttctgcatctactgagataatcayatggtttttgtcattggttctgtttayatgctggattacatttattgatttgcgtatgttgaaccagccttgcatcccagagatgaagcccacttgatcatattgaataagcttcttgatgtgctgctggatttggtttgccagtattttattgaggatttttgcattgatgttcatcaggcatattggtctaaaattctctttttttgttgtgtctctgccaggctttggtatcaggatgatgctggcctcataaaatgagctagggaggattccctctttttctattgattggaacagtttcagaaggaatggtaccagctcctccttgtacctctggtagaattcggctgtgaatccatctggtcctggactttttttggttggtaagctattaattattgcctcaatttcagagcctgttattggtctattcagagattcaacttcttcctggtttagtctcaggagggtgtatgtgtctaggaatttatccatttcttctagattttctagtttatttgcgtagaggtgtttatagcattctctgatggtagtttgtatttctgtgggttcggtggtgatatcccctttatcattttttattgcgtctatttgattcttctctcctttcttctttattagtctgctagcagtctatgaattttgttgatcttttcaaaaaaccagctcctggattcattgattttttgaagggtttttttgtgtgtccatctccttcagttctgctctgatcttagttatttcttgccttctgctagcttttgaatgtgttcgctcttgcttccctagttcttttaattgtgatgttagggtatcaattttagatctttcttgctttctcttgtgggcatttagtgctataaatttccctctccaaactgctttgaatgtgtcccagagattctggtatgttgtgtctttgttctcactggtttccaagaacatctttatttctgccttcatttcgttacgtacccagtagtcattcaggaacaggttgttcagtttccatgtagttgagcggttttgagtgagtttcttaatcctgagttctagtttgattgcactgtggcctgagagacagtttgttataatttttgttcttttacattcgctgaggagtgctttacttccaactaagtggtcaattttggaataagtgcaatgtggtgttgagacgaatgtatattctgttgatttggggtggaaagttctgtagatgtctattaggtccgcttggtgcagagctgmgttcaattcgtggatatcgttgttaattttctgtcttgttgatctgtctaatgttgacagtggggtgttaaagtctcccattgttattgtgtgggagtctaagtctctttgtaggtctctaaggacttgctttgtgaatctgggtgctcctgtattgggtgcatatatatttaggatagttagctcttcttgttgaattgatccttttaccattatgtaatggacttgtctcttttgatctttcttggtttaaagtctgttttatcagagactaggattgcaacccctgcttttttttgttttccatttgattggtagatcttcctccatccttttattttgagcctatgtgtgtctctgcacgtgagatgggtttcctgaatacagcacactgatgggtctggactctttatccaatttgccagtctgagtcttttaattggagcatttagtccatttacatttaaggttaatatcgttatgtgtgaatttgatcctgtcattatgatgttagctggttattttgctcgttagttgatgcagtttcttcctagcctcgatagtctttacaatttggcatgtttttgcagtggctggtactggttgttcctttctatgtttagtgcttccttcaggagctctttcagggcaggcctggtggtgacaaaatctctcagcatttgcttgtctgtaaaggattttatttctccttcacttatgaagcttagtttggctggatatgaaattctgggttgaaaattcttttctttaagaatgttgaatattggccccactctcctctggcttgtagagtttctgccgagagatcagctgttagtctgatgggtttccctttgtgggtaacccgacctttctctctggctgcccttaacattttttccttcatttcaactttggtgaatctgacaattgtgtgtcttggagttgctcttctcgaggagcatctttgtggtgttctctgtctttcctgaatttgaatgttggcctgccttgctagattggggaagttctcctggataataccctgcaaagtgttttccaacttggttcctttctccctgtcactttcagatacaccaatcagacgtagatttggtcttttcacatagtcccatatttcttggaggctttgttcgtttctttttattcttttttctttaaacttctcttctcgcttcatttcatttatctcatcttccatcactgataccctttcttgcagttgactgaatcagctactgaggcttgtgcattcatcacgtagttcgcatgccttggttttcagctccatcaggtcctttaaggacttctctgtattggttattctagttagccattcgtctaattttttttcaagatttttaacttctttgccatgggtttgaacttcctcctgtagctcggagtagtttgatcgtctgaagccttcttctctcaactcgtcaaagtcattctccgtccagctttgttccattgctggtgaggagctgcattcctttggaggagaagaggtgctctactttttagagtttccagtttttctgctctgttttttccccatctttgtggttttatctacctttggtctttgatgatggtgacgtacagatgggtttttggtgtggatgtcctttctgtttgttagttttccttctaacagtcaggatcctcagctgcaggtctgttggagtttgctggaggtcccctccaggccctctttgcctgagtatcagcagtggaggctgcagaacagcagatattggtgaacagcagatgttgctgcctgatcgttcctctggaagttttgtgtgagaggagtaccaggccgtgtgaggtgtcagtctgcccctacttgggggtgcctcccagttaggctactcgggtgtcagagacccacttgaggaggcagtctgtccattctcagatgtccagctgcgtgctgggagaaccactactctcttcaaggctgtcagacagggacatttaagtctgcagaggattctgctgacttttctttggctgtgccttgcccctagaggtagagtctacagaggcaggcaggcctccttgagctgcggtgggctccacccagttcgagcttcccagctgctttgtttatctactcaagccttggcaatggcaggcgccccctcccccggcctcactgctgccttgcagtttgatctcagactgctgtgctagcaatgagtgagactccatgggcgtagggccctccgagccaggggtgggatataatctcctggtgtgccatttgctaagactgttggaaaagtgcagtattagggtgggagtgacctgattttccaggtgctgtctgtcacccctttctttgactaggaaagggaattccctgaccccttgcgcttcctgggtgaggcgatgccttgccctgcttcggctcatgctcggtgcactgcacccactgtcctgcacccactttcygacactccccagtgagatgaacccagtacctcagttggaaatgcagaaatcacccatcttctgcatcgctcatgctgggaactgtggactggagctgttcctattcagccatcttggctccacactgtcaaatgctttttctgcatctattgttatgatcatgtgatttttcttctttagccttttgatgtgctgaacacatcaattcaaatgattttcaaatgttgaaccagtcttgccttacctgggataatatacaccgcctggttatggtgtatttttttaaataactgtcggagtcaattcactaatattttgttgagaatttttgcatctatgttcatgagaaataccrggctatagttttcttttcttgtgatgtttttgtctggttttagtattagagtaatgttggcctcacaaagaatttggaagtattcccaatgcttctgtattctggaagagattgtggagaatttgtataatttctttcataaatgtttggtagaattcaccagtgaacccatctgggcctggtgcttctgtttgaaactgttattaattattggttcaatttctgtaatagatataggcctattcagataatctatgtcttcttctgtgagaattatctttcaagaaattggttcattttacataggttatcaaattttgggcatagagagttgttcataatattgctgtataaccttttaatgtccatgagactacagtgatatcctctttttcattactgatattagtgatttgtcttccttcttttttgtcttagcctgactggaggttcatcaattttgttgatcttttcaaagaactaggttttatttttgttaattttctctattgatttcctgttttcartttcattgattttggcactaatttttattatatgttttctcctgcttattttggatctaatttttttctagtttcctaaggtggaagcttggatcattactctccaatctttcttttgttctaatatgtgcattcaatgctaagcacagccttccctgcaaattttgaaaaattttatcttatttttatttagtttaaaatatttttaatttcttttgagatttctgttttgacccataggttacttaaaagtgtgytgtttaatccccaataattttggagttctccagctgttattgatttccattttaattctattgtggcatgaatgcagatattgtatgataatttctgttcttttaaatgtgctaaggtctgctttatgacccagaacatggtttattttgatgaatgttccatgtgagcttgagaagaatgtgtgttgtgctgtcactgaatgatgtagttcatagatgtcaattatatccagttgattaatgtggtattattgctatgtccttaagaattttctgccagcagactctgtttatttcagaaagaggagtgtctaattgtcaaactatattagtgaattcatctgtttctctttctagtttggtcagtttttactcatgtattttgaggttctcatgttaggcacatacacaaaaagattgtgtatatctttttggagaattaacccttttaaaattatgtaatgcccatttatccctgataatttttcttgctttgaagtctgttgtgtcagaaattaatatagctattctgatttcattttagtattagcatgatatatatttcttcttccatttgcttttaatctgtatattttttaataaagtgagtattttgtagacagcacgtagttgggtcttgtcttttgatccactctgatattctgtatcttttaattggtatatttagaccactgattgttgacacaagtgacactactatatttattactgctttcttttcactacctgtgtccttgcttctattttagtcttccaatctttgtcttctttttgaggttttcattaatcattttatgatattctatttttcttttttcttagcatagcaatatacttttttttaaacaaaaagcgattgccacagagttttcaatatacatttataattaatcccagcatacccttagataatactatactacttcatagagagtacaagaaccttatgataacaaaagaagcctaattctctctcccatcactgtatcattgctgtcattcatttcacttttrtataagagtatataatcgaatacattgttgctatgattttgaacaaactgttatctgttagatcaattaatgataagggaaaagttttaattttaattttgctaattctttcgctgatgctctttctttctttatgtagatccatgatttgaactatatgattttcctcttctatgaagaccttcaacatttcttgtaaggtaggtctgcttggcacaaaaccctcaatttttgttgtctgaaaatggctttatgtctcctctacttttgaaggataatttcactgggtgcagcattctaagttgctttttttccctcaacacttacatatttcatacctttctcttcttgtttgcatgatttctaagaaatcagtggtaattctctttggtcttctaggtaagaatttttttttctcctgaatttcttcaagaatttttatctttggttttctgcagttcgaataggatatgcctctgtgtgtgtgtgtgtgwgagagagagagagagagagagagagggatttggcaatttggcatttatcctgcttggttttctctgagcttcctgaatacatggtttgttgtctgacattaatgttagaaaattctcagtcattattgtttcccatattcctattgtttctttttgttttcttcttctgatattcccactatatgcatttacacattctatggtggtcccacagttctttggctttttgttttgttttgtttttttctcagttttctttttctttgtttttccattttagaagtttccattaatatatcttcaagctcagagattttttttcctcagccatgtaaagtttactaattagcacaaaaaaggcatttttcatgtctgctacagattttttcttctgtagcatttcttttcaatcctttcttagaatttccatctctctgattacattgaccatctgttcttacattctgtctactttatccattagaatccttttcatgttaaccatacctgttttaaattccaggtctactcccaatattcctgccacatctgagtctggtttttatacttgctctatgttttaaaactgtgctttctccttttagtatcccttgccattttttcttgataaccagacatgacatgatgtattatgtaaaagggactgtaataaacagaccttttgtaatgtggtgggaagttgttgaggggttagcattctatatgattaggtctcattctttcattaagactgtgcctctgaactatgaatttcacaagtgcttctccatctccaccccacaagactcaggtgggacaggttggttagagtgggctggagctgtgaatttttcttcccccatgtggaaggctaggaggtggctggagttgggtatttcctttcccctagattgggtaggctctgataaaaacccctacagttcaggctgtgctaaataaaatagttcctcttaaaggcaggttttgttaagaacagaatgctctggcatatgtccacatggtttcttctcttctcctcctgccagaagcataggggaatttttcattcttagaagctggtcaagctcctggatgtaaagctcacaaaagtgtgagggcctctctatcgccatcctccgaccctatggagttttaaacactcacattagtctataagcctaaagcaattaatcagttatatttcaggtttccctaccctggtcctggttcccacataagtttcagtttggagtttttcttccttaagttctttgtttctgcctgtctgtctttccagtttkgggggcagcagttttccctgtgacctaacttcactaaattttctaactaaaagacaaaggatggctaaatagattaaaaacaagacctaactatatgctgtctatgagaaactcacttcacctataatgacacacatttactgaaagtgaaggaatggagaaaatcatttcatgcaaatgaaaaccaaaacagagcaggaggagctacatttatatcagataaaataaactttaagtcagaaactggtaggacatccacataaagatgcccagtaggtggcttaataaatgactgcagccctggataagttattgtgggtgatgatatcgattcaagagtcatcaacatatggacaagagttaaatacaaaagagtatataaaatagcctagagcagaggttttcaacttttcttctgctatgacagatgtgaatgacattcatatgagacacactcccaggaacatactcagactgtaatgaaaaccaaacacacacacttacaaacaaaagtagttggccaaataaagcaaagaactcccaaactgtttttatagatcatactcgcaaaagcattttactaccaaaggatcagtaaaatcacatatttaattatcttaaaacatcatttcttggagagaaaaaaatgcatatatggttaatctaacataaaaactattttgaactatattttgaagactaaattcaaacccccacaggtaatacaaggaaataaaaatgtattactagtaatttttaaattatcattttatcattaaaaagtatagtgagtagtatttctatttattcatgatattattataagtaacattattgcacacactatttgaatgatcactttgtctttgatttggagattgtaaggacagcctcattctcatttctataccatgaggatgtagatgcatatacattttcttcatctctctttgttattaaaaatgtgcccatggataaatcaagaaaagaaacatacctataaatccacagtttatagactataatatttcaaaattgttataactcttaatgacacatcaataatcatagttcatggatgttttcagcaaatataaaataggctaagaattatgagaaattcacttacagctaactctaattccatgttttcacacacaagtaggtacacactattgaaaaataaatgcataagtgtgacattcttataatggtaaatttgaggtgagtctaattaattaaaaatttaaaattttcasaaatccttataacaattcttatgagtgagtmgttttgacacgtgctataactgatcgtgatcctgtaatgtgtcatgccactaagatcaagaggactaggctaggaagaggactgtagagaaagcacagaaaaatgatgatgacaaaaccggggaccaccaatatttaaactgtcaaaagaagatgacaagataattagctggaatgtagaaaaagagagagagaagggtgtcacagaagccaagagaagtgcaacattcaaaggataaagggtcaacgtgtcaaaatcctgttgaaaggtaagtaaagttagaaatggcaatgatggagtcattgataagcttcatgggcccacgtagattactggttaaaagcatgagctgcagagccaaatgtctgccatgtgcaacctctgtagcctgtgcaaggttcctgatatcttttggagcttatattcaagwgggaacaaatagcagagagtaaaaataggtagatagatgattgatggacagacaagcaacacacaagtgaacattttaatgtcagggaaaaaaatactatgaaacaaatataaaacctactgccttcacagaggttacattctaagccgagttaaaaaaaaaatacctaaatggaatgcgaactgccagttcatgctaaatggttccagagtgacctcactgggttgtggaagtgcatagatgaactgactgcgtatctggactaggagggttagggaatcatccaatcttaaggaggggctagtagcaggtaagtgcagaggaagggagaggatttttgacacagaggcaaaactgaaaggtctgtggggtacactaagcattcctgtttggctgaaaggaaggatttatgtagaaaaatattgaccaaaaaatagggaaagtaaattggggtcagagggtagagggccttgaatgaaaaactaagaatttgtagaatacccttagcgtggtacacagacattaaagaatttctgaaataaaaatacaaggctcagaaagatactaccttaaaaaggaaaatatgaacttcagaaaagagagagagacagtaaagttttaagaacccaagactattttataccaaagatttgccttaatgcaaacagaaactttaaaacatgcacacagacacacatactcttcaagaaagctcttgagacttattggatgttgtcctagagaaccaatgattataaacattgttttatttacttttttttctaaaaagaatcaatacagagatacttaatttgttccattttctctattgcacaattaatgcaatttctcacctgtcatgccatcactatttaataaccacagaagagctgacagatggcagaaaactgtggagagccagatttaaaggattctagaaatgtccttgctgttttccaaaagagaatacacattatataataccaaatccactgtagcccttgtttgaggaagtgatacccctatttttacactaagaagagccttctgaatatagtttttatttagtaaaagaaaaacatcttcctttgcaaagaaagtattaaggagggggtgaatagttcacattattcatgctgaatttttttggtttttggctgaaatagaggtgtttatagtctactcacgaaagtgatgtttaagcagcaaaagttagcctttcttgaaaagatgacaggtgaagactcaagattacaggtaaattagaaattggaaacagcttatcttttatcttcccttctaactaaacattacagccacatgaacaactctattaaatacttttctattacctaaggcctttactatgccactctaaattatctttctccctatctaggaggattgtgtccttccaagaactattcatatgttttattattatttttcttcaactgctctctattttggaggctttctttttaaataggataaagcaagagaatctctttgtgctaataatgaaaggatacatgagtcaatgaagtgctctctggtaaaagtatctgttttagttcaacacacgcacgcacacacacacacactccacaactgttgtcaccagctcaggcaaccatacactgagttttccccaaaagtctctatttcaattagcyccaaattcatagtctgctataaggtacactccacatttgttaaaccactgtgacccaattcctatagtaaggtyattataataactaaaagatctagaaattagtgggggctttcagaagccagatattttagccaagtagtttagccctggtcaatattacaaagtagatataattgtacaaactatacatatctgaaaatattctcaaaaagattccctccagccttcccatctcctgctggcaaatgttctyccttcattccagatacaacatggcctccactgggcaccatattcaasgcttgtgcaggatgacactttatctccatctgcaaaatgcaactacaagacagctgttattctaatcacttcatagataaggaaagtgagatgccaaaaagattaataactcaaagtcagcagaagattcaatctcggtctcttcctcctaagcctgtgctctttttccctatatcatgctgcttttcttctcctgtgcttttatatgtctctaggtgctacattccccctcccacccctattcctraggagggaaggatgagacagacagacacacaaacacacacacacacacacacacacaccccattgtagactttcagacatctaacagagaagctggtaattaggcaaaacaaaaaaattctctataaacaagtttccaaataaacatggttggctaaatgcacataatttcatctgctccttcttgaaatttcattaaagttatatatttaagagctttttttccattttttaaggattatatacctataaaggctgtgagaattgtaactcaacaaaattttgaaaacttagaagcagatgaaggagtgatgactgctttctcagatctgaaaaagctgaattcaaacactcagtgagaaaagccaagaaacartttgttttgcaccatgggatttaagaggctcaggaattaacaccaccakatacttctgacaatggcagctaaatataggatgaaagtctccttaaaaactaggtatacacctggttcctcttcccattctgcccagttagatgactgcctctccaccagcctagaaaaagatgggagatttattttctgcactatggaacaccacacrcaactgaatgcagattccatattgaatacygggaaatcagtgaaagtktatatggcaatcagaatgctgaaagatggcttttattgcctgggcaggaattttgaagaatattttctaaggaaacaaacaaactaaaaatacttaaattgacaatcaggtgtttcctgagagaatgaatggctcgccgttaccccacattgaatttaatcattaacaatcacatctccagttgcacagagctttcgattagtgttttattgcagagctcttaagtatgagtggaaagccgggttaaacatttgagggaggcttctaacataaaagacaaaagccacagcaaatttgtagacaaacccaagaagaaggatgtgagaactccattaacagaacacttcatyatcactatcccttgattactcaccatgattaatgtcctaagagkgaaaggacaccatgttcatgaaacagagtatgctatgagaaaacacaggaagagaaaaagcagtcttgaaacataaaagaggacaacagaaatgaaaagggttacaagataaagtgaacgaagtctccagatattagaagaaaatgacaaatatatgtaaaataagaagacaagtataaaaattgaaaaatcagaaagtccagcatcaaaataacaggaaagctagaaaaagaaagagaagaccaaggaaaaaggagtaagagtacaggagaagtcaccaaagatatcatgtyagaacatttacagacttaaatgttatgaatatctagattgaaaaagtccactgagtgaccaacaggatgaagaaaatgtataccaatatcatcatgaaatttaaaacaatggatttcaaaaccaaagataaaaagtcagaatagcattgggcttctcaaattccatacaggaacctaggatacaatggaacaatgctttcagaatcctgaggaaggaacaatgatttacaaacagaaatacaataccttttcaaattgccagtcaagagtgaaggtataattatttttaaaatgtatatgttttgtttgccatgtgccagatagttttcttagcaatttgtaaatattaactcacttcataagacagttatcagagcagaaatttctcaaaacctcatctcccatgtagtctttctcaggtaattaatggagaaccaagccagagcggtcaactaagaaaagtaagcacagtacataggaacggggctctcacccgacagagaggcaaaaaggaccccagagtcatggtacagatatattcccaggacattcactacacagtgaacctggaaatcaaccaaactgtgggggagatttattccagaacataaaagagttaatgtcttagagggtatttatacaactagagggagtttgaggattaattatgataataccatagtaaactaaataataagattaataaattagatgattcttaatgacaagaggaacgaagagctatgcaagaaagaaaatcaagtatattccatgattagattatcaatagcacacgcacaatygtaataacataaacgatactaacctaacgagaagatatgtggagaggtgtgtaaaaaaatgaaaacttaaaaatatcacaaagtagcaaagaaatgtgctatttaaagatctgaacgaaaacaccaattgaatctgttaaaagcattgaaagtggttgcctctagggataggaaatagggaactgtttccaagggattaatcttccctataaaactttctagaactgtttagttctttaaactacatgtatgtagagacttgaaattacaaaataatttctcagtgttcataaacagatttttcctttgaggcagtactgcataaaggttaaaaattagcagattgcttgggtttaatcctggctctttcattaatagctayttgaccttgggcaaattctttaatcgctctctgcctctgtttcctcttgtgtaaatgcaggtaggtaatartatcttcctcacagagttttgtgagggctaaatatatgcaatttgaacagtgcctagctcaacatgaagtttatgatcataattagtcgtacaaatggaatatttgagggtattttaggtccatctaaataataaaagaaataaaactaaagcaacaggacatgtagaggggaacaacacactggagcctttcaaaggatggaaaggggaaggagggagaggatcaggaaaaataactaatgggtactatgcttaatatctgagtgatgaaataatcttacaacaaacctccatgacacaagtttacctatgcaacaaacctgcacttgtacccctgaccttgaaataaaagtaaaaaaaaaaaaggccatttcattttattttcacccaaattatctatactggcccaaaattatgatttaaaaatgtcgaggaaccagcagactaacattctaagtagcaatgatttattaagcaaccctttgataactgaatacagttgctaactatgatcacttactgaatttctattcaataaggtatagagggttctttaatattacctccacttaaagaatatttatagcccttaatattctaacctccctccacttaataatttcagaaattgatagaaagtattaatatgtcttctaaaggaaaaatgaattaacttccatgtataattctctccttaccaaaaaaaaatatttaaaaagctgtcttcatattttgtgagctctggctaattttttaatatttgtaaagccaatatgagtataagttaaaatttattcttcttcagtatgccaagaaaaaaggagaggctcctcaataaccctcaagacataatgtcattttctctcctgtggatgaagactctctatctgctgaatatttattagtctgctgggtcacctgctagaaaacagacaattctccagcaacttcaaacactcttcttcactgaactacagtttggtatgagacgtcaaaggataagaatgtgcatacctaaatggtcaaatgaagatgaatgttccatatggcttttgccccatactgcccaagactgtgttaaaaactaaatacatcaggatgctctaagccactgaagagccatgtttgccagtcacattatactgggcttctctggttatacaaagggacasctaatgaagatattctgttgatataaaagcagtctcatggacagtaatctttctatatccttaggcagccacaatactgcctgtcaaatataattaccagcagaagaacagaaaactaacacttacctattaccttgttaacatgtccacaatgagccaatatgaaatgaacataataatggtgtcatttgtggggaaaagcctgagagacatggtttatagtgctcaccaaggtctgaatgtcagaaagaatattatgtgataagactattttaacatgcaaatataatgggccaggttttccgtttggtttcctgctatatccaccacatctagaatagtatttggtactcaataaatatctgttcacttaatgaattgagaactatgctgagttgtactttaaaggtgatttattaataaaatatttggtggtaattttgagtgtacataaatcacatctcaaatttattgctcacatatgaccctactctaaaacatgattagaacaactctatttaaattcaacttaaatgcaaatctgcttaacagggtgaattgcttcagtcataaagactgggttcccaaaagctatgcaagctaattcttgaaaaaaagtcatttttgaaaacacagaataaaaaagaaaaaggtctatggactatagtggtctagagaaactccgacttagtattttgcatcttcttttttttctctgtaaaacaccagtgtragcatgtcacttttgtgttttagatggatttargtccaaaattcttagtagggcattcaaggcttcctggctaccgaccccagtctgtctaytgcagcactcttcttggaactcttttcatctgctgtccactcacattgcaactcagcaccatcacatgatatcctgttctccaaaaggctgaaaaattgtatttccataactttactcatgctattcctctgccccaaaagtctacccctcatatccatttggcaaagtcccacttgtcctttgaaattcccaaggaaataaggccacttctctaaagccttccctgaccccctaattatagcaaaccactcccattatgctttataataatggctcccttaaagcacaatagarttgtacagttatcaaacgtttctccatctagattataacatcctcaagggtggagatggtgtctcattcatgctgagtctccaaaatctagtacagtatttcttatacaataaatgcccaacaagtgtttttaggtgttacctcagccatttttgcactgcccccctcccgcttctataggaacaatataaagcattctttgtcaaagacaaaatttaccttaggtttatagtcttcttgtcttagggacgttctatttttgctggtctgactactggcctacatttgacyctgtgactatactgttcctggttctctatttcctaagcttggatccaactcttgcttctctaaacaattccattagtaataattatggctaccattttctgaacctctatctctgcctatgcttcacaaattttctcacttaatctctaagcaactcatgagattataaaaatggattcataaagtgtaagtatgatggttaattttatgtgtcagcttgactaggttatgagatgcccggatatttggtcaaacattattctgagtgtttctgtgagcgtgtttttttgatgagaataacattttgaatcagtagactgaataaagcagattgccctccattacctaggtgggccatatctaatcagttgaagggctgaataggcaaaaagctaaccttcctacaaataagaaaattctcctgcctgcctttcttcaaactagtacaacagctctgcaaatttaggacttgccagccttcataattgcatgagacaatttcttatattatgtaataaatacataatatcataattattaaccataaaatatgttgattttatatacattctattacttctgtttctctggagaatcctaattaatactttaccaagacaacagtgctaattagctacagaactagaatttcaattgaggtctgtttccacagtccatgcttcagcaaacaccatccataggatgttatcaagaaacagcttttcttctggctctgacactggaggaaaagattttcccttgtcctcaaatgaaatcttggccttcagcaagtcacataacatttttttctcactctcagataacagcaagtcctgtggacaaatgtccagccccagataagaatccaaaccttaaacttgcttcaacatctgattttaacttcttctccacttcgggcgtctcctgtagttgagcacttacagtgagacaaagagtcatggtcctttctctcttcccaccaatgtgtctccctcttccccacgttgctttttgttttcttctgccaggatcagattgaggaaaagagactaggagaaagggatgtatcttgctggttggtacatttgtcacttagggtaggatgctctggtggcagatgaacagttgtggacactgtcatggataatcccctcctaccattaaactggcatgagcaacagctctcattcaggtggccactttagccacaactcctggttctctttcaatccatttgtattctcactgtactattgcttctttcaagcaacattcttgacaaagaatgttgtcaagaatgtccagtccagcatactggccatggggaaacatctatgactcctctaacagtttgttggaatgttcaggagttcacctttacttcccctccaaatcagttcatcagtgtgtctctctgacatactaggttgtctcaagaggggctcagattccagtttattgtatcaccaaacttcatacaacatagatgaggctctccaagtgatctgattgaagatctcccaggcctgatcaaaaggaaggtgcaagtccacttgcagatgaaaatgtgaggctcacaggacagattcctctagataaagtattatcataaaatcctaactacatttccttgaaatttccaaatccttgaaatagatgaggagctcaacatcatgaaactagctttaaaatatctacttcagaatgcccacttagtggtgtggcatctcactttgaaactgcacataaattgtatcccagggccacactggaacatgaagagttctattctaatatattcttacagttgacactgttcgtccctcccctacatctccttgggtcttaccattttgacacacacctgcctgacttcccactgccagcaactgcatctctgagactgaggggaagctctaggaactagtgctaggaaattaattttcctgtggagcagctacgtagcagtgacatactgcctgagtgagataaatttgggtcacattttcccaaaatttcctaccaggattgggttcctgctgtgcacagctgtaacccacttcacttgaatgaagtacccaacactggatgtcttgcctttcctgtctcacttgcccattgccctatacccgtgcttccggtgctcacctcccagatacaatctatgagctcaaatccttttctcacagtcttctgggagagccagacactcacactcttaatcattcttctgcattgtcattgtccttgcctccacagttgcacccagagcaagaactttgaaagacagacactatgtgagtagtcacatacctactgtgatggcaacagcctccacatcttaacaaaagtgagcatttttaggtcactggcagtttgccaacatgaacacagctgaccccaagaagtcaggatgagacctgctatataattccaggtaaagaagcagtcaaagcacaatgatgaccttaagctacttatgacgtgaggccaaagaaaaatgccagtgctagtagatccaagagcagatctgccttccagatcttaattgttgccacttgatttgttttctacctggcttcasactcagatcagtagctcttcagttctgttaactacacagtgcagaaataaatccactaaatgtagcatttatgtgctcaagtcaagttgccccaatctttatgtctatctttagttctcagagagagcaaatatacattatataaagattgctcagtagaggtaaaaattacatatcatataggtacaaagtgaaagaaccttggaaaaataaatgtcacaaacatgaatggtcgtgttggacatccattcactgaatgctctttatggaccagatggtatgctaggcaatgaaggtaagaaagatattaggtctgttcttaagagaatcacagcctgggaggggagacagctacataaagacacaatatgatatatataccgagtgttagaatgaaggtaagaattgtctgcaatgggaggagaaaggaagaaacatgtttgagcgctaaaggaatttaaaaagaaacattttcttaaaaagttgaaacccagagaaaattccaagcagaaataccagcaagtacaaaagtatgaaaatagacaaagcaagaggtgttccccattagaagtggaagtgagaagagtaaaaagtgaatctggataggtaggcacaagctaatgagacctgaatgaattgggtatgtctgaaactttattttttctagcatatttctataatcaaatataaaaatagaagaaatataatctgcaatcaggaaatgcaataattaaattgtgtyaggmaatggaaaggaagaggagacacaggctgattactgtagaaatgtatgacatgtaacttctttagcagtacatcttcatttccagctttcgagctatactgaagttgtttttttctcccccagatgtttgcctgaatgcaatcttgccaaattgcattctaattcttcctccaaagctagtgcacacaagatatttttctaagaaagttctgagtttagtggttagctctgtagtagatgattcaagcagaaaagcctatttgccttacaatatatcctgggggtttcttaaggagagtttctctgcttttccatcactaaaagaacaacacaattactttcctgggaaacagaaatttaaagaacacaggttatcaacaatcttaagaaagctgagatgtcagattcagaagttcagcttctgtggacagacaagataaatgtcaacctcagcttaacctccgkgggggaagatgttgtcacccgaatagttcttttaagaccactccacccagggttaaggatattctcacttggctccattaaaggcctcaggacagggcatgggacacctagtctctttgttgttaatttggagagtgcattctaccctgtaaattagctcatcctagcccagcatgtctgtcatttcagatcattaccattccctctgctccctctcatgtcacacaaaggtgaaagaatatgcttctggaaggcaattcaatgagtgtttgaaggctgtggggcttgctcagctgctctcaaatgtctctgaactccatgcaaccacactgtatcccctcagtggccatmtcggcacagctgggctttttcagaaatggctgtgaaatgtactgtgaaaagaagagagagcaaaactctacttaatagcaaatagaaagctcaccaactagatcagttcagcttggtcttttcatcaatgttcaccagtgtatctgccacctgaaccgccaaggacttactaacaaacacaagcctggccagagatttttgaaaatggctggtagacaaacacgaatttccaggcagttccacagatctcagctccctcgggcatgtgtatgttaactctcctgctgtccaatttcaaatctcctttctgacccatccccttttctccatgaagtctttttttcrtataaattgagcaaatgttaccttaacattaacctttctcatgatacttaatttatgcctttgtttgctgggcattgaattttttaagccacctattaattcattctgatggtgcaatttccataatgtaatttctttggtagagaggaaatggcttttttctatcatcatattttcttcaggtaccattatgaatgttctatttagtcttgcaattagtcttatacttaacatatgctgacttcacagagacacatttattattttcattgcctaatgctatgaaaagaaattcttggtgtagatcagtagcctatatttttcaggcaattttgataattgaatgaccaggcatatggagaaggagtaagctccatatacatgctatgctcttccctgcaactgatccacagtgttcctttacatggattttctttctctttttcaccacatgtccctctgcaaacctctgactttgtttatctgtctcatatctgcatcccctcagtagtcaacttaaaaataacttcytcaaaccttcctagtccttcaaatttaaactaagaggttgaggttcctcctttctccattggagtatatccacactacattgtttaattgccttgatttgcttgtttatagccctcacaaaattataatctcttcaatggcagaagctgtgtttttttgttttgttttaaccgtcacatccctgcctttagacatctaatatatccttggctgactgactattatagagtgaattatagaatgatcacatgttctatcccaatttgtctaatatggaactggctgttttgccaatgaaaccagtaatagctcactcccaaaagtatcacargttggattaatatatatggttgcctttatgagcaatacattggaagaagaatatattccatattcagagaatctgcatttgaatctgagctctagtatgtctttgtagtatgaccttgagcaagttacttcccttctttaatcccagtttcatcatctataaaacaaggttgaagacagtatttacctaaagggttattcttagaaacattggaaaatgacacagtggaaattactttgagaacaggcaaattgctatgtaaatcataattaccactctatcactacagtattagtatatacagcagtatatacagacagataaaaatagccatgaaactaacaaaatagtctagaaagacatcatggaataaagaaaagatttccaagaattaaagaacttgggttctcagcctcattctttcattaagaggttataggtatgtccttcccccagggcatcctgacctttaaataggagagaygatccctaaaggtcattctagctctaaaatgcctggttgtctacaaatgaggtgttttccaccatttcttgataacccttaaccacagagacatttgattacttacaacaatgtaaattttataaatttactcaactataaatacttcaaagtaaagtatagactaggctacctcaactattagcagttgtacactccaagaccatgaattactaagttgtaaagttattaatcaggggtaggtgctgagaggccacagaatgcaaaaccatgtttaagtttaagtaatagaaagctgccttcgaagagattagaatctaatatttgagacttttgtgttattcttaatgaccttcttacttatcctgagtgttttccttctttggatagctctactaaaagattaaacatataaatgaaagcaaaacctcaaactccacgtttgatcagagtatgagaagcttccattttagttccatttctgattaattcccaattataaattcattacagarggacttgatagcttttgactaaatttagcaagggatatcaaaatatatctgagctcattttgaggttcaaactgctatcctaaaaagtataacatgccataatttttcagatgaaaataccttcctttagctgcatgagatttgaaagaaacttacgcatggtcaaacgggagtgtcaggcacaacttggtgtcaagtctctggtctgtgcttctggatccctgatctagctccattttttatcccattccatggatcaaacctgacctaaggcacaggtatacctgcccccaaaaccaatgttacaataggaaaaccaattggatctacccattttactcagtgtttcttccttggtccctattctcaagatcctagttacctagcctctgtaacataccagtgaaaagaaaatgaactttgaagtcagacctgagttcgaatcttgtttctgccatttactaactgtgtgactattggtagctactaagtctctgttgtctcatctataaatagaataatgaatgtcctttggagatttagcaagaattaaatggagcagtgtgtgtaaacatgtgacacagtcttgcgtgtaaacactccatatgtgtccattaatttctgtgtgtscctgtgtgcattcaatgaacacaaccctgttctttcatgaacattaatcttgttcttgcccttgattttccggtagtctgaagctctatcattgaagttgttccagaacttcatcttagtgtatgtaacataactactcacttacagaccatcttraagccaaaatctgcttggttcattgaatatttccaactccaaagtcttcttcatggtgatccattccatcgccttgaacctcctcatgtcattgccaaagtttacctggactatgatcattaattattgattcccttggaccctggatttgcccaccagaatgagcactgcctgstggtaacttcagcttccttacatcctgatcatttgtccctaaatattcctacctggtggatctagtgctgccctgtcccatgaaagtggtctgcacttgctgttgatggcgggtggaggtggggggctgggagagagtgtagtatgttactggaactaaattgtctctaacttcatgtgattatatttgactaaggagggttaggctagttaataatgtataagattatggatttatatgcttggatcttcaattgcatatttgcatgatgttctatgcaactatacaatgatgatttttaaagagtctccttttatattgggggaatagaggatctgaatgccctcacctcagaaattctgtgactaatctctgggtgcttaagtcagaccctgacactgtccatcacatactgtcatacaggtatctagataatgtaggcatgctgttttttaaaaagtaagtgtccttagcagtaattaaacagatctaagtggtaaactcttatagatgctttcatgcttaaagtctcagtatatctcaaaaacctccatttttatatctgataatgcttttttatatatgcctgataaatggcatttacatttgaactagacctcagattcctcatttaagcattcagaaccgaggactcaaaaggaaaagagaatgccacaagaacgtagtggggcttagtgactgagccaggacgaaaacccagtccatatggtttacaaattcaagagcttcccaaccagagtgtcaagaatagggtaaggtatgctgagctactgatcccctcaaaccagcctggccacctttagcagtgagaagcctcatctatttatttccatgtacctatcaaacattataatttatatgtgtatcataatataaaaaggtttgggattcacttatttctctttattcccaacatttataatctgcaatgtcaaggaatagagtgttttgctcaagataatacaatttatggaatgatctgaattagagtcactggtttaatcttacccaaaggttgactcttttgagtttgtttgtgttctaaattcctatcagccaaagacaaaatatgacaactttccttatctatctaggtgattaggctataggccttcaaatccagctggcagctgataagaaatcaaaacaccattytgaagaagaggaaaaagatatttcaattccaacagccaggagcaaggaagagccctgcaggttttcaggatggtgtaaatgatgcaaagtggtggctgtgtcatagccctaaactgaaaggcccccgagtggagtggagaggagaaaagtacctaaaaagcccacatatgcattcatacaataagtaactgttacttagagatcactgcaaatcaggtttatgttaaataactgcaaattactcctctacacagatccctgtctgaatcttttaatatgtgaagatgctttttgagtaggatctgaattaactttcccagtactcaaagaatgaacccttatgacacttttaaatagttgctggtttgttgccaaccacattagcaaaagtactggttactaagtaaaaaatattttaagactaaattacagtaaacatgaaagctccacagtttaaacccaatataaatcaaccatatccaattatcaagttaaaacaaagaatattaactcctgaaagctgaaagcaagattttttaaaaaacatcaccaatgggtattttagacttttgcagttttttgtccaaatcttcttgatattgtgaactgtaccccttccagtttagtttcttctggactttccttacttaactgacagttaccttttaaaatttgcacacattatgattaaaattgggcctctactgtgatgattcctatttcctctcatgttttaaagtgcaaactaacattcaagtgaacattagcatcaagtaatgcagacatttgtatgcatttccttkattcaatttgtgaccttaccagttttgaattggaattgcaccatttcgtagataaaggaaactaagtatattgctgcacttttaagttttcaaaatagtgtttaaaaattgcattgtttttattttttttaaactcagtttaaaaagacaaaatgttctttcaaaagaggcatctaaatgtgttcctaattttgtatatgggcttaggttttgtaaccaataaaaaaagctgctatcaaatatgaaaaaaaaaataagtaactgttttagtgaawaagaaaaaaaaaccttctttcaagaatatatctgttgaaatkgataataatgtggtcatgcctgagggaaaaatgcataggtttkgtagtcaaacctactaattattcttccatctaaaacactgtcttccctttggcttaataataagaaccttgatcaccagatttgcataatctctacaccaaatatatctcaccctcataaaaatacaatgattttcccattaggatatgaaggattcttactgcttttcttcacatagaagctgagttaccctacaagcagttagtgctttgttaaaaaatgacagaaactgattaaatggggttaagcaaaactagggggtggtcctgacttcaggcagggctgggtatagaggccccccagcaacagtatcatcaggatctggttcaaccttatccctttattcagttctctctgttggcttcctcctcagacagcctcttccctgtcatcatgttcttccagattccctcccacagtagaaaaatgagactcattgtccaatattaccaggataaaaaacaaaaacaaacctactttgattggcttgtgtaacaggacaaatcctgaaccagtccttgtggccaggaaaatgcactgttataatggtcttaaagaaaagttatgagttccaatgctaaatccatatggactgaaagcgagcacgggtgggtcccagaaggaaatcgagaaacatttagcagcagggtaaaagaacgctgggtggcaaaaagtaacagatgtcctattctccacttgagctgtccttgtttcctcaccacctactttctcctcaattctctgtaatccagtttctacagctatcattccccagactctacctcaggaaccaccatttgaaggctgagactaatctaaacagtggccacaaacctctgatttcttgccatcacccaaaatgcagtccatccctatatccacctcaattcaaacttacaatcagatactgcacttcctctctcctgctttgttttgtcttgttatgttgtttcttttcttttcttttcttttttttttttgacaggctstcactgtcactcaggctggagtgcagtggcatgatctcggatcactgcagcttcgacatcctgggctcaagcaatcctcccatgtcagcctcctgagtagctgggaccacaaggtgcgtgccaccacatccagctaattttttgtatttkggtagagatggagttttgtcatgtkgctcaggtkggtcttgaactcctgagctcaagccatccaccagccctggcctgccaaaaggctggaattacaggcgtgagccactgcacccggcctcctgctcttttttgtaccagagatactggctataacttttaaaatttctgccaatgggaatgaaatttctctatacctccatctcttcagagaatgcttcctccaccgtccatatgatggattgcatataaaatggtggtcccataagattataaggaagctgaaaaattataatggagctgaaaaattcctattggtcataatgtcgtagcccagtgcatcaatcacatgtttgtggtgatgctggtgtaaacaaacctactgtgctgccaatcatataacggtatagcatatacaattatatacagtacataagagttgatagtgacaaacagctatgttactggtttatgtctttactgtgctattgtttttaatcattgttgtatagtcccacttacatattttaaaaagttaaccacaaaataccccacgtaggtccttcaggagatattccagaataaggcactgttaccattggagatgacacctccatgcgtgctattgcccctgaagaccctctaacgggacaaaagttggaggtggaagacagtgatactgatgattctgaccctgtgtgatgtgtgtgtttttgtcttcattttaaacaaaaaacctcaaaaggttaaaaaaaaattaaaaatagacaaaagcttatagaataaggctataaagaaattagtttacagagatgtacartgtgttttttaagctaagtgttattgcaaaccagtcaaaaagattttaaaatataaaggtttataaagtaaaaaaggtataataagctaaagttaatttattattgaagaaaaatattttaataaatgtagcgttgccaaagtgtacagtgtatatacagcctaccatagtgtacagcaatgtcctaggccttcacattcactcaaccactcactcactgactcacccagggcaacttccagtcctgcaagctccagtcatggtaagtgccctatatargtgtaccactctttatcttttataccacatttttactgtgtttagatattgatatggtttggctgtgtccccacccaaatctcattttgaattgtagctaccmtaattcccacatgttgtgggagggacccagtaggagataattgaatcatgggggcggttcccccatactgttcttgtgatagtgaataaatctcgcaagagctgatgattttataagagatttctcctctctggcttgccaccatgtaaggtgtgccttttgccttttgccatgattgtgaggcctcctcagccacgtggaattgtgagtccattaaacctctttttctttataaattacccagtctcgggtatgtctctatcagcagcatgaaaacagactaatacaaatatgttcagatagacaaatattaccattgtgttataattgcctcaaatattaagtacagtaacatgctatataggcttgtagcctagaaaaaataggccatatcgtagagtctaggtatgtagtaagctataccatctaggtttgtgtaagtacactgtattatatacatataacaacaaaatcgcctaaggacacatttctcagaacatatctccatcattaagtaatacatgactataattagatccatgtccatgctcgaaatgtctgtatcctttacagctctttccattccatggaaagctttggcattctccaagcttgctaatgctgatatctacacacatgacaatttcagtgttacataaaccttttcttgacatctaacctccactctagcctaaactacatagctgattgcctcagacatcctttctgcacctcagtttgctcacatataatatggagacaatacttctgccttcttcatagaaaactggtatgatttaaatgagatacatgctgtaaagttcttagcccagtgcctgacatatagacgctcaatatatattagctgttattactgtcatatgrgtgggcttgcaggtatatggtcatactttactatatctgtattatttcaacattctttgagtcaaaaaaaaacaatttgtattaaatggaataatttgaatctggtggaccagatgattgctgtcactattctgatgcccaaagacacatccaaacagagactgaatctaaagtgcctgtgcattgagcaggatccttatttattgactcttaattttcttagyacagcttaaaaccttccccttcataacataaatacctaaaggtaagtctaagagaaaggtattttgtaattactgagttcctactatgtgccaagcagtcaaaataggtaatttcacttaatcctcacaactattttattgcatgttttcctcaatgaacatttactaaataacccatacatgataagctttgggacacaaagatgacaaggatacattgtccgcctgcctacgccagtgagggaaacagattaagcaaattaacaagtacagtgcagtgtgaataaatgccaggacagagagtgatattctggacacagagtagaggtgaaaacaaactgccttaaggaggtaaaacctgaacttcattttgaacgacaaggaaaagccaaataaaaatgagagaaaagatatttccttccaactgaggacacaacagctaagaatttactgtgtacaagcactgtgccaagcactttatttatttctcatctcattcttataacctgaggaagcaggttcacagaagcttgtgtaacttccaaggccacagaaattgccaagagctagagcccagctttgaatacaggcaactgactccaaagcctcatgcatttaaccactgagctatttcacagcagggaagaagggaagacttggaaaactatgagtagttttagtttgactaaaatacaggttttgtgtgggggaaaaggaaatgaggctacagaggcaggtgagaactaaattaggaatggcctgtgtatcccactaagaagtgctaattccatcctcaatgtaacatgtaagaaggatgcatggcaggatcttaagcatggagtcataaggtagatagatagatacctaatggcaacaatttatatgccaggatgtgccctaagcagtacactccatttaatcttaaaaacaatccatggagatagacacaattattatccccagttgtaaaagtgaggcacagagaagttaagtgactagcccaagatggcacactagctaagtagaagagccaaacttccaaccaagcagtctagctccagaaaccgtgaccttcaccactcagtcaccttgcttgcaggtagaacacggacaatctctctggctccacctatgtgctagatgaatttgagagtatctatcctggaagagacaggcaacatgggaagacaatattcttcaggcaagagagcaaactcagagaagtgaggagactttgccccagatcagacatgtgccagagttgggatttgagtccaagagtgtcatattcaaaagtccttaaatttataatgtttggggatgtgtactgctaattcaatttctataaaattattccaaattctaaattatcttggtctacattgagattttattctctgtacattcagcattcaagtatgatcccactaagtgctgtgcttaagcatgtcagaaaattatccacaaattgccatgtttccctatcctcaagaatgcatgggctcttctctgtctaatggctgtaagagagcctgcagagcatgtcactatttaaagttaataagcatcagcacagtgagcagatcattatgaaaatcattatgtctgctctctcatgaactgtttttaatatgaaattgatcttaaaatgcaacgaaagtaaatgctatagatttgttgtgttcttttttctcctactctcttatcttagtaaaatttgaagtttaatgaatgttactcatttctattcaatatctgactttatggtgaagttccatccagagacaggaaatgttatgctgtagaaggaatgaggtattctcaacctctggtatatggattccagctacctgtctgcttaataaatgctacaatgttgcatcccaccaaaagccagacttgggctgctcaacataacaaaaaaaataatggaaagtaccatttcattttaagggtgccctgctgcctctccagagatcacccctttgtgtgcttaagggtgcagattaaagagtgtgcctttttttttaattaatttaaacctacactgaaagttttacaatggctatggtagccactaaccacaggtggctgctgagcacttgaaatgtcgctagtctgaactgagatgtgtctaacctgtgtctagtatctttcttatggcagcttctaaaaaattttaaatcacatatgtggttcacattatctttcagttgaacagtactgttctagagcctttacgtcttctactaatctcatagcattcacgtgttatgtgcatgtgcgcattttgctttgttttggtaaagatacagcgagtcctcttccaagaaattcattacaatttgctttccttctacaaatacagtcttcaaagaggtaacttaagtgaagataccaagactcagttttcttatctgtaaaacagagtttgcccactagaccccaaagattgtttcctagctttaagcagtctaggaggctgagtcaaaatcattttctacctcatctagttacatgtgcaaaaacrgcctatgcttcagaaagatatgaaaaattcctcatctacacatgcacttatttaagcaaagtattcattttatggaattttaatattctacctacaagaagtataccttagattcgttcattattcctaataaaaatctwaaataaattataaactgttaatagatatgaatacttrattttttgccatatccctgcctagtatctttcagaatataccacattaaaaatggcatcatcctcaaatgagtagggtgatagaaaaacacagcctgagggaattcacatatcattctctgttgcaagtttaaaaaggacaaattcccaagttgggggaaaaatgatcactaacaacaggaagggaactgtcatatggacaagtgggaatcagttatgtaagtaataggattatgaaaggtccagagctcaggtggagtgttattctattatgtcactagaagtttcactcaaaagatatttaatgattgagttccttgtactacttcaagtgacccataaagcagtttctcaattttccttaaaactggcagcatcagaggcttagataaaaagcaactgtctttaattygattgaagccagagaaaagtggtgatgacacggttggaagggatgagtttrctcaaacagagagttatttaaactctggatattcacagtaatttttacgtgtaggcctacaagagatytttacagtgtatcaggcagaatccatttcagaaatacatgaggtttattttctacaaacaataatgcagctaattttattcatgtagcattttatttacaacagcagtgtagcagaggctgctggaaccaaacaatatctgtgttctcccctgcttcctgggcacacatagcttctgttttattgttcggtgtggccatggactgagttctggccaattcaatgcaagacaaaagtgataggtgctgctttcataatggtccctaaaaacctctcgtgtttgaccttttattcttttcccatcttctgacggagtggtaaggattctgaaaaccaagargttagagacacaagatagaaagtgactgtattcctgaatcactgtgacacacaaccactctcaccattagctgttaatgagaaataaataatattgtgttggacccactgaagttttggagtttatctgttacagcatctaccatcatttacttatctttaacaagcagtttctcatgtgttcatcattttaccgtaaacattttctcacttaggagctgagagtgagaaaaaaatttgaaaatgccatcatatctattcacagacaaggaaatgtgaaacaataggtcatttgactggtttattctcacaggacaaggtgtaacacacatgtccttggaagtaaacgtctagctgtaaatgacacaattaggcaaaaaaaaaaaaaaaaataraaacagacatcgaattcagtcgaaccagaagatggctgtgttttaaagatgaaacacagctgaatgaactctactataagcatatctaactttattgcagaaagcaaacagagtggcatgcatagggctgaaatgaaaaaaacaaacacataattctgtttggggtagaaataagtagaaatgtgaaaacaggcaagtgagaaccacacacattctactggtcagtcctagttaaacattccaccaatatctgatggcagaaagactacagttagccctacccccaaattatgctgacacttgtacattatttgtaaatatttttaaatttatcctttgttgccttaaaaaagacctgagtcaagagaagcctcttgaagcatctggaccaagcagacccagtaacagtacttggcgtaagcctaagctagtttacataacataacagccattaaaaggtaacagatctatttaagctaaccttgccttacaatatggcacccaaccaggtgagacagttctttggctctatttaaggcaaatactctgcccataacctgagctgatgtggacatatcaactagagctggctgccattctataatagtaccagctgttgaatactgtgaatattttgcaaataactgctacccaaaacagatcataatccagtagatagcctacatattgacaatgaaatatttcagyaatgtttcctaaagtctcctggtccattgagaattgttactaaggaaaggaaaacaatcttattctgattgcttgagagaaagtcaatgtttggtagcctgttttaaaataaaactgactgatatatgtatacggctttgctaatcttrtgggtcatttcagatgtgacaattatggttaacaaacatctatgtaactcagcaaagtgcaacctggaaatgcactcaaaagaatcagcacttgtctaagtgtcagatttccactccctctgagatacaagctgatctgatttaacatgtttcccttaagcctctagggatgtagttactgtctactgggctgcaaactttaaaaggtaagcgctgactttggaaagtgatggaaagtgttttaagcgcatccaatagactcccccctccccccccccactagaaaggcacttgaaggaaaggaatattaaaggctaggacaagactacgtcaaggtgcaccttgttaagccaaaagaacgcaatccatatattgtatcttgtgccacraaagtccctttgccttgccccaatcttgttaatgtactattgctgggttcaagactgaaaatacagcttctgtgtctacttgcagtcctttatcaaactgatgagcataaatgtctctaggtaacttagatgagataattagttttattctctagtttgagacatatttttcaaagaaaacactatcagacctttaagcgtaaccttctctgggcctaaatactcttccttctcttagaactaaattggaattaagaagttccccctcccacttcaggattataactaatacccccacatctaaatttagtatcagtatttgttggtaagcatttttatgacagagattttgcaaaacaatttgaagttattttaacattgcctaacactgcagttaataatcatgttaacagtactgccaatctacttttacaaacaatatgaacagttcatctaaaatacgtagcatttctgggggtggaatagtgaggatgggagaaagtccttatcatttatcttctccagacttcaggagggaatggtagaggaatgattgctctgaatttctttgcttttgtacccaagtaatagcttttgcccttatgaggaggaatgtctatgtggcaagcatgatgaagattggttcatgtttgccagagaccatggctccagcaaggcacaagccattccttttcttggacctcccacactcatatgtgatccccaaaacttcccatttctacattatcagyagagcaaatatctcaataggtctctgcatcacctgttccaccttctcctacaactgagaagtgagaagatgccagccctgcagtggggtctgatggtcccagagagccaagaaccatctatcttggttcacttgattcaagagaacaaagatagatgtgggactgtgattcccacactgtcccatatctatcccctactgagtcaaatgtgtagaagtggagaaaaaagtaatgatacctcatacctccaacaagcagtggtagggtactattccatttttctggaacaaagtgatcctgagtttatttatggctaaaacttaaatggcctacagagaaatgtattccatgctgcttcaggctacatattagaatactgatctgagtctcacgaatgtttcccactggtcacaactaggccagcacacatatgaaaagacaatgtctactcaagagcacatgccacacttgggtgggtagatgtatatggcagtatcttggatcataaagtttgaattattgatttttattttttccaacaaatagtgagaygatccatccctgttataggtatgatgggaaatatagtaatgtatacaacatatgttaaaaaggcaatgagtgcattaaataaggacacaaaatgactatcatatgcataaataggtgtgtattatatacataatgtttatgaagtaccacagagcaagaaacaccataggttctaagagagatgtaatgatatcagggaagatggtaaggagaaaaatttcagtggatttttcatcgtgctaataataatattgacaattgctaatgtctactgagcaactactgtgttccaaacactaacctaagtatcataagtgtattatctcatttaatttttacagtcacgtgaagtaactacccttatggttctcctttaaagataaagaaactaaggtttagagaaataagcttatgtgttgaggtatgttcttttacaatcacctttcacaggtgaagaaaattgaatttttcaacaatttagtcacttgctgaagtcacatagctagtaaacagaaatatcaaaatttgaacccaatgtgtcttcctccaaagcccatgcacctaatggttataatagaattctctatcagcaacaactcttacaacagcctcttcagttttccatcttagttaagaattgggtcttctgccacccactcagcagaggccatatttttctttataattctttgaacctcagaaaaagagggtgaatactttttgtttcccattttcatttcaagactacttccctttyctccagcaaagcccctttctcctttgaagctcattttgccacatcccccaacctgtgcctctccactacgacctctcatttattaaagtgtctcttctctggtcatccttctcagtgatttcagcatcagtcctaacatcattcttcaatatatgactgcatttaatattttattgagaaawtagaagttatcatattataatatctcatctttgcaccatcaaatccacagcctccaaaattctacatctacttttttttagggcaatattccatggagagatgatcatgggttaaactaaagcaaagttatggaaatgaaaagaaatagttgtatttgtgatattctgaagggaaacatgatagacttgttgatgtgttgatgacaaatctgagagagagaaatcaaagaaaatacttaagattgttttatctgagcaacctggtcaatggtaatcccattgtttaagatgggcaagaagtagaaatgagaagtctactatgtgaagaaggaatcaaggatcctgtttggttgtgctaggtttgagatacctgtaagggatccaagtggacatttcaagtacgtgattgattayataactctggagaaatcagggaagaggttgggactgaagatataaatttagtagtcattagcatatagatggtatttaaagctgttatatttggacacaattacstaggcaaagaaaaagagagagaaaatgttgagccagtacagcatttactgactataaagaagaatccatcaaataatcagaggaggtacctgagacagaaggaaacccaggagaatataagsatctctgaaataaaatgtttacagaacaaaggaaagattgatgattttaaatgcttcagagaggtttagttccattcagactatagtctgatcattggactacctttgtctttttccarttagataaccagagcctagcatagtgcctggcccatcataagtacacaatcaatatttgttcaataacttctatgatgactgccttgatttataaattcattcyggcaagtaaaaaatatttaatgatattacacgtgggcattctaacaagagaaaaaaagatcgaattataaaactaaagagaagaggcacatgtaagaaagaaagactcattcagttttgtggaaaagsgatacttgaaaataaatctagaaccatgttttagagtccttttgtaaagagccttgaatatcttggaatgttgatcatcccaaagagayttaatcagaaaattaaatgcccggggtactatacagaactaagtaacaagaagaattacagaaaatgtatgttgtttctttctaccttgataacattattgcagatcctacagtctcaaggtacaggtagttgcccaatttgaatgttctggagaatgagtggggtggctcagccatagtcctgtgccttgccctcctgggaactaattccaggttcccatggacaagaaatacattaatagctgaaggctgtatcataacagatctcaggaaaaggggtaaaaagctataataaaatatttggccaatatatcagtaaagatcagcctgtagatgttttacagatttgaaggatgtgaaatggccaatctgcagtccctaagtcatgtagtaaaactttgtttacaytagcctttcttcaaatggcaaactataggcaaaagtatgtttcttccaggtggctggcaggccttcttttatttcttaacgtgtgtttagtaacttgtcatgtcccccatgttgtcttgaccgtccagcatgttcagtgcctcccagctctaaacctagctcatattataattgcagaataactgaatgagtctaaaaagggtcaataaagaagattttcaaacagacattatgcaaaaaggaagctagacttagcctaattattgcctctcaaattaggccaaaggattttatcatttctggtataactatatttagtgtctataggactttcagcatctataggcattaaacataaaatagaataaattttctgtatgcaacagacaatgtctttgaacttaaatagcaggtccactgatgattttccaaaacattaaaatatgtaatacataaaaatttgcttcacaattttaatttgtctttgatttttcagaataatggtgtagattctgcagtaattaatacaccaagctacaagagcaggttgatttgcattaaatcaactggtcaattctcattttgcatctatgtatttactgagcatccattatgcacaaggttttgtgtggtaaaggctgaaatataaacagctaagtttaacaagacataatacattgaatactacaagcaaaattcagaggacaaacaatttattctgactcagaagatcaaggaaaaatgggatttgagctggactgtgagggatgaataggatttcagttggaagaagagaggatagaattaagcactccagtataataaatgatcccaaggagagggaaagggcccatgaaatcatccatctggcctggtctgttgggagaatgattagttaactctcaggtgtgactggcaaggtaatggggaaagatgatatcataagagatgaggttcaaactattcatatgggactacatgtcacagggccttgagtgccttgctaataagtttagacttcattcaaaagaaaatagattaagagaaaaaaaattgtatgtttttccattattctgtagcccactccttcagtctatgtccatttaagcatgacattaaggytctgcatactcttgacaaactaattcttaccattgtatgttaaaaatttgtatccctgtgttaagagcactttgtgataactccttaaacttaattaaaagggatttttgtcatccatgttcacatcaatcttgtctttacgcttatgatttatggtcaaatcatctaatagttctaaagaaattcgaaagtcaaatttcttatatagtaacatcacctggtcsagttatttcaatatgacccttaagagaagcttaaacactaccaaagatatacctccccgctccatcagtctctataggtgggaaattttaactggctctaattataatgagcatagtccacacttgctgcaaagattcttctgattgattgagtccgaccctaagccacctctaatctacctgttttctgactttataaatcaatcctatgtggggtacastctcaaatcctttcttaaactgttatgaaattgctctataaccagaggagcactcttagaaatatgcttacaatcctcccgtttttcaatatgaatgtgtttttacagatggacctggccctaattgagccaaaccatcccctgatatcagacagtcttgcccctcatcattctttccaatattttgtctaaataaaggcacctaagggcagacttttagattggcaccttcctgaattcttcctcattacattaaccatgtttcaaaactatgtctagagtgctgtaagtacttttgccaaaggcttcctattccacttgcttcttcaaactccccaaatttcatcttctccgattcacagcccagtagtttataaagtttattatccttggtgataccttactataataacttacctttctattctccctctccctctccctttctctcatattgcctgtgagcctctgaaaaacaactttgtacatgtgagatgtctatttgacttatttaattcaggattgtttacatctttagcatgatctgtcacattactctttctgtctatatcaaacctctggccttctgcttctggctttctgtgttttccttgtacacagtttatccagcaactcatcaaacagaaacttccaggaagcagcttgtctgcacatgcactcaatgcaaacatactcataatgaatggtttcagagcactacaggattctggagagccttaaaataaagatttcacctatgttcctggagtttctacagtgacctgaattttactgtagtgattttctttgaaaggcagtcaacgttaaagttggtttgaagatatcttgagagaaggggagatacttgattcaacttccctgtcccacgcccaatcatggtgcactggtcagggagtgagaaaccccaaagttggtgggccacatgaatataccaagtggcaagatgggcctgaagctcctayagggttaacattcaccccaaaaatatccccaagcctaaagaagcaacattaaatagcaactacaaaactccacgacaggagaagagagagatcatgggaaaatttcaaagctttgtatttcagtatctttaatttgcaagtttttcctgcttttcgaactaggagcccatgcttgcatttttctctgggttctgcaagttacatagccagtttgccagtggatttctattacttgcaaccaaaggaatcctaactaatgcatatgctttacacatagctctgtattttgggtaattcttttcaagcctctttcacrcgagataataccattttgtaaatgttccgttgggttggaagaatttgttaaaatctttccccaacactaaatggtgaaatccctggggacttgtcttatttatttttgctcttttggtgcccagacacagaattcacactcactgtatgttttataaataaatgttaatattatcagtcattaagacaagaatgctttcaaagatcaccacatcctatccagagctaatgacagataagagagaagacatagtctatcagctgcatattgacaactgcctagtgaaagctcactttctgttttggcattaatgcaggactgggaaagcagataaacactctgctgctgataagcctaaccttcatgtcaggtaatgcaaatctgacttgaaactgtttgcaagcattttgtccatttaaactcaaatgccaaactattaagcaaaacatattgtatagtttcagaatgactttagtctatttattaaatatgtgagcaatttttaaaaaaattctaggttatcattgtatgctctcttccctttctattttctctttagtttctagttagaatacaatgtgtgagggagagagttaaatgataaacagccaagagaggaggaggaaataaaaagagaaggaaaaggaggaggacaaagaaaaggaggaaagggagggaaaaaactaaaagcagttccactagttgagttaaatcagattcaactacgtcttacttaaaatttacttgtgaaatagaataatggcatcaacttctcaagattatggtgggaactaaatgagataacatatatatgaatacacacatcaaggtgtcttgcacatacttaatgagagtttttgtagctgaacaagtattttccatccaaaagaagaaaagacgccttacatgggcatcgaccaccacggaaacccatctgagagaattcacaccaattagtattgtttcagaaactgatgtcttatgtaatgcttataaaaaggcatgttaactrtttacttctaaccagatttagtcaagtctatgaacaataccatgtctgcctagaaaagcttttctatatttaacacttaaaaagacttagttctgctgagagcagtgcctcatgcctggaatcccagccgtttgggaggctgaagcaggcaaatcacttgaggtcaggagttggaaaccagcctggccaaygtggtgaaaccccatctctattaaaaatacaaaaattagctgggcatggtggggcacatctgcaaccccagcttctcagtagctgaggcaggataatcgcttgaagccgggaggcagaggttacaatgagctgagatcaagccactgcactccagtctgggtgacagagcaagaccctgtctcaaaaaaataaaaagtgaaaataaaaaagacttagttcaagttgtctggttattcttgtccaactcccactgtaaatgtttcagttacaaggtggcaaagttaactataaaatatatgccctgaaattgagacacaaatttggttatttcaggcagaaggccataaactgccaacctcctcctcctctttcttcttctttattataaggctaatactagtctttagtttgtatagcattttacagtttaaaacaccaaatataaattccgttagtgattctatgcaataatactgttagataaatagggaaagtaatackaatcaatttttttttttttttttgagatggagtgttgctctgtcccccaggctggagtgcagtagcatgatctcggctcactgcaacctctgcctcccaggttcgagcaattcgcctgcctcagcctcccgagtagctgggattacaggtggacaccaccacgcccagctaatttatatatatatatatttttttttttttttatttttttttagtagagatggagttttgtcatgttggccaggctggtctagaactcctgaccctcaggtgatccacccgccgcagcctcccaaagtgctgggatcaggtgtgatccactgcgcctggccttaaccaaattttaatatgtaaaaatatagaagttacaattcaccagtaatgaaagccagtgtaaagaaccagtagtgaaagaaggtgtgaagagtacaagctctttatccaattgttcaactataccacattgctttcccatgcagcatttataaaacacaagacttttccttactgaggtcaacacaattgattatgacaatcactttaagaaaattattttccctaattcataactttcaagggaagatatgtttcccctcacagtctgcggacatcaggaacattatttaaactcatattttttcacagctggacttacaaaattctacgaaggtgaaaccaccacttatcacaatggcaagagaggactcggcaaatacaaactcactggacaagggcaattaatattattttatgaggtaacataattctgaaaaaaagtgcattaaaatccctatgttgctcctcagatttatagcactagcatgcaggtaccagcagtgggcttgataatccctggaattacattaacgtttttgtttccttgttttgctttggaaatttccttagccttttaaaaaagctgagcactagtttatttgcttcagggtactttagaaaaaatacgcacaaatattcacatataaaagaccactggaagaagtgcaaataacatggagttcatagcaataagtgaattttcttttttcacacacacatgggcaataaggtgactagtttgcatgtttccagtctttatgtatttacataaatatgtatatagatatttataaatattaacttagatatttgatgatactrtattgttctgaacttgaatttattttattttttctcaaaaatatgtagggtatctttcaatgtgatgtgtacatgtatgtatgtgtttgtgtgtgcgtgcgtgtacatacaaatgtttagagttttaaaccatagcattctgctctataaaattcatatgccaagataaatttaatcattccaagactgatggatattttggttgtttccagttttcagtgaatataaacagtgctgcaaaaaaaattctatgcacatttccccctcttcatgaacctgtgcttttttagaataaatttcaagaggtaaaattgatggaatcagtagaatacgtactttgaatgttgataaattttgtcaaattgctgttaaaaaaaaaatgagttttaccaatttacactcatagtcatgtattaggctttctgcttacctcaccttaaccaacacagaataaaattgatcttttaaaattcttccccaatccaatccataaatatagtgacttagtcgttgtaaattatttttcactcattaccagcatttcatccctgcagaggaatactgacaatgtgtttactatgtatctttgggcaagttatttaacctctctgtgtctcaatcttatcacttctaaaataaggataataatacctacctcataggatgtcttttgttttcttgttcatgttgcctattttttcgttatgattgtgcctttcctctttggtgatttggtgaattaacacatagtgaacaagcacctaccgtgtgcaagtcacactctaaatgccagggacaatggggggagaagatcaagtgttcactgtcatggagcttacattctagtggggaggcagataatatctaaacaccagggacagtggggggacaagaccaagtgttcactgtcatggagcttacatcctagtggggaggcagataacacagagataagcaaacacataaacctgtgatgttctgtcaggttgtttgtgaagaaaaaaatcaagcctggtgtgggctaagaagtactaagcgtactattttagatagggtggtcaaagaacatttctgtgatgaggagacatttgagtagagacatgaaagaaatgagcattgtggctgaggcaacaacaatgctgaaggaataacagggacccagtaggctgaggtaaagggattcagggtgagaggaaagagaggtgtcagctgtgaggagccagggaccagatgctgaatgccctcataagccagaaggaggaattttatttttattctaaatgctaagggaagccagggcgctggcctctgaattgataaactgctcccagacrctgagcaaggctaaaactgtaagtttcctacccaagcagatacctcaagtgtggacagaaacagtgtccacttgcccttggggaaaatctcacaggaaagaaaagccaatatccgcaatccaagcttccctcacaaactcatgccaacaggcaaagctgaacagagccatcaagttatgtaactgtgtccctgacccatacctatrcctttttctttcaactccaaagctaaacctgaagcatttttctttttccctgacgcacagtacccttgccagttgataaaccaggagcaggaaccctggctgtgttccaccaagagttaccaagaaggtccgacgcacaagtgccaagagcccaggcagaatggctgctcacaactcaacactaaggcggcaagcctacctctgcagatggtcccgttccccacgtagcccggtttgcaggtgcagctgtgtccctggacagtgttggtgcagatggcattctcatcacagttgtgctggccgctgccacattcatcgtgttctgtttccagggtgagagaaaaagagaaatactttttcttaagttggaattactggtattgggaaatgtagctggaattcaccaaataagaatgacagtgactaccacttgtcagtaccttactatgcgcctaaaagttcctgttgaaatctaaactctgaaagaaagatgttattatccctactttgcaggtaaagaaacagtatcagagaagtcaaacaactcctgtccgtcacacaattggtaagtgctgcactaaggccgttgtttcttccaccttctaaaaaggttttcacagagattccaaggtaatggttcttagtagggggaattttgcactgcctcatcctgcaaacatttgatatgtcagagggtgtttttggttgccatgattgggaacaggaagtgatactgaaatctagggaataaaggccaggaatgctgctaagcattgtacaatgtgcagaagagctcaaaacaacaaagaactagccagcctaaaatgtccacaatgctgaaaaacatctacaattggaaaccttcccctcaggttacaaaaaagaggagaggaaaggaggggagggcaggggaggggagggaggggagggaaggagaggggaggggaggggagggaggggaggggtgggaggggagggaagcagaggggaggggaggggagaggggaaaagaaacaaacctatatgagagattgcatggcttctttagaacaaagaggataaaactgcagagaaaggctggtgaatatagcctagcaaaggagaatttcccaaaaaaatttttgaaggagtaccactggtcacagggaaggctggcgagcacaggattgtgctgagagtaggaaaaggatttactctgaggcctctgtttaagggccttcagcagtttaattttccatatagcccactttcatagggttcagaatctaacctctgcgtatctgcctgccatgtagtgatatgggttatatatattcagatagctgtggcatccttgacccacaggacatggagggaaaccgatctaaccctagaaaacagatgaaaagattccaagttagaaactaaggtttcatagataactataatttcctctcacactcagcaagttaacggagttacccaaatgactcctctataactaaacaatatggcaaagtttatatcctttattcctttttaacatctgctagcataacttctcacaaattttaagaagaaaaatccagtagggccattcaaatcataaatagttataaaacaagaatagaaattccagttagaaacctcaaggaaataacactaattggaacaaaacaaaaaattcaatatagtttgttaagtgaattattcaaccaatgtaccaatcatttgaaaaaccatcaatcttcatttatttttattttaaatttcctaatggggacccagtaatgagaaaggttaaatcctacaaaataggactgttttcatcacacacacacaacagaggtagggcacacacatgcatctgattgttgatttaatagttgaattttccaaataaaatttttatttaggccttaagaccaacccaaactgtcagcaagaratgtgcacaggttagcaaacggtgagaaaagaagataagatttctgaggacacacttcaagtctgtgcttaagtcatctccggcacactccagaaacagtatacccttgtgcatgtccactygaatttacaaacctatcaagtacctagtatttgcaggtgcaatagcagacaaggttagaaacataaaaaagtctaaggattcagacttatactccaagagttttcagcctccttctttaaattcatttaataaataattattatgttctgtactgggaatacaaagatgagtagataatggtctttgctagcctgaacgttttaataggggtaactaaccggaacacagaagataagtgataagagttataagtagttgaccttttattttatcatacaaaaggaacatattttagaatgaaagggtgctctactaataattacactgggataacaagcataactcagaatgacccaggcaaactagcatgtgtggtcatgctagataagaggaataaagataagctagactgagagttcattggagggaagaaattccttctaatggagagaagagaaaagtcctcttgcaaaaggtaatattttaaataatctttcacaaatgatcaaggtttctcaattagagttgctcacgcagacttaagtatggagaaaggtatggttctgtgcagcattccaaaagcctggtctatccttccctaccaggtcttatcttccaatattcttgaagtaaatctttttctctaatgaggtggcatctttgctgtcctacaaatgtacgagtttgtttctacctctctagtttttcatgttgtttcgttgacccacaatactctctcacaatgtagttggtttatctgcctttgcctggcttcagacaccacttcaaacccatactcttaccatgttcatgaaggcttacacactttttctctagaccatgaatttcatctatcttagaacttttataaaatttaatatctttacctctttggaggcaatgatatcataatatattgtgatgatatttgcaaattttgtcattaatgccataattgactttgaggagaggaattgtagcatattttccacaaccttcactttatctattaatatcttccataatgttattgaacctagagaatgccaagcactgaagtcaatattttaggcatattataccatttaattctcccagcaattaaatgaagtaagtttgctcattttacaatgaagaaacttagacaacagtactttatataactttcctaagatcatagaactggtaagtagagaaactcagattgtgaatgtagacattagatgaacaaacatgtcactrctgagcagttgcaagttaatttggatgtggctgaaactaaaccatgaaatgtggaaatgatatcataatgccaacaacgaactgtcttcctgtatttttgcccccaattcctactgggatctcctacatacttactgagaatagatgacctattcccaaagaacaaaggccatagaacttccacatttcattttctttagtcatgcccaagttttcaaaatgaccagcaccttcaaaactgtgtttaatagagacagccaaagaaaataccattttcttctataaatatcacattcctttccagttgccaaggatgctgcaaaagatatgacaagtgattgcraaagacggactggcatagaggttaagagtatgaactccaaagtcaccggcctagtttagaagatcctggtttgccaattgcaaggtatgtctacttaagtaagttacccaacctctctgtcttagattcctcattgtaaaatgtggacaatgatagaacctatcacttgggattgttttgagaattaaattaattaatataggtagaaaatttatgacagcatgttacagctggtaagtgctccacaagtgttaggtatttgattgtcattgctgctgctgctactattactactactactactaattctactaatattgctgcgacaattacttgtgggcagacttaatcataggatggtggttacaactgaawtgagacagatgttatcaagatgattaaatagaggtgtccagcactcacctccctgacaaaggaccacaacaaccagtagataaccacaaatcaaacagagtatttaaggaagaatactgggattcagtagagaagttatgaagaccttttagggtacagaaacttaaaaaggcattacagagagaaaagcaaagcacccggtatcaatttgtttyaagccaagaggaactcccattgtgggaaaaaagaaagtgggagattgccagcagccatattctcaccatggacaccaacaattctaggtacagaagagcctcacagcccttacaggccctgatcccagcatagggagcatttggagtccaagcaacttcatatttcctgagagggaaaacacactgagtcctttgcactcccctggatccaggatgctgaagcacaataccattttaagagcagagctgccaccagaatgtatccaytcataggatccagtagtccctgcatgtccatattcctggggtcctgctgccatcccaccacatacacccagaaggttgcagcatcgtgacatgagatggacacagaaatgataccattaccatagcatctgagcctgtgtagcaccctatatcccatgggacaggcaattcagcacagcaaagaggcttaccccaggacagagggagccaacacacaaaagcaaatgaagtctatgaaatgactgaaaatgaattcaaaataatgatcttaaggagattcagcaagaaacaagagaacacagacatttcaacaaaatcagaaaaacagtgcctgatctgaatgagaaattcaacaaagagatagatattgcaaaataaaaccttgcttcaaaagaaatcttgaaagagaacaattcaatgaatgaaataaaactttaattgagaatgtcaataataggctagttcaagcagaataatttctaaacttgaagacagctcttttgaagaaactcagtcagacaaaaataagaagacattttaaaagaataaattaagcctaaaaggacatatgggccaccattaagtaaacaaataygtgaattttggaagttctaagaagaaaagatgggaaatggcatagaaaacctatttttaaaaaatagccataggctgggcatggtggcacatacctataatcccagcactttggraggctgagacaggaggatagcttggagtttgagaccagagtgaggaagatggtgatgtgccatatctaccaaaaaaaaaaaaaatctgggtatggtggcatacaactgtggtcataacttcacaggaggatcacttgagcccaggaggtcaaggytgcagggaaccatgttcatgccactgcactccagcttgggcgatagacagagaccttgcctcaaaaaataataataataaaataaaaatattagctaaaaacttcccaatacttaggagagatatgaccatccagatttagaaagctaaaagcccccaaataaatgtaacccaagaaggtccttgccaaggcacattatagtcaaactttcaaaaggcaaagataaagacggaatgctaaaaactgagaggaaaacatcaaatcacatataaggatatgccatcagactaacagcagattttccagcagaaacctgcaggccaggaaagaatggtatgatacatttaaagtgatgaaagaaaaaacaaatgccaccaaagaaacctatacacagaaaaactaaccttcagaaatgatggagaaacaaagtctatctcagacaagcaaaaactgaagaaattcatcaccagtagacctgatctacgagaaaagcttaacaaagtcctacatcaggaagtgtagggcaatatatattttttgagtcatatactttcatgaaagtagtactcatgtataactcactggtagagcagataaacaaatacaaagagaatgggatcacacattactattacagaaaaccaccaaaccacaaaaataaacaataagagaagaagaaaggagcaaagggtataaaaaacaaccagaaaacaattaacaaaataagaggagtaagtactcatctatcaatataaacctcaaatattaatggttttgatttcccagttaaaatatatggaygggctgaatggattttttgtaagacccaactacctgaagttcataagaarctaatattgcctgtaaaaacacacaccatctaaaagtaaagggataaaaaatatattccacacaaatagatatcaaaagtgagcagaagtagctatgtttatatcagaagaaatagatattaagtaaaaaaaagaaaaaagaaagacaaagaatctcattatataatgataagggaatcaattcagcaagtatatataacaattgtaaatacacatgcatccagcactggaggacccaaattcataaagcaaatgttactacatctgaagagagaaagagaaagagagagagagagagaagagattccaatacartaatgatagggggcttgaacaacccactctcagcattagatagatcatctagacagaacatcaacaaaaaaagattggatttgaactggactttaggccaaatagacataaaagacatttccagaacaatatatccaacgacaaagcatacattcttctcatcagcacatagaacattctctaggatagaacatatgttagatcacaagagtctaaacaaatttccaaaaattaaaatcatatcaagtttcttcacagaccacaatggaacaaaactagaaatcaataccaagaggaactttgaaaattatataaaaacatggaatataaacawgtttcaggaacccagtggttcctgaatgaccactgggtcaatgaagaaattaagatggaaatcataaaaattcttgaaacaaaggaaaacagaaacacaatataccaaaacctctggggcaaagtaaaaccagtattaaaaggcaagtttatagcaataaaagctgacataaaaataatagaaagatttcaaataagcaatctaatgatgcacctcaagtgatttcaaaagcaagagccaaccaaacccaaaattagtagaaggaaagaaataataaagatcagagcagaactaaactgaatggagacttaaacaatacaaaagatcagccaggtgtggtggctcacgcctgtaatcccagcactttgggaggccgaggcaggcagatcatgaggtcaggagatcgagaccatcctggctaacatggtgaaaccccgtctctactaaaaaaaaaaaatacaaaaaaatacaaaaaattagccaggtgtggtggcaggtgcctgtagtcccagctactcgggaggctgaggcaggagaatggtgtgaacctgggaggcagagcttgcagtgagccaagatcgcaccactgccatccagcctcggcgacagagcaagactctctcaaaaaacaaacaaaaacaaaacaaacaaacaaaatacaaaagatcaaagaaacaaaaagcttgttttttgaaaagataaacaaaatcaacaaacctttcgctagactaaggaaaaataagaaaagacctaggtaaataaaatcaagaaactgaaaatgagagacattacaactaatactacagaaatataaagaatcattcaactaggccggatacagtggttgatgtctgtaatcccagcactttgggagttctgaggcaggcagattgcttgagcccaggagttagagaccagcctgagaaacatggtgaaataccacctctataaaaactacaaaaattatccaggtatggtggcccacaccagcagttccaactactcgggaggctgaggtgggaggatttcttgagcctgggaggtcaaggctgcagtgagccctgatcatgccacttcactccaccctgggcaacagagtgagaccttgcctgaacaacaacaaaaaaatcattagacactattatgatagctatatgccaacaaactggaaaacctagagcaaatagatgaatttctggacacaggtaacctatcaattttaaagcagaaagaaataggaaaactggacagaccaataacaagtaaagagattgaaacagtaacaaaaaaatctcccagcaaagaaaaccctgggaatggatgccttcactgatgaattctatcaaacttttagaaaataattaactaccaattcttctaaattattacaaaaactgaagaggtggtaattcttcctaacttattgtacaagtccagtattaccctgatactaaaatcagacaaaaacattacaaagaaagcaaattaaaggccaatatccctgattaatacagatgcaaaaatcctcgaccaaatactagcaaactgaatacaacagtacaacacaaagattatacaccatgatcaagtagtaattaccttggagatgcaaggatgcttcaacatactcaaatcaataaatgtgagacataaatcacaacattgtccaatcaacagaatggacaaaaaccatattatcatctcaatagatgcagagaaagcatttggtaaaattcaacatcacttcatgataaaaactctcaatgaattaggcatagaatcagcatacccagacacaataaagaccatataggcaagcccatagctgacatcatactgaatcagaaaaagccaaaatatattttccctaagaactagaacaagacaaagataacaacttttagcactgctagtcaacatagtactcaaagttctggccagagcaattagacaagggaaataaataaagggaatccacataggaaaaaaggaagtcaaattgccctctttgcagacgatataatattatatattgaaaaacccaaaagctccaccaaaaagaaatctcagaactaataaacaaattcagtaaagttgcaggatacaaaattaacacataaaaatgggtacatttctatacatcagcaacaaactagctgaaaaagaaatcaagaatgcaaatgcatttacaatagctacaaaaaaaacacctaggaataaatttaaccaaggaggtgagagatctctataataaagactacaaaacattgataaaagaaactaaagaggacacacaaaaatgtaaaactattccatgttcatgaattgaaagaattaatattgttaaacaaaccatactcttcaaagtgatctacagattcaatgcaatagctattaatgacatgttgatatcaatatcaatgaaattcttcacagaaatagaaaaaaagcctaaaacttgaggaaccataaaagatcccaaatagccaaaaagcagaactgagcaaaaatgataaagctgaagacatcacactacctgacttcaaaatatactacaaagctatggtaaccaaaacagcatgatactggcataaaaacagatacccaggccgattgaacakaatagagaacccaataataaattcatgtatttacagctgatatggcttggatttgtgtccctgcccaaacctcatgtcgaattgtaaacctcagtgttggaggcagaacctggtgggaggtgactcaatcatggggacagatttcccaattgctgttctcatgatagtgagttctcatgacatctggttgtttaaaagtgtgtagcacctcctctttgctctcttcctcctgttcctgtcttgcaagttgtgcctccatctcttcaccttccactatgaccataagtttcctaaggtttctgaagccatgcttcctgtacagcctgcagaactgagagtcaatgaaacctcttttctttataaattaccagtctcaggtagttcttaatagcaatgtgagagcagactaataaaacagccaactgatttttgacaaaagtgccagcaacttacattggagaaaggacaacctcttccttaaatgatgctgggaaaactggatattcataatgcagaaaaatgaaattagacccctatttctcactatatacaaaaatcaactcaaagtagattaaatatttaaatgtgagacctaaattaataaaactactagaagaaaacatagggaaaatgctttaggacattgatatgggcagagattttagggtaagacttcraaagtacaggcaacaaaactaaaaataggtgagtggaattatattaaactaaagtgcttctgcacagggaaagaaacaacagagtawagagacaacctacgaaatggggcaataggttttcaagctatcatgtgacragggattaatatccagaatatacaaggaactcaaataatttaacagcacaaaagcaaataacccaaaataaaaattggcaaataatctgaacactcactttttaaaagcaggcagcaatatggacaacaaagatatttttaaaatgctcaacatcattaatcatcaaggaaatgaaaatcaaaagtacagtgagatattatctcaccccagttaaaatggcctatatcgaaaagataggcactaacagatgccagtgcggacggagagaaaagagaactcatacaatgttggtggaatataaattagtacaacccttatcaaaaacagtatgggtgtttcttaaactaaaaatagaaccactgtgtgatccagcaatctcactactgtgtttatctaaaggaataaaaatctatatattgaagagatatttgcacccccatatttactgcagcattattcacaatagccaacatacggaatcaacctaagtgtccatmaatacaagaatggattcaaaatgtgtcatgtatacacaatggaatactacaaagtaataaaaagaataaaatcctgccattagtggcaacatcgatgagctttgaagacattatgttacataaaataagtcatgcacagaaagatgaataccatgtattctcactcatacttgggactttaaaaatttgagttcacaaaagtatagtgtagacttgtggttatgagaagctggaaaagatagtagatagaggaggatacagagaggttgattaggagacagaaaattatagctaaagaataagttgtagtgttctataacactgtagggtaattatggttacccctggggtaacttattgcatatttttaaatactggaaaatagaattttgaattttcctaacacaaagaaatgataaatatttgaggtgatgggtaagctaattactctgatttgatcattactcattgtattcatgtatttaaatgtcattctgtatcttataaatatgtacacttactacatgtcaatttttaaaaaaatttaaaaattgatcgagaaatctttctctttcttttacagctaatagttcaggcagaatggttgtgaacagataggcatttgaagcaaattaaattagaatgcctctttgcaggtccaaagaaatatttgcttagaatcaattatagtccccaggaaataagactatggattagaaaggtgaaaaatacacatttaggatggatgtataacctaagtttggctatagtatatttgaaatatccaacttatcaggacaaaaaatgatgattgtcacaccaagctatttcttcactgattataataataatgatcataacaatactttaactaatattcaagcactaattaaacagtcattatcacatagttcctttcttcttccttctcatttcctgtccatggaaagtctcaggaaggctctaataaatccaaccctgtaacagtgactctggcgtcagtagccatgatcaattgacacattgctgtccttagtaaaccaatcaggacccaaacgactacctgacaaacatttctactgtggctacaaatgccccacgtttgggggtctgctggcttgtggctttattttgttcaaagtaaccttttacrtatcttwaaaaattgtaacaatgactggactaggacatgacaagcagattttatctatcagtaacattttatagatgaagaaattaggagttgaagcatgtaaggcacttttcctataagcacataaatatcaataataggttgtacttctgaaactcaaactaccctctcctcattccatctcctacagtctttctaaaagtccactttactatgtcatccaaaagaattgctacaatgttggccacagtgtaggtaattttttacttaaaaaaattacagattcacaggaagttgcaaaagaagaaagaagactcctatgtacccttcacccagcttcmcccaatgtacctttcactcagcttcccacaatgtacctttcccctagcttcccccaatgtaccctttgcctacctttccccaatgtattatctcgttctcacactgctgataaagacatatctcagactgcataattgataaagtaaagtagttttattgactcacagttaaacgtggctcaggaggcctcaggaaacttacagtcatggagaaggggaagcaaacatgtccttctttatatggtggttgtaagaagtacagggtgaaggaggggggaatagccccttatgaaaccatcagatctcgtgggaactcactcactatcacaagagcagcatggaggtaactaccytcatgactaaattacttcccactgggtccctcctacaacacataggcattatggraactacaattcagggtgagatttgggtgggaaaacagccaaaccatawcattctgctcctgacttctcccaaatctcatgccttctcatttcaaaatacaatcatgccttgccaacagtcccccaaagtcctaactcattctagcactaacccaaaacccaaagtccaaggtatcatctgagacaaggcaagtcccttctgcctataagcctgcaaaatcaaaagcaagttatttatttcttagatacaatgggggtacaggcattgggcaaatatacgtgctccaaatgaaagaaattggccaaaacaaaggggccacagtttccatgcaagtccaaaatccaatagggcagtcattaaaacctttaagttccaaaatgatgtcccttgactccatgtctcacatccagggcatgctgatgcaagaggtgggctgccatggtgttgagcagctccagccctgtggctttgcaaggtacagcaccctctcccagctgctttcatgagctggttttgggtgtctgcaacttttccaggcacacagtgcaagctgtcagtggatctaccattctgggatctgaaggatggtggcccacttctcatagctccactaagcagtaccccagtgaggactccgtgtgggggctccaaccccacatttcccttctgcacttccctagcagagattctccatgaggcctctgcctctgcagcagacttctgcctggacaaccaagcatttccatatatcctctgaaatctaggtggasgttcccaaacctcaattcttgacttctgtgcacctacaggcttaacactacatggaagctgtcaaakttaggggcttgcaccctcagaagtaatgggaaaagctgtaccctggcctcttttagccatagttggagcatcaggaacaaagtcctgaggctgtacacagaggggaggccctggacctggcccaggaaaccatttttccctcctaggcctctggctctgtgataggaggggttgcaatgaaagtctctgacatgccctggagacatttttcccattgccttggtgattaacactcagccccttattacttatgcaaatttctgcagtgggcttgaatttctccccagaaagtcagttttcttttctattacattgtcaggctgcaaattatccaaactttcatgctctgctttctcttgaatgctttgctacttagaaattccttccacaaatcaccctaaatcatctctctcaagttcaaagttccaaagatctctagggcagaggcaaaatgctgccagtctctttgctgaagcattacaagaatcacctttactccagctgccaaccagttcctaatttccatctgagaccacctcaacctggacttcattttctatatcactatcagcatttggtcaaagtcattcaacaagtctctaggaagttccaaactttcccatagtttccaatcttcttctaagccctctaaactgttccaatctctgcctgttacccagttccaaagtcacttccacatttttgggtatccttataccagcacctcactctctacaccaatttactggattagttcagtctcacactgctaataaagaactagctgggactaggtaatttataaaggaaagaagtttaatttactcacagttcagtatggctgagaaggcctcaggaaacttataatcatggcagaagaagaagcaaacatgtccttctttacatggtggccacaaggagaagtgagagaaaagggtggggaaatagccctttataaaaccatcagatctcatgagaatgcactcactatcatgagaacagcatagagataaccaccctcatgattcaattaccttacactgggtccctcccacgacatgtggagattatgggaatgacaattcaagatgagatttgggtggggacacagccaaaccatatcagcatcctatatacctatagtacaatatcaaaatcagaagattgacattagcatgttactgttaactagtctacaaatataatttagtttataccattttaatttatattcatttatgcatgtatgtattatgtatgtgtatagttctatgcaatattatctcatgtaaaattcacaaaaccaccaacacaatctctttttatttgcacccactcaacmtttcccacccacccgccctaatactgtcaaccactaacctgttctccatatctatagtttctcatttaaagaatgtacaagtattttgtgaacatacatttttacatttctaggataaatatccgaaagtgtgattgcagggtcatctggtaagaacatgtttagtttccaagaaaactaccaaatgattttctagaatggctgtaattttacattctcatcagcaatgtctgaatgatcgtttctccataccctaactgacacctgatgttgtcactattttttgttttagctattctgatgggtgtatagaaataatgcattatgtttttaatttatattgtgctaactgccaatggtgttgagtatatcttcactcgccatctgtatctacactttaataaaatatttgttcatgtcttttgcccattttataactggattgattttttactgttaagttttgagaattcttcatatttacatataggttgagcattttaaatctggaaatcgaaaatctgaattgctccaaaattcaaaacattttgagtgctgacacgattgtcaaagtatgctccctggagcatttcggatttcaaatttttggatttaggatgttcaacagataaggataatgaaaatattccaaattctgaaaaagtctgaaatctgaaactcttctggtccagaaatttcagataaaagatactcaccctgtataaggcctttattggatatgggatttgccaatattttctcacagcctgcagtttgtattttcattctatcacagtctttcacaatgcaaaagttttaattttcatgacaatgaattaatcatttcttagtttatatatagtgcttttaatgtaatgtccaagaactcttctctaaccttaggttccaaagatattctcctaatttttccaatagttttatatttttacatttaaacccatgatacatttgagttaatttttgataaggtataaggtttaggttgggattaatttttttgcctatgcacacccagtgactccagtgccatgtgttcaaaaggctgtttctccattgaattgtgttaataactttgtcaaaaccaatttgttatatttgtatttgtctgtttctgkggtctctattctgttctattsatctttgtgtctattcccctgccaatactacgctgtcttgaatatagtatctataaagaaatccttaatattcaattcaaaattattcaattcaaatttcaattcaaaattcaattcaattgattcaattgattcaattcaattcaattcaattcaattgattcagtygattcaattcaattgattcaattgattacagtatctataaaaaaatccttaatattcaattcaaaattattcaattcaaaattattttagctattctagttcttttgcacttctacccaaatttcagattaagcttgttggaatttttttaggaattatgttaaactttacagatcaacttatggagaattgacatctttactatattgagtcatctaatccatggatacagtatgcctctccatttacttatataatattttattccttccattagtgtttttttaaatgttaagcatacagatcctataaatgttttgttagacttttaactagatatttcattttcttaggcatttcattttactttggagcaattatataygatagtaggtgcttaattctagtttctacacatcagttactagtatataggaataaaattaattttctgtattgatcttgtaacttgagactttgatgaactcatttattagttctacaacatttttataatttcttgacattttctacatagaaaattatgccttctgtaaatagatacagcttgatttgttcttttccaatctgcaagcttatttctttttgctgccttattgttttggctaaaacttccagtgctatgttgcccaagagtggtaagtgcagacatcactgctttgttgccaaatttaggagaaaagcattcagtctttcaccacgaagtataatgttagccccaccttataccaccttgtcaatgctgggtggaggtagagctccarttccctgatgggctgcactaacaatggatttgggagaaagtgagggccaaatagccctgccttgcactgccttattgagtctccatgtttctgcatggaagtggtggctcagctccctgctgaactccagtgactttacttcagtagaggaatctcagcaccaactgcttctactaagcagttttttattgccacaggattggagtagggttatgtccaggcgatttttagttgtaagaggaagaacctagaaggactgggactgctctaactgagttggaaccaaaagactctagtgtatttaatttttcagaaattagtcacttttctcctttgcttcttttctaaacagcaataataatttgaatttttcatragtaacatttattatgctcatactatatgagccagatactgttgaagtgcattatatcatccatatcaattaagtattattgtcatccctattttctaaatgaataaatggggacagggaggttgtatatggcctaatattatattaatatgatggtagattcaaaccagggtagccactatcaaactatgtcagaagaagcagaaccatggttcacacctgtaatcccaacactttgggaggccaaggtgggtggataacttgaggtcaggagtttgagaccagcctggccaacatggtgaaaccccatctctactaaaaatacaaaaattagccaggtgtggtggcacactcttgtaatctcagctactcgggaagctgaggcacgagaatcatttgaacccaggaggcagaggttgtagtgagctgggatcacaccactacactccagcctaggcgacagagagagactccatctcaaaaacaaaaaaaccaaacaaacaaaaaaaatagaagcagcagaaccgtgcagttattattcattcttgatacctccttctcccttaatctcttgtaatcaatccatcaccaagtcttgctaatttttcttcctaagtatctctcaaactcatttgcacatttccacttccattgccattccgcttatccaagttatcaacatctctcacttgggctattgmtatagcttcccaatgcatctcctcacattccccattgcccacctgcaatttatttttcatactgcacttacagcaatcttttaggaattcaagtcttatcattttgccacacctggccaaagctcttcagatacttcccattggtcttaaaatgcagacaaacattattaacattactctcagcccagtatgctcttgcctttacctacgtgcccagcatgattttgctccattccccttcttgtctgctaagctgcaagcacaatggctttgtctcctgcctcaaaagttcctttttacctctcatcataagcattttcatatgctcttccctcttcatcctacgtaatatccgcttatccttgagatctcaagtatgtcttcaccttctcagagaaagaacttttaatttccttgagtgaggcaatttcccctgtaacattcttatataatatccaatatatttccttcataggactaatcacatttataatttacatttattagtgtattatgaaagtctttcttctcactagagcacaaatctcttaatagaaaccacatatttcttttctttatctccagcccatagctgggcttctaaaatttagtaagtgcctaatacaaatacccctttataaaagaaagaaaggaaagaaggaagaaatgatggaaggcagaaaagaaggtaggacagagataaaaagctttggtatcagaagctgtagacaggtcaagaagaactaagaccccccagaaaggtaactgaattggggatctggaaggaactctaaagagaagagcttaaaaatgaaatacaaccaggtaaagacatgttgatatccccatttatttatcacastgattttgtgggtggagaaaataataccgaggcttcagaggctttctttgaagcaaggcatttcttttgcaaaaaattgttgaagacacacagtaagagaaaacatttgcaaatcatgtatcttaaaagggacttgaatctagaatatataaagaacttttagcaagcaataattaaaatataacccaattagaaagggggaaaagtatttaaacagtctttttccccaaagaagatacagaaatggctaagaggcacatgaaaagattctcaacatcattaacaattagggaaatctaatgcaaagccacaatgagataccacttcacacccactagaatgcctaaaataaaaaggatagataacaataagttggcaagaaatggaggaattggagcccttggatattgctcgtggaagtgtaaaatatttctgtctctatggaaattagtttggcagttcctcaaacaaacacagggttaccacatcatccagcaattccacttgtaggtatacactcaagagaagtgaaaacataaatccacacaaagacctgtacacagatactcatagcagtattattcataatatccaaaagattaaaacaacctaaatgtccatgaactaatcaatgcatgaagaaaatgcagcatatccatgcaattgaatactattcaccaataaaacaaaatactgacagatgcttcaacaggtttcatagacgaacctcaaaatcactatgctaaacaaaagaaaccagtcaaaaaagatataattatataatcctatttatataaaatgtccagaataagcatatgtatagaagcagaatgtaaattagtagttatcaagggttaagctcagcagaatgggtaatgattattaaggagtatcagtttctttgaggtgatagaaacattctacatgaccattgcataaaaccaaagttaaaacaaatagcttcgcttcttttttttattctagttgtggatattcctatcggactaggtgacttaaaagaaaccttgaaacattggaccacagttaagaaatgttctaaaaccagattatgataattgctgtgcaactctgaaaatacacttaagataatcaaattctatactttaatggggtaaaacttatactatgtaaattatatcttaacaaactgttaaaaattattaaggagaaagttctgaaataagttaacacatttgttctctgtccatatgttaagaaggggatgtaaaaactcatcaaaagttatacttagacaaaatattcttccaagaatgggagttagaaatggtagttattttgataaaaatcccaggtatatgccatatttccttaattgaawaaaaccatttatttgatagtaatatgggggtaagaagtaattatgtattttatatatatatatataatatatacatatrtaccatttattttatagttaatgtggggttaagaagtaattatgtataacacatatctaggaacaagatggttcctagaatgtaaaatctgaaaatctgtgctttaggctgaaagacatgttatttataatacaacacagttcttgagttcaaacagcatttttctaagtcaaaataaatataaatctaaacccrttatgtgccagaatcgataactaaatctcattcattattggactcctttgtgcccagtaggatcccactacagttctgggggtattagacaaaagttttggggagggctatctggtcttcacaatggttactatctagcccaaaaagttattggaggtcaaaagccctgctgattctctgctaagctcaggtgctgagatctttgccaagggcagaaactttagtattggagatctgagtctttgggtatacagaaaattctattacccttggtggaactacccccactctggctgtaaaccactttaagagcttatagattcttaaatctttcttcgggctataactacttcagcttggaccacttttacatccccagacatcaacctctgtaatcctaactccctctagatgattcagtctcttggaaagtgtgtattaactctgccccagtaacagagggcttgattttccaggactggaagctgctcttgactcaaaaccctaaataaggatatgggaagaaaggatagaggtgcagagaggaaagtggggaggaggggtagaggggaaatagcttcctcctttctagtaactctacagtagcaataaataaaacacaaagtagtaattcaatcaagtgcttttctatttggatatataaattatrtattaaatatgacatattatatataatatatatccatcatttatatataattgtgcataaatagaaaaagtctataaaatgcatgttaaaatattgacagtaatttacactagtgttgaagagaagataaacgggagttatgcatactatgtattttactcattttgcacttttgaatgttttataatacgtatcttttattactaaagaatagacggtttttattgtgttttgttttaagaaaaaagaaaataaaagggtagatgtaggtcagaggatacaaagtaacaaatatgtaagatgaacaagtctagagatctaatgtacaacatgagggggactataggtaatcaaataaaattgtactgtatttgagattcctgctaaataaatagattttagctcttcttgccacaaaaacaaaacaaaaaaaagaatgggtaantatatgagatgatggacatgttaaatgcttcactattgtaacctttttatgatctatgtgtatcccataacatcatgttgtataacttatacacaacaaaatttatttttaaaaaaagaaagaaaatggattccagatgtatctaagactgaatggaaaagacaaagcttkggcagcagatagacctagatacaaatcccagcactgtcacttaggagaggtttggcaaactctttgtggtccagttggtgtgtgtgagtaaaatacagacaatgataccatgactaaagagtaaaaacttggcatagttggcttagtcttttgttcctcagatctgaacagattctgctaaagaggagattctcaagaccattgatataatgagtgttcataggaagaaactttgtagagcatctagtttcattatttgtacataaagtagtaggaactccaaaaatggcagagactatcccactgacactattaccatcatcaacatcatcacagtgtgatgtgggtctgtttctaatgaagccttccctaaaacttccaggaagattttattagattcattactctcctctatgtgccttaggaatatagagttcatggcatcctgcaaagagaaagaacctcagttcaaatccagctttgtcacctgctcactttgtgaccttagaaagcatacttgatgtctctgagcctctgagttgtcacctgaaaatgtgagcaataagatccaccacacagagctgctgggaagattagcaaaagagactacgcaaaaaagtgtccagtagcacaccaggcaagtaatacagattcagtgaatcttagttttgttccagagagatcatttagaaatgcattattaaactacaaaattaatgaagagcttaactgtggtccaatgtttcaaggtttcttttaagtcacctagtccaataggaatacccacaactagaataaaagaaagaagtgaagctgtttgttttaacttgggttttatgtaatggtcaygtaggcatccccacagtgtcctttttgctgaggccctttgtctctctactgtgaagagagtggcttgtgattcttttggtttcacagatacctagaggagttctgaagacaagtgtctaaagatgaaacatggtaggaaaaataatgctgggttaatctttttctttatcacagaagtttgccctctccttcagggagtctcagtatgaacatgttgttctttccctttctgaaataagatgagggacaaaaaaagcaaaaggaacttgagagaaagactgacaaaggggaaaaatctcttttcctcccccttcatcagtggttgtggctccctgtccagatgctttgaggctcagtcaactatgagattccaaagaaaaggcagtggggaggggtaggtagaatcaaagagaaacacagaactctgaaaatgtgctatccctattatcctgcttttcaatgtatcttcatattcctattgaattattcattcccacccatatttggttgaacagtaccacccccaaatttgtatacaccaagaacctctgaatgtgacattatttgtgaataaagtctcaccagatataatttgttaaaatgaggtcatatgggattagtatgggccctaaatccaatgactggtgtctttataagagcagaaggcacactgtgatacacagagtggatcaggccatgtcaggacataggcagagattggaccgatgctaccacaagtcaaggcataccaggagccaccagaaggtggaagaggcaaggaagtattctccctgagagcctttggagagagtatgacctgttgaccccttaatttttgattctgatctccaaaattgtcagagaaaaagattctgttgttttaagccatggagtgtatgacaatttgttatagaagccctaggaaaatattataatcaaatttttgtataatttttcacaccataaagtaccgagaggacagtgagggcccaagtcctaatgacctttactgttttctaaaaaagataccctaaaagatagagggaagaggcctgggcatatatgtccataatgaaattatttaactatctttggcaggtaaggggaagaataagggttttagagacagacacactgcatttaaatcagagctccaacatgagacagcagtaaaatatcagtacatttctcacatctgagcccccatttccccatatttaaagcacagagacaaccatctactttgttgaggaatggtattaagaaaaatataaactggacggctatttgggcagacagcgagcttgctgcaggagtttcttttttcatatcccagtggcacctggaacaccggcaagacagaactgttgactccactagaaagggggctgaagccagggagccaagtgctcagtggatcccaccctcacagagcccagcaagctaagggcaactggsttgaaattctcgctgccagcacggcggtctgaagtccacctgggatgctcaagcttggtggggggaatgccgtctgccattactgaggctttggtaggtggttttaggttttaccctcacggtgtaaacaaagccgcagggaagttccaactgggtggagccctctgcagctcagcaaagccactgtagccagactgcctctttagattcctcctctctgggcagggcatctctgaaaaaaaggcagcagccccagtcgtgggcttaaagataaaacccccatctccctgggacagagcccctgggagaaggggtggctgtgggcgcatcttcaacagacttcaatgtgcctgcctgatggctgctgaacagagcagcaaatctcccagcacagcgttcgagctctgctaagggtcagactgcctcctcaagtgggtccctgacccccatgtctcctgactgggagacacatcccagcaggggctgaaagacacctcatacaggagatctctggctggcatatgttgggtacccctctgggacgaagcttccagaggaaggaacacgcagcaatctttgctgttctgcagcgtctgctggtgatacccaggcaaacagggtctggagtggacctccagcaaactctagcaaacctgcagcagaggggcctgttagaaggaaaattaacaaacagaaaggattagcaccaaatcaacaaaaatgacgtcgctcagaaaccccatccaaaggtctccaacatcaaagaacaaaggtagataaatacacaaagatgggggagaaaccagcgtaaaaagactgaaaattccagaaaaaaagaactcctcttcttctccaaaggatcacaactcctcaccagcaagggaacaaaactggacagagaatgagtttgacaaattcagagaagtaggcttcagaaggtggataataacaaactcctccgagctaaaggagcatgttctaccccaatgcaaggaagctaagaatcttgaaaaaaggttagaggaattgctaactagaataaccaatttagagaagaacataaatgacctgatggagctgaaaaacacagcatgagaacatcctgaagcatacattggtatcaatagctgaatagatcaagcagaagaaaggatatcagagattgaagatcaacttaatgaaataaagcgtgaagacaagattagagaaaaaagaatgaaaaggaacgaataaagcctccaagaaatacgggactgtgtgaaaaaactaaatctacatttgattggtgtacctgaaagtgacaggggaatggaaccaagttggaaaacactctgcaggatattatccaggagaacttccccaacctagcaagacagaccaacattcaaattcaggaaatacagagaccaccacaaaaatactcttcgagaagagcaaccccaagacacataattgtcagattcaccaaggatgaaatgaaggaaaaaatgttaagggcagccagagagtaaggtcgggttacccacaaagggaagcccatcagactaactgtggatctctctaaagaaaccctacaagctagaagagagtgggggccaatattcaacattcttagagaaacraattttcaacccagaagatcatctccagccaaactaagcttcataagcaaaggagaaataaaatactttacagacaggcaaatgctgacagattttgtcaccaccagaccggccttacaagagttcctgaaggaagcactaaacatgaaaaggaaccagtagcagccactgcaaaaacatatcaaattgtaaaggccatcaacactatgaagaaactacatcatctaacaggaaaaatacccatctagcatcataacaacaggatcaaattcacacataacagtattatccttaaatgtaaatgggctaaatgccccaattaaaagacacagactggcaaattggataaagtcaagacccatcagtgtgctgtattcaggagacccatcacatgtgcaaagacacacataggctcaaaataaaaggatggaggaatatttaccacgcaaattgaaagccaaaaaaaaaaaaaaaaaagcaagggttgcaattctagacggataacaaagatcaaaagagacacagaagggcattacataatggtwatgggatcaatgcaacaagaagagctaactttcctaaatatatatgcactcaatacaggagcacccagattcaaaaagcaagttctctgagacctacaaagagacttagactcccacccaataatagtgggagacgttaacacctcactgtccatattagacagatcaatgagacagaaaattaacaaggatattcaggacttgaactcagctctggaccaaggggacctaaaagacatctacagaactctccacctcagatcaacagaatatacatttttctcagcaccacatcacatttattctaaaattgaccacataactggaagtaaaacactcctcagcaaatgcaaaagaacggaagtcgtaacagtctctcagaccactgtgcaatcaaactagaactcaggaataagaaactcactcaaaactgcacgactacatggagactgaacaacctgctaccgaatgactactgggtaaataatgaaattaaggcagaaataaataagttctttgaaaccaataagaacaaagacacaacataccagaatctctgggacacagctaaagcagtgtttagagggaaatttataccactaaatgcccacaaggtaaagcaggaaagatctaaaatgacaccctagcatcacaattaaatgaactagagaagcaagagcaaacaaatccaaaagctagcagaagatgagaaataactaagatcagagcagaactgaaggagttagagacaggaaaaactcttcagaaaatcaatgaatccaggaggtggttttttgaaaagatcaacaaaatagatataccactagccagactaataaagaagaaatgagagaagaattaaatagatgcaataagaaatgataaaggggatatcaccactgatcccacagaaatacagtctaccatcagagaatactataaacacctctatgcaaataaactagaaaatctagaagaaatagataaattcctggacatatatacctcctaagtctaaatcaggaagaagtttaatccctgaataaaccaataacaagttctgaaattgaagcagtaattaatagcctaccaaccaaaaaaagtccaggaccagacggattcacagccaaattctaccagaggtacaaagaggagctggtaccattccttctggaactattccaaacaacagaaaaagagggaatcctctctaactcattttatgaggccaatgtcctcctgacaccaaacctggcagagatacaacaaaaaaagaaaatttcaggccaatatctctgacgaacatcaatgagaaaagcctcaagaaaatactggcaaaccgaatccggcagcacatcaaaaagcttatccacgacgatcaagtcggcttcacccctgggatacaaggctggttcaacatacacaaatcaataaacgtaatccatcacataaagagaaccaatgacaaaaaccacgtgattatctcaatagattcagaaaaggccttcgayaaaattcaataccccttcatgctaaaaactctcaataaactaggtattgacagactgtatctcaaaataataagagctatttatgacaaacctacagccaacatcatactgaatgggcaaaagctggaagcattccctttgaaaactggcacaagacagggatgccctctctgaccactcctattcgacatagtattggaagttctggccagggcaatcaggcaagagaaagaaataaaaggtattcaaataggaagagaggaagtcaaatagtctcggtttacagatgacatgactgtatatttagaaaaccccaacawctctgcccaaaacctccttaagctgataaacaacttctgcaaagtctcagaatataaaatcaatgtgcaaaaatcacaagcattactatacgccaataatagacagagagccaaatcatgagtgaactaccattcacaattgctagaaagagaataaaatacctaggaatacaacttacaagagatgtgaaggacctcttcaaggagaactacaaaccrctactcaaggaaatacgagaggacataaactaatggaaaacatttcatggtcatgaatgggaaaactcaatattgtgaaaatggccacactgcccatagtaatttatagattcagtgctatccccatcaagctatcattgactttcttcacagaattagaaaaaactactttaaatttcatatggaaccaaaaaacagcccgcatggacaagacaatcctaagcaaaaagaacaaagctggaagcatcacgctacctgacctcaaactatactacaaggctacagtaaccaaaacagcatggtactggtaccaaaacagatatatagaccaatggaacagaacagaggcctcagaaataatgccacacatctacaaccatctgatctttgataaacctgacaaaagcaatggggaaagaatactctatttaataaatggtgttgggtaaactggctagccgtatgtagaaaactaaaactggacccccttccttacaccttatacaaacattaactcaagatggattaaagacttaaacttaagacctaaaaccataaaaaccctagaagaaaacctaggcaataccattcaagacacaggcatgggcaaagacttcgtgactaaaacaccaaaagcaatggcaacaaaagccaaagttgacaaatgggatctaattaaactaaattgcttctgcacagcaaaagaaactatcatcagggtgaacaggcaacctacagaaygggagaaaatttttgcaatctacccatttgatgaggggctaatatctagaatctataaagaacttcaacaaatttacaagaaaaaaaatcaaaaagtgagcgaaggatatgaacagacacttctcaaaagaagacatttatgtggccaacaaacatgaaaaaaagctcatcatcactcgtcattagagaaatgcaaatcaaaaccacaatgagataccatctcattccagttagaatgacaatcattaaaaagtcaggaaacaacagatgctggagaggatgtggagaaataggaatgcttttacactgttgatgggagtataaattagttcaaccattgtggaagacagtgtggcgattcctcaaggatctagaactagaaataccatttgacccagcaatcccattactgggtatatacccaaaggactgtaaatcattctactataaagatacatgcacatgtatgttcattgcagcactgttcacaataacaaagacttggaaccaacccaaatgcccatcaatgatagactggataaagaaaatgtgacacatatacaccatggaatactatgcggccataaaacggatgggttcacgtcatttgcagggacatggatgaagctgtaaaccgtcattctcagcaaactaacacaagaacagaaaaccaaacaccgcatgttctcactcataagcgggagttgaacaatgagaacacatggacacggggaagggaacatcacacaacagggcctattggggggtggggggctaggggagggatagcattaggagaaatacctaatgtagatgacaggttgatgggtgcagcaaaccaccatggcacatgtatacctatgtaacaaacctgcacgttctgcacatgtaccccaacacttgaagtataattaaaaaaaagaaaaatatggttttcaagttttgcacagtaaccaatatatcacagattcttcataattgatagcttttttctaactagccagactcaaactacaaaagatagaaaactagaaaagatatgacaagccaactaccaaagggaatgccaccctggaaatataaaactatgtacttactgagattgcaagagtcttaaaagaatctgtttttgctgcctcraacatctgatgagttttcctgggaatgtgtattaaaaataaagcccctggagcttaggaagttattaggttttcccagccacatgtcctggagggtactctgtcttggttgactacccaaaagttgttgttgccctttttcctctttgttgctaacagagtctacctacagagttggctaggagcccaatggatttaaggtaagtgtgctaggagatgtccatgattgattccttccataaatgaagaggaagaataaaagaaagaataagaagaggggtagtaagaagaacaagataaatatatcatgataattgtatggccctctctctgcccttgagtttgcctatttttttcccagaccagatgtaaaaagaatagatacaaaactgactttaaccatgtactagtacaagaaatacaatggtgaagacagacactggccctgccttgctagatcctacaatctagagacaaaaataggccattctaatcccagataacaaatgctaggacaagaggtaggcatggtgcatggtgccataataattcaaagcagaagaacataatccaggtgaagggtcagaagggactttctggaggaagtgacccttcatgaaaggattgtataggagttagccaagcaaaatgaggcagaggatagactttgaaaataaatgctgatttccaaatgccaaagcaacaccagatctcacacagtgagtcactgcactaaggtgataaatctatgaacattgctccagtgaaacatgggatggaaatgcaggacagagcaaataaccccgtttataaacaaaatgtgtwcactatgggccaatgttgcttttcaaaggaaaattaagcttcctgacagcagtctgacgcacctgtctctctctaccagtgattgagctcgtgatgttcacaggtagtaacaaatatcattttcttcactgtgtctgtggcagattttccaaaaatggacatcataatatctcccagtccctatgctgtttttcagtgtaaccttgccctccttcatcaaggggtcaaatctaattgccctccgtttgaatctggactggccttagaaatgtgtttgtaaccgacagaatgtggctgtgttacttctaaggctaggtgagaagtctggcagcttctgaacactcattgtctggatgcttcagctcgggccactgcttctcagaacccagcttccacactgtaaaaagccaagaacatgtggagaggcacatggagtgctctagttgatagccccagctgagtccagccttggaggaatatcaacccaggagcctgacatatgtggaaagaaaccttcagttgattccatttcccagctttaaaagtgccctcagcacttgaagttttccccactgaggtccrgatatcaaagagatacaagccatccctgcggggctctatctgaattattgacccacagaatttatgagcacagtaaaatggcggttgtttgataccaataagtttgaggtagtcattacatagcaatagatgcaactgatacaatcaggatgatatccctagctccaagctcagggtatgatatgaaacagaagttcagtgagatcttgtgaaactgggttgaaatgaaagttaaagcacctagaaagactctctgtttgttcctctgagacagtctcccatcgttaaagtgaggtgtattaaaggatgcctcactatttatcagttgcctcacactgcctttactcagtagtcttcagttatcacttaatatagaccctaaaataaatcccaagaaggggcaattttgcagtrttcaaaatatattttcatcaacatcaactcagtaattgccctgggaacttcaatgcatctgttgatagcactgtcaaaagctgtcaccaaattctacatccagttcctctggctgaggctgtctaacagcctattaacaacagaggaagtagaaaatcataccaagaaagctacagtttttttttttttttggttgtttgtttctttctggagaatctacaggaacccagaagcataggaaacaagattttgttctccctagagaaagtacagtgattacaaatctgagctctggacatataatcctgagttaaaatctcagctctgctacttaatgactgtgaacttactcatgtttttatgtgttatctgtcatactgtttctcctttagttaaaaaaaaaaaaagactggcwtaagaattaaataagaccggttgggtgaggtggctgacgcctgtaatcccagcactttgggaggctgaggcaggcggatcacaaggtcaggagtttgagaccaccctagccaatatggtgtatggtgaaaccccatctctaataaaaatacaaaaattagccgggcatggtggcaggtgcctgtagtcccagctacttgggaggctgaggcaggagaattgcttgaacctgggaggtggatgttgcagtgagccaagatggcaccactacactccagcttgggcaacagagtgagaaaaaaaaaaaaaaargaaaagaaaagaaagaaaaagaattaaataacaccatgggtatttgaagttattcaaatatttgtgatgtacctcttaagtgcctgtgctattctaagtccagaaaacaaaatggtgaacaaatgaaacaaatctcctgctgtaatacagctcacattctagcaggagagacaaacaataaataaatatgtaaagtaacatgtaatatgtaattaagggtagtgatcagtaatatggaaaaataaagcagagaaaggggatggagagtgatgaggttactaaaatagatagagaggcctggggaaggttttctgaggacacataaatgaagacttagatgaaatgcagaaataaaccatacgattatcctggggtgttcccaggataattctagcaaccctctagcattctagccagaggaatgccaagacaaaggcttaaggtgggaaaaagaagagcaagaaggcctgggaagcagaagtggagtgagaaaatgggattaaggtaggaaatggtatctccaaggtggccataggtgaaatcaggtaggtccttttaagccatctggattatattctaagtacggtaggaagccactggtggactttccrtcaacctctgtaagaattgcttagcactgtgcctggcatatcacagcacatgctcagcaagtggctgggctgtcacattattatggactagggccaaaacaggacagcagaaacacattcttcaccagcaacactaagtccaacctccacttatgtagcaaatgttaaggtcagagtgtacaacttgcaggctacaagcagggctgacaattcagatcatacacacaagatgtagaaacaataaaaccaaataaccctaaagaaatgtcaagtattctgctttgactcagactacatgacttcgttcttcaggaaaatccaaggtgggaggtaataacacttcatgctgaaaaatagtattacttgcctatggctgagccactgaataaactgtgagcttgttgaggcaattaccagcccttgcttcggtgctcggccccaggacctagagctgtattgtccagtatggcagccactagcctcatgtggccattgagcccttcaaatatggcttgcatggattgagatgtgctatgggtataagatatacactgaatttcaaagacttagttccaaaaagaagaatgtaaaatatctcattaataatatttatactgactacatattgaaataatatttggatatattacattaggttaaaaatactttaaaatttaactgcccttttttttttttttttttttacttttcttaatgtggctaacagaaaattatatctgtatcttgcattatgtatctattggactctgcagagcaggtgtgaagtaaatgtgggaaggaagaaaatgaaagaataggaatatctctaagatttttgcaatcttaattagaggtggaaaatggggtttatcttgaaagtcagatccgattttctgatagtggttgccccagcctactgtattagaaaggacttgagaccaaactcaggttcactgaagagactcytttatgattataatttataaggtttgacattggacaccagaggcaaccatgacagccttcgtacaatgtattgcttattctcatatgggaataataataatagcaataatttcttaagcatgtattttttactgggcatgtgctgaacatttattcttgctggacctttcccatagacaattttatttttcacaacaaccttgaaaggtaataatttttttcccagtgaaaaatgaagctcagagacattagtttcctaaattaataaagaaaagtccaagaattaaacccagcataacatctccccgacgctcacactctagtcctaacctgctatgaacaggcattacctcttgataacaaaaattgttggctgggatgctcattgctagcatggacccctgtaatctgcttactccccagtggttggtgtatgccctagttctagactcgggtctgtgctaagcaccttttgcatatgatacagttgtatccatggagtgcatcctcaacagtttaccccatcttagaaagttgatcaaatcagtggttctcaaactttcatatgcatgagcatcatatggaaggcttattaaaatgcagatttctgggccttacccctaaaaagttgctgattcggtaggtcttgcttagggcctgaggatttggatttctaataagttcccaagtgatgctgatattgctgatctaggagccacactttgagaatccagagtgtggactagcaccccagtcttcttggccacatattaaatcatctggggaattttttaaaatgaaccaatgcccagccctagaccagaccagatcaactaaatcagaatctctatgggggggtccagacatatgcattttaaaaatctcttccagaaagaaatgaaggttgaggaccactgagcaacccggtcctcctttctagctgttccaaaagataaaattgggaaaaaacaaccaagcccattccagtcagaagccaagccttgatygattcattgtggataagcaccaactttagggctgtgttagaacccggaggtgaagaggtagatgtcagcatgggtgctagagagtctggaggctacagggtaggcctccagaaggcagagacagagtccctagaaatgccatctggtaactgatattatgagaatccatgagtctgtcctttagagatattttaacagcgactaaaggtcaatatgagttccatcactgtcatttccttcatagctggaaaatcttccaatgtgaaggacactaacattataatcattatctggctcaacagaaataaaatttgatggaataaggatgatccacatctgtgagactcctcaaagatgaaacccattgcaactagcatcgaatcctctgaaatctacaaagataagaatttcaagtgtaaacattgtgaaatattttctccatcaaagtgagacaaaccctaggaatctaaaaatcagatactgacttctccctttgcagtgccaacaatgaaaccagcagacaatctctaaaactttctttttatccctgtcactcaaaaggaaaaatcaagaacatcaaatgaaatgacttatctgtgaaattttttggtgtttggtaactttgcagaatcacaaatcaaaacttcccagcatctcctagtcacaaacttccctaagcatttccactttaaatgtacttataaaattatttttttcctctataaatacattttatcctctttttcaaagcttctttattgcctgatggctatgtgaagatgctgactggttctaaaatgcaaataaattttaaatatttattgattttatttttcaagatgccagtgacaaaatgccttatatatatgctgttatctctgcatggtctgcattcagacacagtccttctccagttcttgaaaaattacccagtttccacacatttgctgtatcatctcaggaggttcttgcgtgctttatttctgattgacctaagagtatcaaaactgctgaacattacaaatgtaaagttttctgtcctattccaacctcttcgacaggaaccgcattcttgggcaaaacagatcaactatttgcaacattaaaaattaccccatttacctactcaatctaaatttttggattttcgcatattagtagtcaaataaccagatttcccccctcacctatcctgcaatacctcacgtttaaaagaataggagaaataacaaaaagtaaactgtcaagttatggattagagtcacagtcattttaaccactacattttgtaaatggttttcacttcttagtgataaatggctttaaaacaatcattaaaagctctacaaaaaccccagtcattaaagactccacgatgtccgccttcctctttctctcgacactggaaaatggatgagcacattttgtggtaagtttgccccagtggggagttgaaacatctcaaatgcttggtccagtgtgacctctattgactagactaattktatgcccagaaaaaagtggccacattccttcctttagcattctgtttaagtttcttctatgccctggtatagaatttaaacaaacctctacttcttaaaatttccataggaagcatgaatttgaaaaatctrtcactacaaaacatgccctttgactgtgcccaagagtcaactgaaaaataagatgatgaaaacaatatatctgttaatataacagtgcatattgccatatgtttatgaaaatgaaaatagtgataagcaattacagtaatagcctaatgctcacttttcattgcatacacatacacttactgacctcagtaaaggaatacttcaaacagtgagacaaataaatcttaattttatctgcctgaatttacttatttaaatgcataatcaatcaaaattaatgataaatatttgaaatgcttaatcattagcatacagaacaataagaacttcgccatctcacttactaaaaattaatacaccgtttaaaatattcaaaatgtgttttagaggagctctgataattatatcctggccaaatatgtgattcttccactttatctttagttcaattaaataaatattattgtgcttacattcagacattataagcaaaggctgcaattaaaagataacacacatccctgccatatgaaataaagaaccataattattaccacataagtaggaaatataagtgctataaaaatagaatatcttaaaagaaagaacttactactcagtaccagtcattggaattaatattatctattaccycaacactatttttctacaatcagctgatgactcaagtgttgaatttttatatctttcacatattatctaataagtccatttggaatgtgtaagctaaattataacaagaagttatatttgaataatgctttagttaaaatataaargttaaaacataatttcatttgcttttcacatcractttataagaaaggcaggaagttactcgtgtcctcattttgtctgaaaccataatccaagtttcctaacttcttgttcaaatayctaaatgtctcgtccaaagattgagtcttaccaagagtaggccaaatgctctgcacaaaaatggatatcttaaaacaatctccataggaggaaagtgctgttataatccttattttacaaaatgagaaaactgaagcatcaagacataaatatcrctattttagtttcctattgctgctgtaacaaattaccaaaaatagtgccttatagcaacatgaattcattgtcttccacttttggaggtctgaagtccaaaatgggtctcactgggctaaaaaggtactggcagtgttgttttcttttggcggacttctagggaatatctcttttgttttgttttttgacttctccagcttctagaggctgcctgcattctttggcttgtgacttaatgtctgccttttcaaagccagcaacattgagccacgtccttctcatgctgctatatgcgtggttctctctttcttgctttcctctttcacttgtaaggactcctgtgactaaattgatcccacccagaaatccaggacaatataactatctcagggtcagctgattagcaaccttaattccatctgaaactttaattctccttttcaacctaatatattaacaggttttagggattcatatatggaaaggaggaattattttgcctaccacagtaacacatagctagaaagcagcacagctaagacttgaacatggccttgtctgattccaaagcccacccatgctctcaaaccaccctattacactgccaccttgcaatatgcccaacattacatacaaaatcttccctgctagggaggcagaaagcaccatctcagaactstatgacctctctcattgtctacttgaattggcaaggctgaataaactgaggcaacataatagataagagttaatgattgggctataatctctttctccagcttctgggaatgcttgaggaaaatttgacacccagttgcactttttgcaatatcaagtgagaaaatataatctttagagataaatgagggtcttattagggttgtcatatactgattacatttccagggctgtccctgagcatcctgtatttagttgtcagaatatctgatcacttatgcctgcagcracacttaagaatgggaactgagcatactctcctgcaacatgctaggaaattctcaaggattttaagatgaaggagcatagacactgcagcttccttgggctgatgtgacccaatctagggtcagttcctatcccttggaactaaaacaaataccagactatgaggggacaccagtgtctggatgactaaggccttatgatgctcctagttgtgaattccagtattcccattttacattctttttgtttgcttgtttgttttttgttttggagacagagtctcactctatcgcccaggctggagtgcagtggtgcgatctctgctcactattacctccacctcctggattcaagcaattctcctgcttcagcctccagagtagctgggattacaggcatccaccagcatgcccagctaatttttgtattttagacgagacaggatttcgccatgttggtcaggctggtctcaaactcctgacctcaggtgatccacccacctcggcctcccaaagtgctgggattacaggcatgagccaccgcaccctgcctgcatcttttcttaaatctaaataaactctctgggtgaaacttgtgtcttgtgaattgaattgacaaaacaaactagaaaccaagacctgtttgttgtcttgttcatccaatgactgaatgtctttccacaatccacagaaaagccattcttagggctccagtttcaatactgctaaatgtgataagcaaacatctgtattaaactcagcaacaaaatatcttttttcttacatttcaatagttacaacatcctttgtagatcaataataaaaccaaaggacttagaccttaactgaggcaaacttataaaaactaaaatatttctgtatcccaagtaatatttaattcttatagtaccagagtacattaaataaaaaaaaaaaaaggaagaaacaacagacaactaaaatatttcagggtaactggcacccactaatcttaagaaaggtgatacaagtaaattactcttgctcaacaaactgagtagatattctctctataatatataaaaataattatacatgcacatgccttgtctaaagtataggtaaccttgagagcaggttgccatgtctttttgatttttatatttagtacagtgcattgtgaaagactgtgtgcaatgtgtcttaaatgaacaaagatatgtaaatgtaggagtcttaatagtttctagagctactaggtaattataaaataaataaacctaggaataaacaatttgaacaataatgttccaaactttagaagcaatttgacaatatcaaggcaaattaaagatgcacataacagaaggagacttatgccagtacattaattccaacattctttgtaattgtaaaaactagtcaycaggaaaaaggataagtaaattgtgaactattcatacaatggattactgtatcataattaaaatgaagagctacatatgtgagcagggataaatctcaatgacattgagtgacaaatgcaagtggcagttgaatatatacattatgatataattgtataaagttaaaagcatttcaaacaatactatacaaattggttttaaatatagggacatagagtagcagcataaaacatgcgtgaaaatgataagtatcaaatgcaaagaaaggaagacggtatatatgacaacatgttaagatttgataggattcaatgatgggtccaatatggtcacattatactttaaattttcctatatgtttgtaagtttgtgaatattattaaaaggaaaatgcttatagtgtcacaaagatttatactggaaagaattctaaaartattcaaaatgaagtgtcctaggttacacagccagacacttcagagcaggtaaatggaaactctgatgctaaaaccaagtttctctaatttgcacatctgttctttatccactgtgcctcactgtatattttgcattgcttctatttttggttctttttaaataaattttttttatttaattagaaaaatgtcagtacaacaattccttcacttctaaataacagccttgtkgacttaagggttgtaaatttcaagactgtgagaatgagtaaagaaaagtgagagaaaaaagccatagggccctgaaagtctttacatgtccaagctggaaggaatcatttcactgatattgccaacacataaacctgctatgggagccaaacacatttgcagagttgtggataaagggctggggtgcagttattcttaatggagatgatggccatctgtctcacccctcaaatgtcagcctaaattccaaccagaatcatgagaactgtcccagccccaggcacagtgactgaggagaaaaagctagttcacctgcttccccaagatgatactgactgtaggaaaagaacagaagcaaaaaatgtattcatttaccattagatttcttcagtgatttttacctttccccttcatcttccccaaagggatgatgcaattctttttttatagtccagaacccaaatcagttctaaaagtaaagggaaggaaactaacacatattgagctctcctttcagatgttcaagaggtatttccttgtttcagtttcatagacaccctttgaaacaggtatcatcaattacctgcctattatacagaaaagaaattgaggttctaaaagtcagataagatttccaagtttatacatctactaaagtgcatgatatctacctaaaatccttatttgtttatttttgttaactacatgctgctctaaaagtctataatctgtgtcaattcatgtcctctttcaggtcctcagctttttaatctgaaaattgggtagattagaatagcctatcttgaacattctatgattctctgaataaagtgaccctgtaagggcagacacaggatgtctattcacatagacaacttggacagaagaggtcagaagagagcctgagacaaatcatagagtgacaataatagacaagtaatagagtcagcacccttgcccagagacactgcatgaaatttaaaaataaataggcaaaaatttgaaagggaggtattaattgcttaatagaccagtcaatgtggtctttgagaatggccatgtcattaaggatgaatttatcattttaagtgttactttgattttatgcctcctgagttcagaaacctcaaatcaaatctcatcttcttagcaattaccttagcaccatcttccacccttttctagccagctattctaattaccaaaaggaaaactagttaatctatctaacttcaaactttcagacatcttgtctctcttctgttcatgttctcctgtcttctttccataaagtcatgtcacttttctctgtcaaagaccagcttctggctcgcttctgtcaagtcttcccttgactaaccccaataggatccagtgacttttaattatttcaaacttctcttatctctttagtgcaaatggacaaaaaaaagacttttaaattatatttctgtcatgtgctaaatattccgccaaagccttaataagtgaaatcacgtgagtcacacttaatcctgtcaagcggaatattattatttctatttcaccaatgacagaaatgacagtcagcaatattaaagtgacttgtccaaagtcacacatttggaaaactagaattgacaaccaaatcaacctggatctaaattccaaacaaatgactttctgtactcagaacagattgagggtttgtagaaatgcagctttttgtttatttttccctttctcctacatggtatcaaacaatccactacttattcatttccctctatttagaaaattttagacctccccagtgccagcaaggcttgcattgctggatgttccagtgatataaaaatgaractgattttcctccagtaaataacattaatgttgatcaagaatattggacataagaccaaacatattagcctttccttgaaaccaactgcactatgtcaagacacaaaactgtgcagctctggttaccacagctcaataaaggcttaacaagccttggagagggtccagagatgagcaattaaaatatcctaagagatggaaagagatgtcttagacgaacaaactaaaatcagtcaagacctataagtttaccaatataaagactgagaactaatggattctgagtctgggtaaaaacaagtagatagagagaatatgaacacacatatactcactgtcactgacatttgccattttttggccatccagcatccatttcctcttctaacaggtgtcaaggtcccttacagggaactgcatatgcttcactggtgtatatactgtggtggaatccagaaactccctcctactacagggtctcagtgaatggggcccttcttttaacatgtccagtaaaataatggagaagtcacatgacctaagatcagccatcatgtgacctaagctcagtgaatcagacttytcctttcattcaattttgactcttgagagacagagaaataagaagccagaggatatggtggttagatgtatccagctaaccattccttctatgagatctttccttcctttctgcatcctggcccttaggagcctccttggtttcagtccctttctacacaagtttcatcatcctaccaataagttctgtgagctcctgatagccttgcaataagcccctttttgtttaaattagagtcatttgcagatgcctctttcctaatagataagaaatactcatcaaaggccagataaggtgctaaaagtcaatccattttactagaacttagtaagcaaggtgcaggttaaaagctagaggagagagaatttatgtatgacagacactgcactaagagctttatacccattatcacatttagtcacaacaaccctgtgagctgggaagcaggatctcaattttgaaaactaaaaccgaggcttaggaaggttaactagcttgcccatggtaagtagtaaaaaaacgatagggccaggtgcagtggctcacgcctgtaatcccagcactttgggaggccgaggcgggtggatcacctgaggtcagaagtgtaagaccagcctggtcaacatggtggaactccgtctctactaaatatacaaaaattagccgggtgtggtggcaggcacctgtaatcccagctattcgagaggctgaggcaggagaatcgcttcaacctgggaggcagaggttgcagtgagctgaggtgcaccactatgctccagcctgggcaacaagagcgaaatttcacctcaaaaaaaaaaaaaaaaaaaagatactggaattaaatacaagtatgttcctagtcaaattataaagaattcaaaatagaaacaaatgtgatttgggctgtttatttataacattagtagcagacatcaagagagaaaacattcttttacaatatgtttgaattatcctgtcagccctaaggatggatggataggttaatggaaggatggaagtatagatggatggatggatgggaagatggacaagtgaagagatgggaggaaaacacactaaaagatgacagacaattggttaagctcaaggaagggcaattcttatgcgattggctgttaaagcatcagtaattatcggtgctaacaacaaaatactgtatctgaagttgccgtttgaaaatgtaacacatatttacattgcatatcaatttttttaatattatatttagaaggatgaggaaattcacaagttgattcactatttgatggcttcaaactttccatttcaataattagaacttaaggcaaaaatctacattttctagaaaacacgatttcacttcaatcaaaactcctcgttaataaaacagaggacattcattttattatggtaaaacatatcataaattaaatgcttttgtaggaaaactagtattcttttatagtatgggcttttcttcagagacattgacttacatcttgaaaaatgagtctgttttcgactgacacatttgaaacacaatttagcatgcctggctgggtgtgatggctcatgcctgtaatcccagcactttgggaggccaaggcaggtggatcacttggggtcagaagtttgagaccagcctggccaacattgcgaaaccccatctctactaaaaatacagaatttagccggtcatggtgggcaccttcctgtaatctcagctactcaggaggttgagggaggagaatcgcttgaacccaggaggcggaggttgcagtgagctgagatggtgccactgcactccagcctgggtgaaaaagcaagactccatctcaaaaacaaaacaaaacaaaacaaacaataaacaaacaatttgcatgccaatgaactaagaaaaaagaggaggacatagaatggggtaggagggaatgtgggatattgattataaccaatcacttcattttacaaaagaggaaactgaaggccaatgaagttaagtgacttctccaagctcacacaccagttgctagccaacttggggttcccagtcacacgttcctggtttaggaatggtgctactgcctctatatcgcattgcccttcactacacctagaaaacatactatgggccaacatgtaagaaaacaggcaaatttattctttccacctatgagcccccaaaaatgatcatagtaacggaaacgcagatttttttccttttgtttcagactagtgaagctatttccctttaccctccctcaatctcacttgttcagagatgtgactcattttctaaccctgttcaactcaacactacattccaatcacctgattccaatcacattattaaaataaagtaatatctgttgggtcggcatggttcccactagttatattcattatcctttgacaggtaacaygggggatcaaaatgctgccatccaactgggaaacatccttgaaatacgagtgaaaatctcaacctgcgttttataggccagagctctgctgatggaatgctatcaaacagatcgatgcctgcatttccttaattaatgataatctcaccaggggagggggagtagatattgttttaatctttgtaaaacttttctgcaaacactggagctctcttgagcattcacagggatagagcaagcccttctcctgaataatattctcattcgcaagctttatttgttcagctgaccctatgaatagatgttctgaaacctgtaaaagtaattttaaaagaaaayctacatttaaatgtttctaatatcacttcagcaacaatcatttattatgcacctcctatgtgccttgcactaagctggcccttgaaaaaggcttaagtcagaactggtttgagagagtccataatttrttgggagagacagatcatgttcataaaaaacgtataagattatattatactgaggtaataaaattctccaatagcacattattttttcataaatcttgaacatacttttctatttggaaatttggtttaaggtcaatcccagctttgtggtgctgggactggaactgtaaacaccacatctttattttgccagccgttccctctcaggctctgcccatatgggtgaaagaggagaactgcaaagcttcagaatgaagacaggacttcatccttcttgtttgttcccttttagcttcttcttgtaagtatcatcctagcaatgattcttcagtccaacagcaacaattttctttccagtagcagtacttggttcccatttgccgttttcccaacatttgaagagcaatgtttatggcaccctcagataacaatatcagctggccagcctctctttaccttcctctggtagcccccatcctattataccatttttctatgctcagagactctagcacctgggaagcctcttttcctctaaatattaataattccaacctcttcctcctgtttccctagccctaggtagctgcttcctgaaaaggctatttctgtgatacctgaaaagtctacttctgtgataactttatgctcttttcgtattataagttctttaatatgtagttatattaaattctctcttataaaataatttgtgtggttactgtctcctgactgaaccatgactgattacaaagttcaatggagcccattttctttctttttttttttttttctttttgagacggagtctcactctgtcacccaggctgcagtgcagtggcgtgatctcggttcactgcaacctccacctcccaggatcaagtgattctcctgcctcagcctctctgagtagctgagattacagacacctgacaccacatccggctaatttttgtatttttagtagagacggggtttcgctatgttggccaggctgctctcgaactcatgacctcaagtgatccacctgccttggcctcccaaagtgctgggattacaggcaggagccaccgtgcccagctggagctcattttcttaagagcacaggctctggctggcgtctgctagaatttgaatctcagctccaccatctggtagctgtgataaagttaaaagggaagttagctcacctctctgtgtctctgtattcttatctattacattgggataataacagtatttacttcattagatagttgtgagaattaaataagtcaatatatgtaaagtcttagaataatgccaaatctacagaaacactattaaaaattcagctactgttctcacagagtgaaccacatatactcagaagccagcatgtcttcttcagtacactagtagaaaaaataataataatgacaattaaggtgttgtattttctattaattaaatgaagatttaaggtttctgcaatttttctgcagtccatttaagaaagtggaaaaatttagcctgcgataatagagagaaaagaaatgttaacaaaattaagtgtgaacatttcccatctctaatatcataaaaattcaaacttcttactgaatgtatagttcagagacagcaaacaagaggcataatttcccagctgtttccttaaatcagtacatattgctaatgtgaaatagtgatgtaaggaaaagaggagctttgcagttgaaatgggattccaatctcatttctgccatgccccacctctgagactgtggcaaattactaactctttaaagccatatagctgttatgaagtaggcattcaataaacagcagcttttttttctcctttcaataaatatcccctgagtaaatccacttgcctagtatcactttgtattataggttggtgcaaaagtaatagcgattttcaccatgagtagcggttttcaccatgagtagtggcaaaaactgcaattacttttgcatcaacctaaacctgaatatttcatctgcttttcccccataaatacaatataaatgtattactcatcttcacatgtcagccaaatgaaagccagcaaaatctcaatgatgacaaataaattaggtttcaaaggtctaaaaattgttctagctcctgctatgttaccttgcagggagagagcaagagtatccagttcaccaaagaaatgtgaactttaatggggaagtataggcacttcgagcatcctcatttttagaaaaaaaattctttgacatggtgtttactttgcctagtatatcaatggtgagatggggaaaaatagaaataggattcaggattcacctagaaaaacgtagttttctaggcagagaacatttttttttttgaaacaagatattaaggaaatccatggagaaagatttctttaaaagagttggatgttcagacaaaaagtttgctgggctgcttctacatgacctgaccaagccagagagcccctaaaccttgccccagtaaaggaacagggaaactcaccagaaacaagaaggcagtacagaatacatagctaaggaacttctatgataaaatgtagagaaagtacgaggccaatgtgtttgctgctcagctaaaggaagaacaaaaatctcccttcaaattgaaccctaaatggcttccagctgtaaataaatagaaatagatgatttatttctactttatttgccaactcatttctctttcacagaaagaaaaattgtctactcttgatcttaaagcattttctgattgttcagaattcatgtcacaggccaaaagagaatctctgtgtaaattatctgataaaaatcatgagcagyagcatgccaaacagaatcaggcacaaattagtaattccacatcagaacatatttcagtcatgtaaaaaatttgttttccaattaacacccgctgatttgcacaccaaaaggaagcatcaactgtaatctcagctttgaaagcaaccgcagagtttgttcttcttccagaygataagatataaayaaaagattatgtaatacaggttaatttaattatataagaacagcaaaatgacattgcctaatgtatatttatactaggttgtctcctaaataatttgtctgcaaactatggcatggggggcaaatccagagccccccgcccaccctgcccccaactaaattcagtcctctagccagctctttgtgtaagtaaagttttattgaattacagccagacccatttgtttacatatattctgtggctgccttcctgctgctaacacacttgagtagttgctacccagacagtatgacctatgaaacctaaaatatttacttgctagacctttacaaaaaaaaaaaaaaaaaaaaaaaaagtgtgttgatttctgtcctaaacctttgcacaaatacttccctatattttggttaaaaacataaatcaggtaagaccactcctaactcaaactatgtgcaaaatgtagctccaggaagcaaataaaagactattcactgagtattctctttatgtcaagtctcagtattgtcacgtggtgtctagaaatttggatggagtatatttttcttgctctttgattttgttcttagccaagtgacttgatttagccaatagatgttaatagatttgacataagcaaagacttaaaatgtgtttttatatattttggcgcttgtcttgcactttcctttgccatactaaaaacatgcctgtgctcacctgctatcacaagttggatgagaatacactagccaactcacatcatgaagcacagccacctctgccaacctgcaaatccttgagaataaatgagtttttttaagccattgagttttgagatgatttattacatatgactattgtggcaataactaactagtacataatcaaaccactctctcattgtgtttcaaaaccttccaaatatattatttcctctacacgaaatttctgctagaccacttgcctaaaatattctctcttcactactttctattcaaaatattttatgttttcagaatctagctccagcccaacttttccatggagaagctgtcagctgtttatctgataatgagcaagactgttactgaactcctatatttcttgaaggttagaacccatggacaataaattaattgttctataaatcagtagttgccagtttggaagaaccgaggtcattcgaaaaagttttttaagtgccagtaatactatgcccctttcctatcccctgttcagtcagattacagattctcagctttcacaaacctcagccatgcataatatcaaagccattctttcccatctctgagaaccacatgggttaccttccagtttttgtctaatcataaaaacctccattttcatttactcaaaaatatcctttaagttgaatcttttttaaaattttatttaactaaatgcacctaacagaaaaacttttttttttttttaagacaagttctcactctgtccccaaggctggagtgcagtagtgtggtctcggctcactgcaaccttgatctcttgggctcaggccatcctctcatctccgcctcctgagtagctggggctccaggcagaagtcatacctagctaatttttaaaatttttgtagagatgaggtttcactatattgcctgggctggtctcaaactcctaggctcaagcagtcctccagcatcagcctcccaaagcgctgagattacaggtgtgagctacgatycccacccaaagaattttataattgaaaaagaaataaatttctcattatgactgttgtaaaactattaaataaacccctagcaaagtgtccttaagataatccagcacactacctgcactttttggggaagggaagagtgttctgggatattctacagttaatttcatctgttcaattagattacaaattccttgaagatgaggatcaagtctcattaaatatttagtgattagyagcctcaggtgaggccaagaaaacagaaacattgtggaaaaagcaaagaaatccctattagaaaaacagggccataaaaatctagtagtacttcttttactagatcactaattttaggtaattcatattagtgtctaagaaagaaataactttgcaaagcaaagaaaacaattaacagagtgaagagacaaccgacagatctggagaaaaatatgtacaaattgtacatcagatatgagagtaatattcaaagtatataagaaactcaaagtactccataaaaagaaaacaaataacctgatttttaaaatgagcaaagcacctgcatagaagtgtttcaaaaaagacacacaaatggccaagagatacatttttaaaagttcaacatcatgaatcaccagagaaatacaaattaaaatcacaatgagacattacctcacacctgttagaacgattataaaaaaaatgaaaggtaacatgtattggtgaggatgtgaagaaaagggaatgggtgcacactgttggtaggaatgtaaattagtacagccattataaaaagacagtatggaggtccctccaaaaactaagaataaaattaccatgtgaytcagcaatctcactactgagcatatacccaaaggaattgaaatcattatgtcaaagacatgtctacacttgcatgtgcatttcagtattattcactgtttattatttccaagctatggaaacaaccagggtgcccatcaacagaygactagataaagaaaatgtggtacatatacacaatagaatactcttcggccttaaacaagtaagaaatgttgtcatttgtgacaacatggatgaagctagatgacattatgctaagtgaaataagccaggcacctaaaggcaaatactgcatgatctcacatctatgtggaatctaaaaaagtcaaactcatagatgtagggagtaaaacrgtggttaccaggggctgaaagatggcagggggtagatagaaaaagggkagatattggtcaaaatgtacaaagyttcagttagacaaaaaaatcagttctggtcatctattgcatagcatggcgactatagttcataataatgtgtatttctaaattcctcaaaatagtagattttctctaccattttgttctcaccacaaagaagggatacgtatgcgagatgatagatatgttaattagcctgatttgatcatyccataatgtatacatgtattgagacatcattgtaatccacaaatatacacaattattttttgtaaattaaaaataaaaattaaaaaaacwgaagaactcgacttgaccaaataacatgttatcactccttaaatcaggagtgcattaacatcccttaacatcagtttggggtgcaataacaaaatacaaaataccacagactgaatggcttaaataatagatatgaagtttcatcaagaacccatattatcagaaattcacatttctgtcaccacctaaactttgattgatgacaacatagagaagagaggacccatgctcactctacatctattggatgtgacgcaaacgtaggcaaagtgcataaggacacctggctcacctccttctcttgtgtaaagaatccttcagtttttcccttaattttgtgagataatttcaatggaatcaaattttaaggcctaaaaatgctatagtgactattcaatagcaatcactaattggttcaagcctgccagtatggccttagtaggaaactgtcacacaataaacctcaggtgggccagactgggctcataggcagctttctgtactccccctgcccatgatgtagaaatataactgccatcactttccaataatcccatgcgagtaagacaagagggctctggaaataaatgtctcctcaatcattacaatctcactaccttgggaacaatttcagctctcttcattggagagacaaattttacttcactaaggtggaattcaaaacaaagtgaggttcttggtattttgagcaggatggttcagaaagttgatggcgacagaaacattcatgacatctccacttaggaagcactttctacataccaggtattgcactgttttatatgcattagcttatttaatcctcacagcaacgcatgaagaagatgaagaaatccagagtctactctctaaatatttaggcccagagtttgcaggaaggaaatagtagggtattctaataggggaaaagaaggacttttagcagaaaagcccctgaacctggagtaaacatggcagacaaggtaaagattgtttgccatgaaggaaaacacagacatctaggttagataagcaagaaggattggtcaactaaagatcctaaatgcccacattgtaaggcaaaattggacggcacaaagcctcaactttttcattgactatgacagcactcatctcagataggaggtattttaaaattaggctccaaaatttaaatgtgcacaaagacaaaacatcgttgttttgataaaaagtgacagtcgcattgtcatgatgatctgaagcttcttctatactgtagcatcggagctgccaattaacatttaatcattctgtttgtagagtcgtgaaacagaaagactgatacctatgtagcaacccatttgtaccttaaagatgagaaattcatagatttaaacccaacactgtcacacattattccagtggattactattaagttctaaattggaccaattaaggatattttctacctgattaaaattcatcatgaatttgaataacaacaggaaatatttacagtgattaagtatgctttgccagaaatcccttctcatattacttagtatcaagatataacatatgtgcattcacaataaaatcaagctctaacattgactctygagttagaaaaaaagagagagagcaaacatgaaattgaagaatggttagaattgaaaattcagccatgcagaaaggcccagacaccaaacaaacaagaagatcccatctattggtgttaatgcggttactggctcacaaacccactcagaatgcagaattgaygggaaacagctaagaaaataggatatttcttttggaaatgaaagaaggtcagaattacgctgctactaattttagacagcaattcagtaaatttaagtctcatattttagcctggagtagaattatttctactggagccagttttcaacattgttttaggtcatgtttgtcctggcctgccctgtttgtatgggagatgagcaacatgtgattcacgactactcataattaaggtacagaaatttagagtgctttacttattgaatgtcaataagaatgaactcaaggttatcccaatcataaagtccctctcatttgctcatatttcagttatggagagggaatgacagaagtggagttagattataggaattaattacacaaaacctgctgcctttcttatctcttctgcagccatattatagctaatctgagcattcccagggaattaatgcatcatgtgaattatgacacaaaaatgactaagaatagtgggtctaaagcagtctcaaaccaggatgaattatcacttcttcctcctccttccctcmttcacaatgtcccatactcccacatgtccttccataactgtagcagtttttcttttttccaccatcctcattgtctgtccctcacttctactgttcaagatagaggatatatttaaccaactaccttatcatttgaaatgaaaaatagtgggctagaccatctgattatttcaattttatatatcaaggtcaatagctcctttttagttattgactatgtacacactcaccactataagtgctactaggtgctatggagaatgggggaaaaagcttaaaatgttagaagacatagttttttgtaagctaccacatatattttgtgggaaatatagaatttagtaagcagggagagtttggtaatgttgccatacatcccagtttgcctgggacagaatcagttacttgtatattagttatctaatagcagtatctctcrctttcagcagtgactcagtttggatgaaaaatatatgaccactctacacagtggtgaaggttacrtctcttggattaaaatattggctccagttcctcttggccagataaccctggacatgttccttaacctctcaaaccttcagtttccttgtctgcaaagcagggagaacaatagcatttagttgctactggaattgtttgtaaggattaaataaattaatgcatataaagcatttagaaaagtacctagcatatagccactgccataattattattatcatttaggacagagattaggtatcatctaatctaagaaaactcctgaaatctgtcctcaacccaaacaaagacctccacactaggtcaggtcttccactgaattcctgtagcaacacacagacagtcacagacacacacagacacacagacacacacacacacatacctctacatatcaagcaataatcaagtcaattcatacttatgaaatgccacccaccatatgtcaggcacaatgccaagcactgtccccatctgttcatgtgcttgcctcttcttgaagacagagattgtgtcctatcatttcattcagtacctagtttgctctcaaataactgttgaactaaactgaaggcaagaaagaaggctatcactgcctttccctggagtagtgaggraagtcttcatgaaaaaggtgggtattaaagtttaagagtgttctgataggaaagaaaaagtatcattctccctgtggcaaagtacataagctgttaaattagaaaaaaagaatgtgaaagtgcttggtaaatctgatagccctgtgcattcctaattataagcaaagcagagaactaggagttagattgatattgccagaaaatgtgccaragtctataatttgcctcttccctcactggcctctacagtcaagcttgaaatttaccccctttgcctcctaccgtcacgtaactcttttaaatgaggatgcctggagcagtgtgtgtctcataccaaagacctgttctgtacatatatttctgagaagttgtaggtaaatcaaatttttgcaagtccarttgaaattgaaatgcatagggagagctagctatttagggatatcccatagtgagatctattgtaaagtgaattcaatatattaatagagcaactcaaactcttttattcctattgtttctaaacctaggttttcagagataaagttctataaatcaaagtagcatcacacacatacacacacacacacacacagacagacacacacctgccaaagagtgaagtcttacaagatccatgaaaggcctacatttaaaaaatacccattttcctccacttctttacccaaaatatctaggttaagctaaactgcatttaaaaaggaattatataagagttacatctgaaaatgtgtgcaaaatgtctcattcctgaaaatgcagatagagtatttggcatagtgtgtggcatacggtaaatactccataaatggtcttatttgtagaagtatcattgttgaatacagagactagagaaaaaaaaataattaaaaatagcccatgggattaatccctcggagaaggtagtggtatacactcaggactagatatgtaaacaaaactattttggggataatacctggaataatggctattttctcaaagtcagcaaaggggaatagagactgatttaaagctgggatcaactgcatgatcacggagaaggagcatgctatcaacggaaattcagccctgcaaagtcacatttcactagaccttgggcctggctggttaaatgtggstttaaacccaaccaacccacaggctgatacacgaagccagaaatcatagagaaaaccactctgtgctaacaagcttgagctaaaacgtagcaattccttggtctactgatgtggttttgtcctgcagaattactagtagttagaatctaaagaaggagactagaattttagatttggaaggagctgaggagacatataggccagatgagmtgttaatgaccctgtggcgttcaataggtagatccaaaaaataccctttgyggtgcagtttttaaaacgcccttcttggattttcacagtagctraatgttagagacaaatttkaaacacaattgtttgggcctttgaaaaccagataatcataagtacatttcatcaggttcaaagaaagttcagaaacatgaaaatgtaatttcaattgcaaaagtcataagaagaatactttattttcattacaataaaaacatcttactaagaaaagatcagtgcaaatgaaataataacaaagaattaagggcaactgatttaatttggttmaaaaatgggagaagagactaagggagaagcattagaaacccaaattcacaccctgcagccccagaagagcactgtagtattgaatttaatatagggaatttccattctggaccctaagaaatatcttacagtaataaagtaggtttcttgaggacaaagtacaacagcatctatatcctaattcagaaaygcaaaggagcccaagcttcagtggctttagattataagacaaaagttagaataagaaaactagttgtctgagagttgtaagcagcttatataaatatccgaaaatagagaaaatccatatggtattaaaatgctaataacatagaaacactcgcagtttgttaagtgaaacagcaatttacaaaagggtctatcayagtttcgttaaaaaatatacagacatgtttattttgtgcatagacaaggataaaagtatatgtaccaaaatgttaacaattattatttcttgtcgtgagattacagatgaattttgctctcttcttcttctttgtgtgtgtatgtgtgtgtgtataattatatatagtacacaagttccacagtaaactcattttttgagataagaaaaaatatctaaaacaatggggctaaaatgggyaccctttgttaggagttctacaggaactgatatcaaagtttagtgaaatcattatgtcagcagatgagaaaatgtagaaaacatgatgtttcagaatattaggaaaacatctagaggacagccgtaaggcaaaggctggatatgtacgtattcactgatgaaaaacaacctaacctaaatcttcattaataggctgtacctgcatgtaggatggtctctaaaaacagttatgtgcccaaakcttgccatgtttatcacagaatcaataatttatatgaagatacctattttataatgatcagatctacaaatgatagataacatgttagtaaaaagaaaaagggtaagttaatagaacataaatcaagaaggattatagcaagccaagaaaatggagtcaagtgccatgaaatgcagtcatatatagataaatgtaaattttttcacttgttttataaaaacaattgtacatataytttatatagagtgacagatatatatatatwtaatacagtatatatataaactacagtatatatataatmcagtatatatatatactggaaagacacatttgtatgtttacatggatggatagacagctactgacactcattcaacaaagtatttgtaaggaagcttacaaaagtgcatatagttttttaaaaggcaatattatatattaggtaaatgtgacagaaaacatgcttaaatttttttggaggaaaaatagcaatatattgtggtataaaactgggatacataaagtggatcagcctttactcctggttggattttaaattatgtcttcaagatgtgtgtgtccctgtatctctgtcttgtctctacttgccactgcttctagttgtacatcagccaaattctctcatcacagcctcatagacaagcaatataagagagagctacatgaaagaaaatatgcagtccaaggcccatacccttgtagttatgaaccaagaggacaagaaattttcccaacacgttcgacagatgagttttgggattattctaattcacctgcttagatcacatcccagtcatgtattgaaggagtcatggaacaaagtggacctgaagggtggttttgcctccacatccttttgttcaaagaacttggactccaagaggctgggttcaggctcagggatgtggtctgtgctgatgacaaccctgtccacatctgagtgctcaaaagcctgaggagcccgcattgcactgtccctgtcccctacaaagagagggctcttggtccagccgcacttcctcctgccataaaaggcatcggtggacgacctggggacatctgccagtgctgggtgacatggcaactcttcctggggggactctggggtgcaagcacttgcatcgggctcagcaggctgattctgtcccactctccgggtgcccggcaggagggactccaccgccacctcaatgcctaggagtcagmctggtcacatgactacttctgtgccaaaagatgaccaaggaattatgatttacagtcccattaggtacatatggagtaaggaaggggtttgcctaaacatactaagagaaagaatatgggaaagaatgcatgcaaaataaagctccaattagcatagcycatcatagaatagaaaatcacaaatcaaatcttatattttaatgttgaaaggaaaatatgggtaggagaatagtcaagccaacagtaacatcagcaacagaaatgtataccctggagttctgcataggtattacatgtgaaymaaaaaatagatctaagcttcmtaagagtcaaatgaaaatgagaaacatggttaccagatacacaacattataaaataagaacaygctgttctttctagcaagttccagcttttctttattttatactgaaacatgggaaatacttctcccttaggtctttagaataaaacaggagagtaccctgtgtggaaccctaaacaacatccatccttaaacatatacctacaaacaaatttcacttggttgttccctcttacatccctccgtgttggtcaccatgatccctataaacattactccagttatctggcaagattaaaaggtataatttacagtatttggaatgatgggtagactgaatatccttcaggcaatcccgggtttctgataagaattatgcaatagtagcatcaagcttttatctctccttagggttcagacwgcagatacactgcatcaccaatacagaattgagtcatatgcactgacaaataattaggaagaaggtagcaataaagtcctctcgtaggactgaagaagtttaaccaatgcaaatacctaaatggccacctgatctcacaaaatcttcttcagagaaacaattctgtgcctgttacaacagagaaagatgaggcattgaaaatatgcataattttacaagttgatggccatgcagcttaacaacagcacctgggggaaaaaaaacttatgagctttaactggccataggtttaatctgaatcagtaactcagagattttaggaggattaagaaaattgcaatctctaaaataaggcagggaaggtctcgcccaatgaacagtgaatgatattgtgtgtatcactgaacacaactgaaaacagacaaactggaccatgttaatggatgagtcactaggatggtgaggaagtattagataaaatcttgttagataaaaaatagatgaagaagttagggaaaggtaaagagaagaggtgacacagaaagggaggaggatgtgatagctgacttcaacaacttgaaagaatattatacataaattggattccaaggaatacacctagcatcagcatatctgaattacagtgagatgatattttttaactcaataaaaaaaaaggaagagcattctaatagtcacggatacccaaaggtggaatggaatgcctggaggagatagtaaattccatgtcacctgggttgttaaggcagaaattggatgcccatttatcagagatgaccttttaatttccttccaacacagtgatttttatggctttaggagaccattcacttattactttacaaatacttaaacaccaattgtgttctagatattttcttatatagtgagaatcgagtatggaataagattgacatgatctccccccaccattcataaagcttaaaatccttgagaaaataataaataaatgtgcaagtcaatgagcaaactattacagattctggtgagtactctaaaggaaataaatagaacaatgaaaagtacctaaggtgagaaaaagggtgcatggaggcatatttggttttctgtaggtaagtggtcaaaagaagagcacattaaaatggtgattttaagctgtgatctaaagaaaaagaaagagctagccatgtgaaacaatggggaaagagacttccaagcagagggaatagcttgtgcaaatgtggcctgaatcaagaaagagctcagtgtgtccaaggaatgaaaagaagaccaacataactggagaatactgaacaagggaggagactcatactccagaaggtcggtggcaggaagagacacctggtattcttgagtgcaactataataaggtattcgtcaattgccaacctcatgactgatcctcatgattaggaggattaagagaactgcagtatctaaagtaaggcaggaaaagttccctatttcttaacatatctcaaatttttcatccttgatatttgggaagaactgacctaatctccatcagagtgagccttaactgcttaagccaaccagggctcaagccaaccacaatgttccatcccattgtctaaagttattgccaaaaaaaacagtacccaagtcaggtctatataggccaagaacacaatcctggcactgtggtttgaattgttccaggagaagagtctctcttgtctcttaggacctaaaactgaaaagtatgtggcttctcacagacattctcagaccacaaatggaggttatgcttgagactggggcaacactatataatgaaagccaatacatgtagaaaaataatgctggtcctgataatattgattcactaggtcaatccgctctgaaaatgaaccttatgtatgtatattatgtctggacttttcagttgcttgagtcaatgtttttcctccattgtttaaggaacttgagttctttcctgttactcagtatataaagaaccctaataaatatacagtgtagggtgtttcaactttatcctacgaacaaagaaagctagtaaggacttttaagcttgggaagaagttatctcattggcatttttgttttttgaattactctaaatgtcattgtcttttaataacaaaaggccatgtttttacatttagtgagtggtcaactagcattttatttgtttcttcatctgtacatttattatttgttttagattgtcrcatgctcttttttcctttcattttctttcatttgatcaaaagtttcggccttagcctctacatggattatggtactatttatagaaataggaaatactagagaaaagacagattttttgtgcgcttctaagtctcttttttattattttattttttatttttgtgggtacattgtaggtgtatatatttatgggttacatgagataattttggcatagacaagcaatgagtactaatcacatcagggtaaatagggtatccatcatgacaagcatttattctttgtgtttcaaacaatccaattacgctgttttagtcatttttaacttttaaaatttagtcattttaaattaatwtgtaaatgtgattaatttttaaaagtgatttttaaatgtaaatgtaaattattttttactgtagtcactctgttgtgtaagcaaatactacatcttatttattctttccaactacttttttgtacccattaatataaccatccccttttctcacccccactcctccaactacccttcccagcccctggtatccatccttctactccctatcttcatgggttcacttgttttaatgtttagcttccacaaattagtgagaatatgtcatgtttgtctttctgtgcctgacttatttcacttaacataatgacctccagctccatccatgttgttgcaaataacaagatcttgggccaggcacggtggcttacccctgtaatcccagcactttgggaggtcaaggcaggtggcttacttgaggtcaggaattcaacactagcctgaccaatatggtgaaaccccgtctctactaaaattacaaaaatcagccgggtgttgtagtgggcacccagctactcgggaggctgaggcaggagaattgcttgaacccaggaggcagaggttgcagtgacccaagatcatgccattgcattccagcctgggtgacagagtgagactcaatctcaaaaaaaaaaaaaaaaaaaaaagatctcattgttttttatggctaaagagtactccagagtgtatttgttccacattttctttatccatttgtttgttgacagacacttaggtatcttccaaatcttggctattgtgaatagtgtagcaataaacatgagagtgaagatatcgcttcaatacagcgacttcctttctttcaggtatacacctaggggtgggattgcagaatcatatagtaactctgtttttagtttttttgaggaacctccaaactgagaacagagagatttgagggcaagtcaagagttcatwtattgaaaaggtaactccggaatgctcatttgatattcaggcagaatkgtcaagtkgcctcttagattcagaaggtkggatcctaagggggagttgaagactagatacaaaaattctgaagtcatcagcatgtagagtatttaaaatttgggcctacctgagatgactagggtatagacgtttctactattaatccaaggaatggacaaattccaggccatagacctcagcagtttctaaggaagaacagaaaaccataggacataccataggcagtcaaagtgaagatcactrtagagaagtgtcagcttcctctgcgaatggcaccatgaggtcatgagctgggaaatactgtaaaactttctggattcaacctttcaagattaataacaataactcaacatgaataattagacgtgttttatctacaaaatgctgtcaatcaaaacaaattgatggtaaatcatttaaaataaataatcaagtctctatgagaaggaatgtcagtgagaaagtaattgaattgaaaggaaataaaaagaaaataaagaagatactggtgaagaatatttattaaaaatgttatcatctagagaaaaagcaggcaattaaatgtaggtatttacatttaattactacayctcccatgaagtggcttcataaaggaaacagagtcaaagtctttaaaatgaggcacaaatcagaggatttttgttctccttcaatcttcttgacaagaatgtaacacaggagaagactctgggtgctctcaagaagaattgtactttccttgaccttactctatttttaaaagccaaaacaactaatgcattttataacactatgatttctttcagaagtgggacaagtgaaactctttccataatagattaaaaatgtagtatctagtgtgtataacactaaaggcaggagaaaacaggacttagccaataaatgtcactttggctaattaggtcaataaaggaacaaacaccccacagttatctaggtaccttaagtggacatttaaagtctaagattagcttgttgagggtgaatagaaatgtttgtacagaattgagactcacacagttgtcctggtattccactaacttcttctaacttagccatcttatcctcttaaatttcacaaggtaattaaagaactttgtttctcaagcttcctaccaagtcaagagggtgcagagaaaacaatgaaaaaacccatatataaaaacaatgcacagtttacatctatttgaaatcagctactgtratagtctgccagagctgccaaaccaaacaccacagacttaaacaacagaaacttatattcccacagttctggaggctagacatttaagatcaaggtgcgcacaggtttggtttctgaggcttctctccttgactcgcacactgctgccttctctctgttcttatatgacttttttctctatgggcatacagtcctggtgtatcttccttttcttataaacacaccaatcttattgcattagggcctcacccttatgaatgttagagactgcatctttacccacccccctcaaaattcatatattgaagccttaacccccaatgtgatggtatttggtagcagggcctttgggagacaactaggtttagatgaggtcgagaagctgaaactttcatgatgaaattaatgcccttataagaagagaaagagacaccagaacttctaacatctgaggacacagaaaaaggcaggccaagaagagaaccctcatcagaaaccaaatctgctggcagctttatcatggacttcctgacccccagaactatgagaaataaatttgtgttaagtcacccagtatacagtattttattatgacagcccaagatgatgaatacaacttcatttaaccttaagtacctccctaaatactgtatctccaaatatagttacattggggattagggattcaaactatggctttagggtaacacaattccacccactatagccaccaaaagcgtagctgccaaacccatcttaactaccattgatttacttctgactatcatcatccttcctccagactattctaaaagctttttaaaacaatctgtctctagatcatcttcccgccatgctccacccattctcaacaagactgtaaaagcattgtgttttaaactaaattctgaaggatgagatcctagcacagtggtaaaccccattatgacctgagtctgcctgtcttcccatcttcatttcctgccactcccttttgacagctcatactcctctgacaccaatttacttgaaattaccctaacattccccatgtgaacttgtgtttgaatgaccagtgtttccaaatttctcaagcacctgctctttgttcaaaactcaggcakcggtgtcattaacttagtaaagtctcacagtctcatagacaggtttaatccctcctttctcagtgcaatcatttaaaattataccaatttttattattatactttcacagtattacatgtctcccttcctaactataaacatcttgggtatataccagctgtgatttaagtctttctgcatttcatgtttcaattaaattgttgtattgaattatttaaaacatataattacacaaagagtgtatacygaacaaattcataaactagtgattgttgtccatagtatgcaaaaggtggcaaatacataaacagtctccggctctgtttattctctgtatgagacaccacccagccccatcaccgccaataattctgtgagtaatatctaacaggttgaagatcttgaaggtcacactctaccaatttcatttagaaactaattccaagccctatgcattcttgggggcatagcttcatccttttcttctatgacataggaactattcagaatcttaaaacctggtcatatctggaacaagataaatgaacacatacactataccactctaagacaaacaaactgaccagtaaaatccattttgcagggatgtatcttcaartacgttaatctagttaactaatacagtagatttcctgacctcttgtttctcccacttatactgagaggcactcaatcccaatccttgctccacttagctgcatcctctctccacccaacttacattacagtaaagtcaaacaacaacaaaacaaagaaaaatgctgagttaaatgtcaacataaagattatgttcccaggccgggcgcagtggctcacgcctgtaatcccagcactttgagaggccaaggagggcagatcatgaggtcaggggattgagaccatcctggtcaacatggtgaaatcccgtctctactaaacatacaaaacttagctgggcctggtggctcatgcctatagttctagctactcaggaggctgaggcaggaaaatcacttgaacctgggaggtggagggtgaagtgagctgagattgcaccactgcactccagcctgggcaacagagcaagactctgtctcaaaaaaaaaaaaaaaaaaaaaaaagattatgttcccagagaaaagattggagagggaacttttactgtactatccaatatggcagccattagccacatgtgaaattagtcatgtgaaatggggttaatccaaatttaagatgtgctataagtataaaatacataccagctttcagacttggtgaaaaaattatataatatctcaataattctatattaataaaaagttgaaatgatatttaggatatagtagattaaataaaatgtactattaaaattaattttaccttttcttactttaaaaaatttggttaataaaatttttaaattatacacacacatataattatatttggtcagtcctgtcttacagaacctgatgggacagaggaaagaagagatggcagcagttctatttttttatttattttttgagacagaatctcattctgtcacccaggctggaatgcagtggcatgatctcggctcactgaaacctcctcctcccaggctcaagcagttctcctgactcagcctcccgagtagctgggattaccggcgtgcgccactacacccagctaagttttgtatttttagtagagacaggttttgctatgttggccaggctagtcttgaactcctggcctcaaatgatctgcctgtctcagcctcccaaggtgctggtattatggacatgagccaccatgcccagctgatgatggcagttctaaatgacagagaaatgatgaccaaaagaaataaataatagcccagatgcaagggaagagattctttgatcacagagggtcagaaagcagagtggaaggtgctttgagatgagctcttcgtggtattgttcctgatactttttagtttatcttaaatatttctaaatgaatttttaaaatgttactaatactaataaatgtgtgtgtgtgtgtgtgtgtgtgtgtgtgtgtgtgtgtgtgkataaaggctagcaagaggttaaaaccatagttaaggtaacaagtccataagaactctacatgtttaaattaagtaagttatttaaaatcagaatgttaggactaaaaagacctatatcttaaagagattgcagtattacatgcagggagtaaaaaaaggtgaccttaccatttgtagctgagctaaaacagaatgtgaattaggtaacgaatactgtggaaatagtaatgtataagtttcctttgtttccatgaaacacattattagcctaggttcttttgccttgaaatagaatatccattgctcaaaacttgctaaaatattcaaaaataaattattttttatgaaagctccatttgtttcctttaaacaaaaggaaatttcaaatgttatgattacacacatgcagatataagcgccagttgtagaatatcagaaaaatacaaaatgctaatggattccagagtctaacatagctaggaaaatcttgtctcctttttactattatgcaggaacaaaagggcacacaatgaaattaaaacataccccacactgaacagggatttaaaataaaaactcctttctattctgaataattaacctagagaacaccatgtcggatggtatctttacaaatagtagacatttcaaacaatacccaggcattttgacaggttctaaaaaaaaatattagctaagaaaaatgtcttcaaatgatgaatagaaaatagttcccagaggaggacacctcggtgtttcccacatggcacaacgctgcagtttttgatactttaaattaccccctgaagctttcacttgtcctcaattttacaaaggcacagaggcagacctacatatgctctctttgtattctttgagtagataaatgtgcttatccttaataaaatccaaatgtggttttctctaaaaacagaaaagaaatgtggttgctctttgagttacatgcagattagctattgggacaagaggcgcctggggaaactgttaaaacctttaagaatcacgaacggacattctggttgttaggtcttgggacacatctggtcctgagagttggtcacagctaaatagaacagatgaagaaggtctgaatcctaaaactgaacatagtaggtggctcagctaagagggatatggaccctattacaagcaaggggagaacagatagtgggtggtgtgtttgacttttgtgtttcaaccggtcagccactacacattctcactttttgacatttatctcaagatttgttagcagtatrgccccactttgcagtgtagattccaaagagaacaaatatttcctctccctacacccagatagctagaacatggatatgtgacttcagcacacaaaatcagatgccttctgccaggatctttagctcttgggaagtggtatgaaggcattggtcaatcagacattatccgctgcaatagacatttgtatttgcaactttggtgacagatgctgatttcccagagttggcaaaatcagatgcacagtggcaagtattcaagtgcagcagcagcatcctaataagatcattcctaaggcaggatcttagatgtgcatttatttccttgttgcatacctcctatcatacctatatcaatatcctccaatacttctattttctgcttaaatttatcatgatcaggcatattaagctaaccccactggagaactgaggaggatgtatgatttaaagatccaagtaggcagcttcacagaatctggtcaacaagctcacggatccaagacctaggtccaagtctaagatctaagtcctatgattgactggttagaaaaaggctggagttcagttctagagaacatggaataattgataagttatcgatatggacactctggcagagaagcaaggacccaacagagctaagattgagttaggatcttggtctcaataataagaaagtcattagaactgaaacacgagatcaaaagcagatcggcagcattatgcatgctatattaaatagcagaaaaacaggccaatcattatgtgaccttagacaagtcaaacaacctctcaattcctcaaaaatactcctacaatatgtctgaattcagaaaacaaaggagataatatataaaaaactaagcttcttgaaaagagaaaaaaaataacagaaaggtaagattttattactctataataaataaccaaatatgaatttaataaaggcagctgaacaaaataaaactgcttgcccactcagtcctacttaaaggaagtccatacttagagaaattttgaatgaaatgtagatatgatatgaaggctgaaaaattatttcccaaatacagacaaaaactatgctacagtaggatgtgttcccaagttggagactctaagacttcacaaggtaagatgaagaatcaaagggtaaagatatagaatgtaaaagtggaaagatcacatctaacattcaaatgattatgtatttatgtaaagtaaaattggaaaacaataatagataacactgtcatatacaatagcaaggtaccattttaagtacgaaattaatcctctcatttaagcctcacaacttgtattacggttctctagagagacaggactaataggatagaggtatatatgaaagggagtttattgaggagtattgactcacatgatcacaaagcgaagtcccacaacagaccgtctgcaagctgaggagcaaggaagccagtccgagccccaaaatctcaaaagtagggaagtgaagccttcagtctctggccaaaggcccaagaggccctggctaaacaatagtggaagtccaagagtccaaggctgaagaactagaagtctgatgttcaagggctggaagcatctagtgtgggagaaagttggaggccagaagacttagcgagtctagtccttccacgttcctctgcctgcttttatcctagccacactggcagatgattagatggtgcccacccagactgaagatgggtctgcatctcccagtccactgactcaaatgctaatttcctttggaaacaccctcacagacacactcaggaacaatactttgcatccttcaatccaatgaagctgatacttaatattaaccattatacaactcatataagctatatgcaatctttacaactatgctgtatggttagactagtgttatactcattttacagataagaaaactgaggcatagagaggttaaactaatcaccaaaggcaagatgttgcatggaagatctataccctggcagcctgactccagagtttatgttctaaactactatgtcatattgcttctcaaagaagaaaaaatattattgaagagatgccagaaataggaattcaaaattgaacaactaacatatataatcaatttaagactgcagttttcatttgaggcagagacaatttgctttctcatggctcagcaagaactgctataccaagaattataaagataagtgcgtgtactatgtcaatcatcagggtgtaattctcaaaaatgcatagaagctgatggtacacattttaattcattcaacaaatattgaatacttgctttcatacacaatgcttgttgtaatatgcttgtataattttccattacaaataaatatatctaatactacatgttctatttatgtgaggaagaaaatgaaatactgtagagataatcagattgagtgagtcagcaaggacaagcataatatcattctaaggcaaatatttaaaaatacatggggatgtttcatttctttaatttggtgtgtrtatatatatatgtacacacacacacacacacacayatatatatatatacatacacattcatatatatgtacgtgtatatatatacacatatttttgagtcagactctcgctctgttgcccaggctaaaattgcagtggcacaatctcagctcactgcagcctccgcctcctgggttamagcgattctcatgcctcagcctcccaagtagctgagattacaggtgcctgccaccacatctggctaattttttttttttttgtatttttagtagaggcggggttccaccatgttgtccaggctagtctcaaactccttgcctcaagtgatccacttgcctcagcctctcaaagtgctggggttacaggcatgagccaccgcatctggcctaatttggtatatattaatagctgctctaatgattttacccttaagtctcagcattatactaaacgatttcaatgtccctatgaatgacctgctgactaatgtactttcaaagttttgacctcgacaaaaataacaatcttcaccttctttctgcttcagtgtcatcctctcataatcacctgctgggtactgccatctctttgaagtaatccacatcaggaatcttcaatccagtaccctggtccctgactacaattttctccccttccaggtgtctacctcccttactcaaactacacctgctcttcaaactacagactcctctctcatctcctttttccttgtttctgactatttagcctagatgagctccactgtccatcacttaaactcttgtctccctaaccgacacacctccctttgcccagccaaagcccagttctgttgttaaccttctctactctggcagaggcaactgtgccctgctggagcaaaatcatttcctcaggcagactggttttgcttaaaacgtatgatttccaattccatctggatcttcaaaacttcaaattaatctttaaaaaaaaatttccttccttctaggatgctgtgttttctgcagcttcagtcacatgttcactctctttaaatcttcatcctccttcatttttaacagatgccctcaggttccactgggacccattaataagtggctagtagcataaacaccatcagcatcctgccccctgtcccaactacaaacttccatctcattgggatacccatcatctcctacttcattatgactcctagggtgaaaaagtcctgttttattcaagacctgtgctcgccatgtgggctaagtaatctatatgctattcaagtctttccttggtcttcagcctctgcgctgttaataaaatcttgtcttcacctaaaggtattctcaagtctctccctttccaatcagtcacaacctctcctccctctccccaactccatatccttcccttgctaccatctattacctcatttccttccacccaagcattttgaaaaattgacttacacttgctatcttcacttcctaatcactcattcaccatttaatataaagccctctgacttctgtcccctctccccagcattttcttggcaagggtcacaatgcactcctaaataccaaaccaagggggrttttacaacactgttacttgatctctcagttctgttctctccctgtctctgaaaacttgtctccttcatttcaagaaaataatgtttctgttgtttttcctacctcttaactacttctcagtttccttggctacatacttttccttaaacactgatttacctagagttctattctctcttctcttcaaaggtaawttcatatatttccaaatttataattgacactcttatcttcacaacatccaaatatacatctctacactcagtgcctcagagtttcagacacrtccatttacccaatccttagacatttccattagggtttctaaagtttggacccaatctgtccaaactgaacaaatgacttgtaccactcccatgaccagattctcctttgcttagaaacctcttggttagtaataccatcatccacccagccccctgagtcaaagcctgaaaatgattttctgatgattttcacacatatgctcccaaatccaacaatctctaggaactgcatcctctaccttatatcaaatctaccctctctttcttcactgtcttcagaccactgtctcttaccagaagtaatgcattcacctttcatgtgagttttctgcgcctaacctcacccacaaaaaaccctagaccaacttgcttacaacccagtcctataaattgtataccacacaatacaagcttgtttatgccatggcctatgttaactcgtattatctatgctcatcacgtccttctttcacattttgtgtactaacaacatagaattctacatatttttcccaaattaatttttaaaggcccacatgataaattccatyttcactgcttgggatacccatctcatgattgcctggtttatttgctgtcatcctacataatccagcttaatatctcctccttccaggaaggcttgctttgttccttcttcctttctacattaatctctcctccttcrtgactatttaagaaacttgtctatttttatatttttgtccttatcaccttaaaagagaatctataatttaacatgtatacatcacccattggacttctgctccttaagggaaaaagactgtggtttattcatctctggagtctcataacttagcataaagtctggcagataataatcaattaataaatgtttaatggattgaatggaattggatttcacagttcagttttgcttttcagagatagttgcatatatagatttcccctgccatgtcaagtcccagaccaatcatttttcagcccagatttaatatcaccatcctccagggtaagaaaatattctctgagatgtgtgtatttacttttgatcatcatatatttcagtagatctataaatggggtcttgaaaataatctatcccactgccaccattaagagaggtagcaattcattatacaaacttcacaaaacatcaacattttatccataactggtctcagctcaatcaaacctttcagcacaagccacagagccaccaggcctgtttcttgggtagtctaatcccattttcacatctcttttcatcttgtccattaaatgggaagagagaaataaaacatgagtttttgccacacatgggctctttmacgctgcccagtgtatggttcttaattttagtggattttaaaaacctcaattaatcaatggctgtctccaggggttgggaataggattcctcatgggtaagaacacgttctccacttctaaagagaaataactagcacagtgtggtagaaagggcatgacttggaagtcagacaatcctagatatccttcttattagtgtataatctttggtaactgacattaacctctgagcttcaatttccctcactggtaaaaggagaataacatctacctcactgacttcttataagtgtgataaatacacttgatcttagccaaaaggccaagagtgatagtaagtgtgataaataaagagatataatgtattaaattatttagcagagtactgggaactataagtgcccttcctttcccttagttccatttccccaacgccctcttgatgatgagctccatcacggcaaacattctgtgtctgctttattcatgctgcatccccagtgcctagtacagtgcctgttacacagcaagtgcttaataaataatttatttaatgaaataaatgatttttcttacaactctgttctacacgcccccataaaagaaatcttagtttactcccagccacactgatgtcatctcacatacacaaatacacactcacacatgcacgcacatacacaccaytaactcagacacaaggccccaaactgagcttctcatttctgaaagcctgtctgcccacctcagataggcttaatgaatggtccatctggttaaatcaaaaatgtctatttaacacactagcaattttatgatttataaaatgcctgatgaaaacacaattgcattttaaatgcctagactaaaatccatctactctaagaacgttaagagggacataaaaagacccaaccagctatatgccatctgcataaacaggaaggaaacatcttatgaattccagaagaataattttaaaaggttattcttaggtgctaagaggtgatgtaaatgaaaattatagaaaacaaatctagaataaaatcagactcttctgtgagaaagtcaatgtaaatgcagaaaaacaggaaaacagttgagatcaaatttctgaaatcattcaggatataattaggaaaaagcctctggaaatagctcaaaagaaaagaatacaaagatgaagtatctccatcctgaaatatttcattttcatggtcattcttagaaagaaaaaaaatccataattttctatatgtatatttttgtttaattaaaaagaaactcatatgagggaattctcattttaaagaccatctctacaattgtcaattgcagagacaagagctgagtatgataaaatgaaaatgctaataacttgacatctaacagtctgctgtattatcaggattcatcaaggtcaacattattataggcctcagctttgccctttccttccgcccaatccccaatacccgcaaaacctttttgacaagaaaacaaatgcagactgaatttttcaaaaacatacttgaaatgatgtcttttggtcaaaattgaagctgtctttgctggttcaacatttagtatgcacctcattttaagcaatggaggtggaactttaatcaatgtcaagcaaaaacatatcacctgtcaaaatactacgctgggaaaggttggcagacatgaaggtggcgaggagagaattgggatcaggaaatagattaaaagtacacacttttcacactcaatcacactgatgctaccattgttggacaacaaatgctttgcacaaacaaaaagccatcagcccctccaccccctgcattccattgctggaaaacataccgaactgtgacatggtatagcaggacattagaagttgatttgtccatgtccttcaggagtagcctaaacactctgatattccaggactattaaatctagtacttcaccttcagggaggattagtgtccatacttacctctatattgtcagccagtgttacagtcaagatttgaagaggcaaaagacctctgtttggaacaaagaaatcagacaggccaaatggatggagatagatgtttcaataaagtgatacctccagacatatcttactttgtgtaatacttcaacatggagtgaatgcttggggctattcatttgacttttgccaaaacattgtgcattagtaatagtaatggtaattctaaatcaactgatacagaaagcacagcttagaaaggttaagcaaattcatcaagatttcatctttaaccaataacttttattgagagcttactctatgctaggaactgtgctaagatattttatatgcattatcccatttaatctttaaagcaaacacatgaggcagaaacactaatggcattccaaatttcagatgtggaaactgaggctcacagaagagaagtaatttaaccaaggtcattacataggatgaatggctgaagtactccacaagatacacttcaaatttacacacgtcaccacgcgcaccatcaacacgcagcatgcacacacaaatacacacatcattcataccacacacactccatacatacwtgcacacacctatttgtaagttgcgatcagaagtccctgggatgccaccttcatgctgctttatgaagggtaagtctttgtaatttggtaaaggatcctggttttcaaaccaaagacatgcagaaatgatgtagggaaaataaacaaacaacaaatgaagcagcaatgtatgttcctctagaccagtgaaacagagcctagctacacagctaggccacagggtattcaacctgggtgctctgggaaaaatacctgatatggtttggcactgtgtccctacccaaatctcacatcaaattatgatcttcagtcttgaagaaggggccttttgggaggtgactggatcacaggggtggatttccccttgctgatttcatgacagtgagtgagttctcatgagatctggttgtttaaaagtgggtagcacttcctcctttgccctctctctctccagcttcaccatgtgaagaaggtgcttatttcccctttgcccttccaccatgattataagtctcctgaggactcccccaccatgcttcctgtacagcctgtggaaatgtgagttgattaaacctcctttcttcataaattacccagtatcaggtagttctttatagcagtgtgagaatgaactaatacaatacctaattctgggtctcactccagacaaattaaattagaatatttgggtgaaagagtagtgtgctgtccctcagcaattaaaaaattgcccaccccagatgattcaaatgtacagacaagattgagaacaatgccatctgctttccaggcatacttttatctcagtgtcctattgcccaggccatgaacggcattaaccaaccagtgcggcaaaagtaacagtcagggctcacccaccyccactgccttcacattaccagtccctcatgcccttcttatggctcttagcaattgaagaggattaatgagaacttggccaagggacactctgcatggtggcctccaagcacagctaaagccataaaactgaagcaaacaaggaatccattacagtcaacaggtcagagcctgaagcccctctgcccccctgccagtctgtgaagcccttttcttagcagcactttgagtaatatacggtggatgctttacaactgtgcaaccatagatagaagamagcaaggcaagaccagatcttgactgtgcagacccacatgtgctgaccacaagctttcctcctttcagttcaaggaactcctgtgacatctctgtagcctaagcatccaccattaggcctcactatgctccagtgaaactcattcccactgccacaggacttttgcaattgttgttccctctgcttgaaatactctcctcctcggtttttgcacggctgtttctttccagttctccagatatcaactcaaaagccaccgccttcaaagagccttccctaatcaactaatctaatatggtccctccctaaccctagttatttacagcttcactctgttttgtttccgtcatagtgtttgtcattcactggtactttttaaattattatggttattattcctacctgaaattgccatacgtgcagtaaacaagmaaacctgtttactttctcttttcactacctagaatataagctccatgagaacggaaattctgtgcatcccatttatttacgcctattgggccagtgacagcacctggtatacagcacgtattcagtaaatgtttgactacatgaaaaaacaaatgaagactgtttgatatggtttggctgtgtccccatccaaatctcaccttgaattacaataatccccatgtgtcaacggtggggtcaggtggagataaatgaatcatgtggggcaggggaggggattcccccatactcttccatggtagtgaataagtctcacgacatctgatggtttcataaatgggagyttcccttcacaagcactctcttgcctgctaccatgtaaaatgtgactttgctcctcctttgccttccaccatgattgtgaggcctccccagccacatggaactgtgagccaattaaacatctttcctttataaataacccagtcttgggtatgtctttattagcagcatgagcccagactaatacaccattccttcagattttaggaaatccaataaaggacttataaacctacatgatacagttagaggggatgtatctaatactaagatatagatttaagactcctcagcagccaggccatcaacagagcagagtcaaactcacatccatgggatggcaaagcctgggcttttaacaataatatggttatattttgcggtctcccttcataaataaaactaaagttaaagaccagaactgcaacaaaaaacctataattttccctgatactcttttctgcaggctgtgagtgatgttagaaagagacagagtagggaagaaaaaaccctagcaaaacccaatagataaacaaagtatcaatgagcccttagttttccatatgcagaatttatgttccaggaccacaatgtggcccctaaggtaatgtaatataackaattatgttatcactgggcctatcatgcatacaaattttaraaagaaaacctttctgctacaactcagaaactcaaggtcttctattttggcaatttctcggcagaaagaaaatatctcaagtaaaattctccctggtccccaatccaatttactggctccttacagatgaatcagtgtgaaaggtgtgcaggggggttgtttcctctaattaactttcagtgggtgaaaagtacactaatagcccacagggagaagttgakcccacgctgttcatcagcaactcaaggaactgattgaagtaaggctcataaaccctgttaagtgatatccaccaaaagcagaggcagcttgacttcaaaaataaaaccatcagtctcgtcctttccttccatgaatctatcacctgaaggaacacatgcttttcctgataaaaccctgctattcccattcttctgactgaaataccagtctctcccagtatccaccctccccccggcgacctctcatgatctattaaaatcactgcagggccaggtgaggtwgtgcaatttctgagaagccttcttcattcatatgcacaaccacaaccaaatattgaatatgccttggttctataatgggttttggcatttgatcaagagctatctggaattattttttctgaatggtttatgtgttcatatctttatccctttacaacagtatttcaggttctttgacaacagagatgctgtcaagctctttctgtattcctctgtggcacacacacttaagatactcgtcaaacggtactaggaatgctaacatagctggcctgccccagggaggcccaagagggataaatccttgtcagtagaggccttaacttgaagactattgcctgcgtagcttaactttccattagggtacctctgctaatgccaaactaatccaaagcaactacttttctaagatatctaaaaaataaaaakatatcttttcttttctttttttttttttttttttttttttttttgagacggagtttcactcytgttgcccaggctggggtgcaatggygccatctcagctcaccacaacctccacctcccgggttcaagcaattctcctgcctcagcctcctgagtagctgggattacaggcatgcaccaccacacccggctaattttgtatttttagtagagatggatgggttttctccatattggtcaggctggtctcgaactcctgacctcaggtgatccacccacctcggcctccsaaaatgctgggattacaggcgggagccaccatgcccagcctatatctcatacaaaggtatttaccactaaatgcagagccacttatgacagcagagggttctggctcaggaaatctgggccccagcttgtgtcttcgaagcagagctaagatagctgtgtatttctcctatgctataacccctaaacacaattccttcagtatattcccagaagtatttattcgtaaaattctccaagaaaacaaatttggggaatgcggcacattacatctcccacagagagattcaaaatgttccttagctagcaaaggctctgagaaaactctcagcaaataaatctgtttaattttgttcagctcykcatttccccattaatttaagcatgagaactgtttttcaaataacagctattaaatcccccacggaactactatcactctcactaaaaggggttctaaggaaatttcttcagtaccacttttagaagcctaatgcatcggaatctctcagtgccatgatgtgagaagtgatactttactcttcttttgagaaggagtctggctctgtcacccacgctggagygcagtggtgcaatcttggctcactgcaacctctgcctcctgggttcaagcaattctcctgtctcagcctcccaagtggctgggactacagtcacacgccaccgcacacagctaatttttgtatttttagcagagacagggtttcactatattggtcaggctggtctcgaactcctgacctcagatgatcccccccaccttggcctgcaaaagtgctgggattacaggcatgagtcaccgcacccggccaaagtgatactyatctagatgataaaagtgagttgcattttcttcccgttctgtttactgtttggttatgggaactggtggttctccatttatttgccatccacccacctcactctcatagctatactctaccttttctgtcctgcactgtatccctggagggccctgttggctggcttccagataaagggcaggaggagagagaagtaggagtaattcttcccagtttcttccctcctagtttggtgtcactcttacgaccacagctatgaggtgataaaggcgactataatgacagctctcaccaagcctcctcagctccatgaccccggctctctctggcctctggcaccactatttcttcccctcatcctttcagacctaaagatgggaaaggcttcctgatgaaattagcactgtttatctcatccttcttttttatatccttaatcccacttatgcctctgtaagtggccctttatcattggtcatttttttttttaactattcaggaataaaatgttttttttcttctgtcagattctgattggtagagcagagaatggcactgatactagtgctttctgtgcaccagacactacacagaagattttatacacattacataatttaatcctcacaacagcctttgatgataaatattattatcaccattttaccaacgagtaggatgaaacttacaggcatgaaatagcttccttcacttatatkgtccaagggaggcagaagcagattcagtctgagggcacacagtctctcaaccaatacgtcttgcaaacctactttgttctaggccctgggctaaaccctgaagatagaatgagggaaagacataaaagaagtagagaagaaacagaagtagacccctgaggttgtgaaagaaaattccttcacccttgacatttaatgttggaatacaaaaattaacacaygtgctactcctggtacttctggcccacgaccctgatactgactttgcttctgaggactaagttaacagagggcaggtttcactataaaggttaaggacgggcccccagaacccagtcatctttttcttgggcrtgtcttactaaaaatgtctaagacatgtggmagagatcaagcttatttgactctttcattgtaaatcatacaattggataatcaagagatagcagcagcagcaccatcagtctatgtatcctaaatccaaaggttaattgtgrtatttcctttctacatctgatatctggttaatttaaacaataccaacccacatctttctatctcaattatttgaatcagctctttccttctaccacataccaattccattttaaatgattataatagtagctattatttgccaagccattagcaaatgtcaggtacctaatcagtttacattgctaagaactggggctctagatgtggcctgtctaggtttataaaccaattctaccacttataagttggataaattatttaacctaagtcttaatttctccatttgtaaaatgggaataataatacctactcacwgaattgttatgacaattaaattagatattctatacgaaacactgccttgtgtgcttggcacacaagaaatgataatagtagtaataataataaacaacacatatagctatatagcactgactatgtacctggcatttttccaagcgctttacatgtgccaactcatttaatcatcacaacaaccctatgtggtagyattgttatttttaagttttgtgactgaggaaactgaggtgcaaagaggttaaaatgatttgccccaaggtacatgccaatatgtgatgattcccatcagatctgcctgattccagagcctgagataaagagcaccatgaaacagcattttagaacttccttgtcatgggaaaccctacctcatctctgggtttcagagtctgtcagcctttctctccctggatctccaattacagcataccctgccactcaaactactgttcatgcttagcattctattcatgcctgttattcagtgtcttctacctgcagtaactactaccttcatttcctatcaygctcttgagacagtcacgctaaaagcagcagactctagtgcaaaaatatctactygtcttcattcctaggaacrtttccctggggataaggccccagtgacagagtagaaaggaaaaactgccacataaaagatagggtgctcctgctaacaaaacctttatctcctgtctcttcctctctctctctattacggacaaatttgaaaacctaaagctttaywtgcattgttttgtaagagcttattcatccaggtttagcctccaacacaaaaacagatgcagggatgtaaacatgcatgcatatttcacatacctcaaattagttgactcaatcagaatgcaactgtccttagatayaaatgtgtaagaaaaacagtggtttacttctaacttccactcagcaggagcttgtcctaaggtgttccatagcatcatcccctcagcccatcacttggcccacctgaggcttcctgcagacaataacattgcaatgcacttgacttgctgtttcccttacacagtccccattttctaaactaacaccttctccccagaaactctccagaaactaatgctccaccatcgttccttttctcacttgtttttaggtatcattttgggatgttatgtgtgtttttccttccaaatcagactttatacttaacccattcctgtttttctggttctgttcctcatttttgcttcccttccttcacctcctgttactggtggccccatggtccatctcccagctccttgttcttacattagtcttgacacagacttcttttacctggttaataaagcaggtcttttatctttcaagtctcatcttctgctctaagttgaaacattgatgggtattcatcttgccrggactttataatggagaatctgtctacagggagcttcttggaaagaaaaataaccaatggtcaccatgagatttcctgacttactactgcacaaccatagaaacccaatgccccatgtaagatttacataaattccagtgagttagggctcaggtatataatttgaatgaattcattcagccaatggatagttctactgtttaatgaagtgatatatttatgtttgaagaagagggccttacagccccactatgccaacttaacaaattgaacatgggacatccttgttcctacaagtcctttggctactccaccaaggacttttcgctagctatttcaccccatataatgcccgagcttcacatcatctccttgactaccctctcctttcccctttctttcctccttctccatcacctacaaactcctatttatttctatgacagagtactctaactataccttgattctctcaatttcattcatttggcttattattgtcccaagcaaaaattcctaagaagaattctcctgcaagctattatgataataaaaagttcatcctgctgcacacagtttagccaaaactgttcatgaattccagtgagttacagcaaagtagtctttgcctcttgcctttcatggtaaacacaaacacamaaaggcaactagtaaaggtgtaaaatgggagtttggcctggagactcacgtgcatacagtcactccttaaatccttacccagatgcacttctccctacatcccacttgggttgcccttttgagaatatttgttcatcagcatatatttctacttcattttacttacatataagttgggacatagaaggaggagctacactcagttgccacctgcctagaaatagtcttaattgtgccataccgtgcgtctgtttcatagggcctatgtatccattaggattaggttcagcaacacaaaatagtgatccttttasttatctcatgattcaagatggctgctgggctttgatcattgtgtccttttgcagatgagaagacggaggcaacagaggaaggatgacaaagagactccagggtgaactttcaggaacaatcccccaaaccacaccacagaattgggataacaaggaaaactcagcttctgccaccatcaggaggctgtagaatcacaaagcttctattacttcagaaccacactacctcggccatgatctggaaggtgtcaagtcacaaggcctgcaaataaagcaggaagctgacaccatgcctctgccgtgatttaagcccgcaaaatggaaacctctgtcccatcctatttttatatataactcagttccttgtcaaagctaccaasaatttatctatttagaagaccctaagtcatacttgggacccagatagcaagggaatttgagaaatgtggatctagtcatcccagactctgtagaacaacaggaaggcatgcctgcaggcactggaatcagtattgaatggaccagtccacagtgcctgccatcccaggataatgctgtggatagttcattaccaccaaggcatgtttcttgagaggagcagaaaggctcatcctaacaggaaatttctgttgatcagcagacgcccccagctggtagaattttatagggatggaagagacaggtctgaaatttggtttcagagcatatgacttttgagtcatgactttactcaagattgataggagagagatacagaaataaaaaggagaggccaggtgtggtggctcatgcctataatcccagcactttgggaggccgaagcagatggatcacctgaggtcaggagttcgagaccagcctggccaacatggcaaaacaccatctgtactaaaaataccaaaattagctgagcatggtggcaggcacctgtaatcccagctactccggaggcttaggaaggagaattgcttgaacccaggaggtggaggttgcagtgagccgagatcatgccattgcaatccagcctgggcgacaggagcaaaactccacctcaaataaataaataaataaataaataaataaataaataaataaaaaggatagaggaggagggtatacaatggtaataccactgttctytgcgttcctaagtgcttgaagtttgccctgtgctttaagctactgctgtttccttaatcacctccttttatcattcctcttggatttataaggctcatatactaccatcaatttatcttcagatttcttacttaaaatccactgaagcataatttatcttgaccacatctctagtagagatgggactactagggtagggaggaactggtttttattatgtgaggcacacagaggttaactggctcacccaagatcacacagtgaaacagaaggataaaaaacaaataggaaacgccaattcattgtatgtgattgccaaagaaatcttccagctctagatgcttagagaaaacctacagagctgagggaaggtggcttgcttcagattgtgtcctgaaggaacaattaactgaatatcaaagactaaaagttttccagtgagattctttcttttaatattctatttcttttgcacttgagatctcaaatttgattktcaagatcacttagtttaatcaagcaagatttctttctgcaaatacattatgtgtgcaatggatgtgcatatgggtacaagctggaataaaattgagtctctaatttctcaaaaccataaaattgaccatttttcatctgtaaaaactaaatcttccagagcacttcatttcttgctatactgggacacaggcagactactttgcagggtctataaaaataatcattcaggtattttccacaatgtcaataaccaagataattctgacacataatttggaaaaaaactcaaccagagtctgatgatcagggtttaattcccagtactgtcactaacttcataaccttggagcaagttaaccccatgggcctgtttattattcattaaaataaggatgacagctagatgacgattaatttcctaactttaaaacctccaattgaagaaaggttttctataaagagctagcaatatattaaaaatcagaatctaaacaattttaattcccatttctcttttttatgatatgacctaaacaaaaaatatataattggataaattttacmatgtcagaccttagaagataaaacaaattgccttagagttaattcattgcagactttcagaactgtgaccaaagcctcatccaaagctagtgatggtcaagagagatgaccttcagaatactcttccaaagcttctgtgtactgaagtaataataagagcaattttaaaagcagttattaaactccagtgcatctaacagttccaatacaattacatatgtgatctcattaaactctcacatttgtattcccatcctatagcacacagcacatgattgtaatatacataattaatttccctcggtaggtattaggctttgtacaacatgtgatcttactggtttaaaagagttttgttgttctctccctgttatccatttggttttcattttataaatatcctgattttcattagggtgcccacacacatagcccaggtgctttgagatatttcaagtccaacccaggctcttgggatggagcatgtgattaagcttcagcgaatcagtgtatctgccagtcacggtgtttagttcagaagtgagtatacaagctggggagctcctgaaaaaggagctttctagcacttctgatagagtttctcagagatcattatctgtttccccagatatgaaagataatgttgttcttgacactcatctcaaatccacagagagatcccaggaggcttagcataaagctgaatcataggaaaaaaatgggaacaaaggaaaggtctcaggtccttgatgacatccttgtgttgctgtgccaacccagtccccaaactgcctgacctccagacttatgtgcacatgggccaacaaagcttccttattgtttattttgagctggatttttggttacttgcaactgaatatatctttagcatctaccacagtacccaggacattgaatatttgctggtcatatttactgatcacctacaatgtgaacaaatgtttatcaagtgcctaccatgtaccaggcaccattctagtgtctaggatatggattgaagaaaagcaacaaacattcatgccctcacagagcttacaaattttctagtggaagagacagatcatgattaaggtaaatgagtaaagtatgtaatgtggtggatagtgataagttgtaagaagggaaaactaacagagagaggagaaagcaagtgacagtagggactgaacatttggaaagatggccagggaagctccactgaaatggagacctttgccagaggcctgaaggaagtaagggagccagctatgcagatgtgaggggaagtgctttccaggcaccgggaaaagcaagtgtccctgagttaggatggataactagagactgaattgatggtactattttaggcttcaccagtcatggcagcacatttagaaaacagcaaaggcaagtgagaaaatgggcaggaaaagaaaaagaccacactcttactttccaaagaaggtcctcttccctactttaagatggtattttgggtggcagaagtaagatggacctgctctctttgattcttcacaagccatctctgcattacctagaggttattacacaccaaacttttgttagaagcatgagccctcaatacgttccacttgtattattcttacaaaactactccaatgaggacattgcatgacaaactccatcttcattagttgaattaactaaaatagagtcagatattttatggactatgacgagctggatgctagatccattgtaatccagagctttggcacaagagcagacaaacagaaattccttacactaacacttcacaaagaggaaggacccctccatgagtcacggtttcaaacagaaactatcattcttcctaattaaaattcagagattcctgacttgattgttatttgaacaatcaagttatttgattaaaataactttaattttaaaaattraaaatgtttttaaattgctgtcactgataaatcacacctattcacagttggatttcatactttgtttattgacatctcaaacccagcatgacccaagaagccttcaggtctccttttaaatatttttccagcaaggtagggggcagastttgttttcaggagaaaaattcacaacaggctctgcacccaaaacaatatttaggtcaaaacaaaccatgtgttcactttttattttcttgttgacgtgtctctgagtgatagatggtttgtctcagtttgtgccctggcacagaaagcatatctctacaaatgcacaggctattgctgtggaaatgaacatgaggtaataaatatatcattatgagtgtcatcatatctagtaggtgggtaatgatggaacttcacatttagaatctttccagagatttataaaacattaacttagtaatccccgcaatgccctaggaaggaaaagagggattttataccagttttgcagatggagagactgagagagcaattatgagatttccccaagagcaccgagggaataagaattaaatgccattttgcagagctctcaaacccagatttagctgcacaaataatgccatcaggttctctccaccctcagaaaacacctttgccaaacaaagtgctgagaatgtgagagagcaatraagtgtacactacatttcaaaggtccctccagggagaaaccttacgtttctatttacatagggtagcgctggttttcgtggtttctgaaagatggagaaagacattatgttacagaaaatgtactgaatgaaaagatcgagccagtgcattcacaggcatggatctctccaagtatatttaactttaacaatagaccccctcttccggcttggaccttttaacccttccttctagcctaagaagaaaatgtttcctcttcttccacaaagccagctcctccacctgtatgctgcctgcctgaaatgatgccttaagcatctttattctgctttcccatctagccttcaagtattcttcatcctaacagttggcctgaggaggacaaaatatctttcacttgaccttgctgtcttcatcaggtttttctccaattctttctaatcctttgactgccaaaaccctccaaattctacccgctatccaactttctatcaaaatgtctctttttaaatcctgttattagagacagcaatgattctcctctttggaatactgccaatgactctcttcttgccaaatacaatggaattttcagtgccttcaccctcctgagcctgtatgatcctctagcagtaccgccaaccaccaactctttctgcctcttatttccattttataatctcttaattttattgccacttttactactgcttcttccacctccaggtctctacatggggttctcctccaggacactggtcgtatacccttttctctaaacactttttcatccttatttacttatctgtatcaggatgattcacatctctatttcaaatatctaactcttccatgtaatccagtccagtatttccattcacttataagatgaattcaccatgaatttaaaggaaggaagagaaaatctccactgctttctttaccacatgcctcctccttctctcttctgtaagagttgggcataccaatcagattgagttagattccataacagtaattggtctacattaatacaggtagaatgactgcctttaaggatacgcctagccaactcaccttctcttctcttctttactggtgagactgggtattttggtccaaatccatacaatttcatttgactggtgaagaaaacatccacttaaacttgtgactaaattgcttactgcagaccattttttacaatagtcttgtactctaaaaaaaagtggacaccaacccaaatgatgatgatgatgatgaagatgayaacagtaacaatgacagtctttttaaattgctccaaaccacaggggactgttcctacttttaacttcttttgcacttagagayagtaatacagtgtagcaaattatttgcaaatgactcagtttgtaatagatttgtctcctcacttaaatattaagtaccttatggacagagtcatttcctgtgccacctctttgaactcaacaatacccaactacccttactctacctcaacaatttctatattggaaatataggaaatgctactaaatacatagattactgaactactgatgtcaccaatagtgactatcctaccactgctatagttgaataagcttttaatggcttctcaaaacattcataattatatctaaaccccttaccatggcccacatggccctacatgacctggtctccccttattactccaacctcattacccacccccctcacaacaggcatggctgccttctgtcttttcctcacacataccaagctcagtccttctttggsaacatagcayttggtattccctctgaatgaaatgttctcacagaacttttcagggctcatactatccccttattcagattttcactcaaataggctactgcctcactagatcttcccctacggccctatgtaatttagccctctggatcacaccaataatttcctaatcctttaccctgttttggttttcttcgcagcacttataacaactgaaataataagtatttttaaatagctatttccccatgtagaatataaactccacaatggcagagaccaaatcctgggggctcacgtgctagaatacagaaacagtttcagatatgaaagtgaaacaccaagtttagggaccaaaaattgataaatattctcaaaagaatatttttaatattttacttcaaatctatataaccatatgaaaatacataaagttacatgagagagaaaaatgatctaatatttattgagcaactactatgttgtaggtattactagatatatagaatgttgttatatgttttagttgctgattctatatgctataattccattaagcattttatatttcttagctcacatatccctcatattatgtcatgataaaggarcagctattgttatcattcctgtttttcaaataaggaaacaggctcagatgggttaaagtgacttgctgtaagtcacatgagttgtagaactaagacacaaattcaggtctctttggttccaaagttgggctcaagtgcatcatgaattgcatcctccatttagttggtaaatctggtcatataaacaaaacgcctcctgaatcatcttcctcagttttctgggtatctgtactgcaccagacaattacacacttctctgcctgagttcttcatgagttaacatccataggacatgtctatctatacctaagaaatataatcatcatcatacctaagaggatatatattttttccttcctaaaatgcaaggaagccacaaatggatgctgtcataaaagctataaatagattgctcttatgatctacatgttcccaacaaccaaggaactctgtgagtttaagagaaagcagtaaatatcacaaygataaaggtgatagcgtgcttttccccacttttaagcaatactgtgattccatgttcaacattaagtgaaaaacaaaaataacagaaattataataatagtaacagtgactctagcatgttttgcacacctattatatgctaggcattcggtcttttacactgattatttaatacttaaaaccaccctatgttataaatactaatattatgcacattatacaaatgagagattaaacttcagcaaagttaagtaattcatacaagtgcattaagctagtaaacatggttctgctggctccgaaatgctattcagtcatacctccaatactcaatcatttggactttacatttcaaagcacgctctatttaatagattactgtgggttgcatatacgcctctctcaaatgatacttaaaactgtgccaaaaggcttcctctacccatgccaactgcatagatcagatgttctaaccaagcacaaaggacagggattctgtctcttccatctaccctcagtgcacaaaagagaatctgaagcacagtaaattaaaaaatatttgctgtggaataagtgattatcagaactgttaaaatcaggaatttgaaagcaaagatgccaaaggagcatagacgagtttggttaagagtgtgtcatcctttcaagagctctcatccccagtgaaggctaaaggccatcacaccaaagagaagatgcctaaacaggccttggatctttcttcctctatgctttgactccttcctgtccttccactgaggaagactctcctatccttatagtcccaacaacaacaacaataaggacaaaaccctatttcacagctccagagataccaactcaaagaagctttctttggtcatcctagcctgagtgctgcctttcttctgacctccttggtcattcacaccacttagaatcatagactttcagaagcactaaaacagaagtctccactctcactttgccaaagaagaatgacaatagtcatgtaaagtgtcttccccaaagtcataaaactcgccatatcaaagcggagacttgaatgcaggtcttctggcatttagttcccactcttttcatgatcctgatggcagctgcggcctgtctgaaagtggttgctgcaaagacatcagctgcagtggaggaggcatggctggggctacgtgccccatggagcctgcaagagctgggaacaggcagaagccctgcccacttctgagttggtggggtaggagccccaccctccaggtgcagctgcagccacccagccacagttgtgaacccgggcctccgtttgctctcagggcctaggaagcccctgtacccctgaaggcttggaagtgcttgctctcaaagcccatcccccacccccccaccaagccccatcccccaacaactgccccacaccacccctgctcccgagtcctgctctgattttggagcaaagttgaggccaaacctgggtgcttttgcatcctgaccaggtgagcgagggctcagggcagcactgacacaccagtcccatgctaccttggggccccttctggactttgggcactgatgagcatgggaaggaggccagagggatgctgaggatggctgggtgggggcctgcaggcacccctcagcaggaacagcctgggtgccagggacagcaggttgatggtggcaagaggcagacaggctcctgggtgggaagtggtgggtccctggtgaagcctcaccttcaaaccaggacagtctgaagcctgggggctgggctgtcagttctgccaactggaatgaaaactttcggtgctttatcttggcccatccatggacctatcagcatgtacttcctcccttctggagcctataaaaattcaaactcagccagactcaaagagagaggtcaggactactagctgtgggaaggagctactcactttgggtctcttcatcaagatgacctgcctgaggaaagaagctacccaccacaggtcttctcttaagctggacacttgttgggatgacctgactgtggaaaggtcatcttccatctatcctcacttccgtctaagacccgcactatgggtctcctctccactgagggccagatactcattgggatgacctgcctgcagaaaggatctacctacttcgggtctcctgagagctgttctgtcactcaataaagctcctcttcaccttgctcaccctccagttktctgcatacttcattcatcctggatgcgggacaagaaattgggacccatcaaatggcaggactgaaagagcagcaacgcaaacagggtttaaacatgcactgaaccccctctaacactcccctcccccaccccactgctcaccatgtcaagaaggaaagaagagcttcgacccttcagggagcccagatttaggggctccccgagccagggctgtagcatcttctttggggctctgtggttcctggcatttccaagcttttgggcaccaacgtattccccttgttcaggtgcctgcagtggaagccacttgtggtacatctggtccagccgcagcctcacacggagctagcacctgtgccagcagctgcttgccccaccaaagcagccagcatgcctggctgtgtgcagtgcctggactgtgtgctcacttgctcacacatccctcaccgctctgtacctggctcacccttgacagatgtgggatccaagccagtagtataagctaagcacagcctgctgggccaagaggatggaacgagcccaatgggcctgagcaatacttagacrggaggctccgtcagccacagaggtttccagctggtgaggcaacaccccaaggatcccgtgacaatcccacattaccctccccattgccctgtgtgtgtgcacgcgtgcatatacaaatacacacacagacatgcacacacacacacacacacacaaaatacaggctaatccttgaggaaaggcacaactggaacctgttatcattgcaccatgagcctctatgttactgccttggctctgtgggcaccagtttaaacaaacagcatagtcaatgccagaggggtgatatttgccaacaagtgttcaaaagcgtgtatgaaactcagcatgacaagaacttcaaaggggagaccagctgtccrtcctgtacctgtgtctccagttttccctcagaaatctcctgatgtgcaaaggaaggttctttgatcacttgtgtgacaattccaagtcacaagtcaatagtggttaataaaacatcattatggcctgagtcagtatgcaaaagttacatgcaatattcagcaaaacaaacaccaccaaagaaatatgtcaaaatgatgttcacacattcttttaaaacatctgttcaaaagttttaagtgtaaaactaaaagggacccttacaataaagttttatgaatcaaacaaaattgcaatgctccaaatgattatagatgtatatttaagcctccctcccccaaaacaaaaaaacaaaaaaggaacaagtaagtacatatcaytgtagcaagcactgtggatgaagagatgaaaggccatgaatcttggcttcaaagacgtcagcacttaatggkacttctaaaagtccatttataatccaaaaatctcctgctgcagatgatgactgaggcctaaagagttaaaatgacttgcctgaggctatgtagtatgttagtctggattaaaatagtctctctaatacccaataccaaatgctttcctctctaccgcatttccttgccaaatattcagcattcatggtgaatgctgacacaaatgatttgcttaataggtggataataacattgcttctaaacataaataatccaaacaactatatccagagtctaccttcttaattattgttatagataatataaattaaatcattattattattatcctcatattagagatgattttcagaagtgaacaaacgggtaggtggcattgttaggtgtgcatgcacatcctagttgcaagaggcaaaagttccagcattaggcatcctgacatctcccccaccacatcagcatgcatgtccccagatactcagtgtggtagtctagtccacatctatttaggttgaaaatcaattatatgatgtcataaaatatcctcagataatctcgtcttctgaaaaaagctgcacagcccactaatgcccaccagtcthttacctgttgctcagcagcccaattagggaccgtgacaagatgacaccattaggtctgtgcatttcatacatgcagtcctcactctccttctagctacagaaacaaagcccatggatttcaaagccccaaagaacatactgccaactaacaaatacaaaatactgaccttcgcacaagagcctgtgggtgtttggggaccaattgcaaatgtatttgtcctccaaaaggtcatggctctaatattcttttcttatctgaattatttatcaacagcagggaaaatgtaataccatagatgtaacaagaaagaaaaaaagcaagcctctttcaactccctggttgcttagagatatttctgtccctgactctagagttgccatgtttaccctgtagatttagatgtggaggccttgttatcagacatgggacatgggtactgaatttcctaaatgctgtgtgtgaagtgccccacccaaaactctgttcctcttctagaagggatactgtccaggtaatcaccattaagtccttgctttccatttatagaaaaaaattagtaaaaccttattagatcccatagccagacttctatcgtcctcatctcttaggaagacagccatgacccagaatctgtgaaaggagtctctgaggctgtaaaacccatgcacttcattccacaagacagtactagagatactcacaggatagagaagggctgattggagtttactgatttaacaagcatccatacctaatcctaagtcatcgagcagatgactatttgaaattttattccataaacttaaaaaaaattaaattaaaataaaaaggtggatgcctgacattatctgaaaaactctcctctgtgatcctttcatatacctatggtagtaaagaaattagacctactgcatttgcataacttactaatgggaagagatctttcccctggtggcattttttccccaatgttttagttgaagtaaaatataaataatataaacataacataatggttactctcttaaccatttttcagtgcacaattcagtggtattaagcacatttatattgtacagccatcaccaccatccatctccaaaactcttttcatcttgtaaaactaatgccctatacccattaacaataactttccatgcccccattgctccagcctgtggcaaccaccattttacattttgtctctatgaatttgattactccaggtacttcatataagtggaatcatgcagtgtttgtctatttctgactggcttatcttccttaggatgatgttctctagtctcatccacattatagcatgtatcagaatttcctacctttttaaaacggaataatattccattatatgtctgtatcacattttgcatatccattcattcattgatggatacttgagttacttccacactttattgtcaataatgctgccatgaatatgagtgtgcaaatatctcttcaagaccctactttcaattcttttgggtatatacccataagtggaatcgccagatcatttaattctattttctatttttttctatttttaatttttgatgaaccaccaaactattttccatggtggctacaccatgtttacgtgctcgccaacagtgcacgagggttccagttcctccacatcctcaccaatacctgttattttctgtttcatggcattaagtctctcatttagaccattattagattcacccataaataacaacacacacacacatacacacaataatgaaacaaatgtaaacggtaaagaaaacaagatttaaggagaaaagctataataatccaccaaagaatagagtcaagaggaaaagggagctagaagaatagtcaaaataaaataaatcttgtccaagtagaggttgaataaattcagaactccagctggtttgagagctaagcatgacaacatgtgagtgctactttgtaacttgtcagttttctaaatcctaaaaatagatagagggcactagtctctggtatccctcctgggtttggctccaaagctgtaagctgttccaacctgtcctaaaaaataaacagtttgcttgaggccaagaaaagcattacagggtaaatcttgacttgattccctcccctgtactgtataccactcagcctgggtggccgtgatgtaacagtcatttactaccacactcccctggctgggacaataattgttccttcatccccctctcacactgatagtaagggataaggtctgcctcttctaatcaatgccgcatttttattataaccaattaaatggacgatctgcttgagggtgacatagctctcctaatgagaaaaaatactaaagattttgatgattcacaagtaagatttctccaggcacatttcttcaacacttcctcaaaattcagaatcaaatggctttaatctgaagatatttctgatgccttatatgtctctaacatcccagctatttgaaactcctaatactttaatactttccctatagtctgcttatcaacgagaatgggaaaataaacgccaaaaggggggaaaaatgctaattcatctagggaatactcttcaaattttaaaggacaaataattcagtaagaaaatacaaatatgaaagccacatctcataaatgaggcaaagactcactttagagcaccactgtctagttacaacgtgcttttctgtaaaataattatgtggggtccttaaaacatcacgatatttattaagattacagagctctttaacctcctatttttccctaaaatgtccctaaatagaaaacatcagacaaactaagatgctcccctccaggagtccgtaagcatgcatagtccctgtgttgggctggttgagtttttgttctgtgacgcactctttgtccaaactgaggaaaaacaatgatcatcatgataatacagaaagaaaaaaaatgcatgcatctgttaaaaacaaatgaagacagagaggcaactggatgttaatacttctctaatgtagtaacagctatgataagatgtccatatgagagaatatttttaaccataaacaagtatatctttcaaataatcttataatttgggcaatgcttatgaaataagtaaaaagaaaaaattgaatattgatcattagtgtgatttccacaatgtagactacaaatgcaggcattgaaaacagacataagataaatactcctaaatgcaaaatgttaatagaggttgtcgtcattttcctcctcctccctgtcctccccctcctcctcttcctcctcttcttcttcctcttcctcttcttcctcttcctcctcttcctcttcttcttctcggatcatagctcactgaatccttgaactactaggctcaagcaatcctcttcctcagcttcmtgagtagctgggactacaggcccatgtcataatgcctggctaattacacctggctaattttttaaatttttttcttttgtagagacagattgctgctatgttgaccaggctggttttgaatgcctagcctcaatgattctcccacttaggccacccaaagtgctgagattatgggtgtgagccaccatatatagcctattttcttcttattcttctaaatttcttaatgttactatagtattaatatactatttttataactagaaaaaccctttttataattgtattaaacttgctattttctttacctgtctctctgtgtgttgcgaattccctctaaggaaatttcctgagtgccaaagactccatccttgtgtccaacctagaccagtcttctcttgaaaacaatttgtcctatgaccacccttaaggaataactagatgccagccagcagaactgataaatgccaaaaagtgtttgcagtttaatgggcttcccttctcagggaacaaagttaaatttttaaagggagctaacagagcacattccaaagctctgttctacagcaactcacaaactaatgactctaggaaggtgatatttctcttgacttaaaggaatgtattccttggtagttataaactctgttttgaagtccactttacactacatcatctccttgttaactcatgagcctaaagcatctgattctaggctcatcttcccagtctgaacactgtctacacagcctgggcttctcaaggcaagcggctttccaaatgtatcttaaggtgccctgttattcttttaagtgctttaagagctacttagtaaggtgagggagaaaaaggaaatatggtgaacaggtcttagggcttcaatattgagtaccacctaggactcagtcattgggttgggctttctttcacatgatcaaaccttaaaacccaatcgtctttcttggtgttataaactgaggcatggagcacttaaagaatctgcccaagactccaaagcttgtaagaggcagagctgcgggttaaatatgggttcacttggtcacaagcccaagctatttctttctttctaacaatggctattgcttgctgaacacatcgcattagcattttatttatttatttatttatwatctcaataggtttttggacaacagtaggtgcttgcttacktgaataggttcttcagtggtgatttctgagattttggtctgaatgcacccgatcttgtctgcattcgcattttaaagacattttcaaaagagctctgatggaggttatatttgagcttctggagttaacacagcctgctatcctatcctatctttgagcctatggagttacaatgtcgactttcctatctctgcctcaccaccaactagcctacagctgtagacaagttcctcaacctcccacaccttaacatagattcctcatgtgtagaggtagtaattgctaacagttattgagcgtttactctatgctgagctctcttccaagcactttacaaatattctctcattcactccttgtaagattctagaaggaagatgtgcccatttctctgaagatgatttgagttggtgctatgaataaataccctacttggggcagaaacccaggcctggctgattcagagccctgtgttctttccatttctacacaggtaacctccagttcacattgtagatcaataaaaatggagatggatctatttctcaagcaacaggcacaattacttctcaatgcactcccacctaacatcaaattcaaaccctttcagacacccgtggaaggatagaaaacatttcctctccaccagttagtaataaatgtcctttctcccastaccaatgctctttcccatagcatttaatgcctgtaactcacaatttagaactcagttatatgcctgataaaattattctacttaaatgtaaattttatgtctcccaaagagaccacaatctcctagaggtcagaaaccatatcttacagaatcatagaattagaaaagtaatagtttgtaaaataatcctttttttttaagaagctgaactctttcaaaagaaagattatttagaatccaagttattctgactgaaaaccattgagctagttaaaccttaatctttcaaagtccaagaaaaatgttgacatgataactttcagtgagctggtggtagggggaagaccggaatgtatgttccctgattctcattcagtggttgctttcctatggaaatactgggtcttttcaggctccccttagtatctctctttgtcttggccctgatccagaaaaatctggaccaactgccttgtttctgaaaacccttcatagaaagcttatgagaggtagtgtggtaggactccactatcagatcagctgccaggaagaacacagcatctgaaatgtctgaatgtttttattcccccaaaactcatgttaaaatcttaacccctagggtgatggtattaggaagtggggccttgggagtgattaggttattagtgcccttataaaggagaccccaggaagatttctcacccctttcatcatgtgagcacacagtaagaaaacatcatctggccaggcacagtggctcacccctgtaatcccagcactttgggaggctgaggcaggcagatcacctgaggttgggagttcaagaccaacctgaccaatatggagaaaccctgtctgtactaaaaatacaaaattagctgggtgtggtggtgcatgcctgtaatcccagctacttgggaggctgaggcaggagaatcgcttgaacccggaaggtggaggttgcagtgagccgagatcgcaccattgcactctagcctgggcatcaagagcgaaatctgtctcaaaaaaaaaaaaaaaatcatctgtgaggaacaggccctcaccagacacctaatctgcaggcaccttgatcttgaaattcttagcttccagaactgtgagaaagaaattcctattgtttataagctacccagtgtcaggtatttcattacagctgcctgaattaagacagcaccataattgcaagtggccttcagttgccatattggccatgcagattctccaggaacatgaagcaaagccattgcttttaatcactttagttcagaactataatctgtgtcataaaagatgaaagacattatccctaccaggtcataaatatatatttttttaatttactgasgtaacatttaggagacttcggggggaaaaaaactcaatgtcacctttgtctagcattttctgctttctaatattttaataacacttttctcataataatatgtatataggttcattgtcttatatttctttctacagaaaatttagaaaatatatagagtataaagaaaaagtatcatgtttaaccattcactcagagataccctctgttctctgtttatttgggaaggagtgtgaggatatttcctgtctgtgtttctatgtgtctgtgcttgcatgtgtatgtgcatatgtattcatacatattttttattatttgaagtgaaaaataaaatacatacttgcttaaatcatgttagatgatgagacttttccattgacacataatrttcttttaaacattattttaatatgcattatgttccactatatggatttattgtcatttatttaatcgaatttccatgagtttatatttacgctgcttccagtttttttcttacaaataataaatggaataaatggccacaatgaaagtcttcttacataaataattgtgactgattgttttcttaggataagttactataaataaacatttctaggcctttggctataaaccgtcaagttagcctcaagaaaggytgtatcaatttacattctcatcagtgatatatgaaagtgctgaattcctgaaccttctccagaaaagagtgattgacatatatgtctatctatatatgtgtatccatatatctacacacagatagtcacacacataaatttagtataactgctatctaattttcattttaatttgcatttctttttattaatcctaagcttgaaacatgttttcaaagctgttaatatactctaacaattgtggatctacacatacatggaaacgsrcacacacacacacacacacacacacacacacgcaggcacacacatcttccttgacaaagaaacccacattttgtttagatgtaagttatccragtactacaaaagaagctgggatctgcccaagcctcaggggataaatcttgattctatttatctttctaaggtatattttatgaataggtaggtcaaactatttttgttaatgagacatgacaataaatctgttgaggtttttaataaagttactcttatttttaaaaagggactgtgaaaagggaaatctcttttcccttctgactctgggacatggttaagtcaggatttgatgcttggagtaacttcaccattttgagatcttgaggggagctagatcaagttccaaaactatcatactgaaaataaccaagtaaaaagttagaaagaatctgttccactgaggatttcatggagcagctgaattaactatttctgaaaaacctgtccgcacagtcattgttttatgtgagaatttgtcatttaagccagttgagtcatttgatgttattctgtttttttttaattctttcagctaaactcactcaaactgatatacgtacgctgtgtcactttatcctttaacaactctgtgaggatgtacagtgaatactgatgaagaagcagagaatttaaatagctttctgattcacagagtaaataagtgacataatcaaagcttgcaaccagtagaatttatacactagactttaaccatgagaatttatagctttcattttggccaaagaatagttagtatatattctcaattatcttagcaaaagaaaaaatcttaaggcacttcactatacttctaaaaagtacagaaataacaatagacagatagattaaatagatagatagatagatatgcatgtaccatgtctttacgatagaaataaagaatataagataaaacactggttgttaaagagaaatgtccattcattgtatgacctgaatgtggatagagtggagctgcaagaccagcctcaacaattttgtaagcgctaaagcatccttaatgaaactcctttatgagaaagccttattgtgattctgaatgcacaaatctaacaatagagtgtacagaaatattaacaaggcttttatgatgaatttgggtcaagggcaacacagtacttaataggtttgttcacaaacaccctaggggcaagctccatcattgatcctggttgttctgcaacagccaaagtggttcaggtcctttataacacatgtaggaataaaaaggaactcccacttaaacccaacaaaacaatcaaacactagacatgtctttcagacttattttcatcatgaaatttcaaggtaaatgagctttgatagtctccctaagatatatgtgctggatttaataaaccctaacattattttaacactactatcactaaatgaaataaatatgtggtctttggcttttccagtactacatatggaaaactaaaattggtctggaaaaacaaactttcgatgaatttttatactataatccctctttagagggacctcttaatttttttctgtttcgttcttttattgacttcattttttgtgtatgtgacaggtagagaagtccagtcacaaaagtgtttgtgcaagtgatgaaagtttctataatttcttcaattcaacttgaatggttgtgagctcctattcttctgagatagtggggtcactgaaatgtctcagtcattttaagtgttccccacttccatcaggctctatcatggctctagaggacccccaataaccaaggcattggcacagaagaagctgcctaatcctcagcccatggaacacaaagtcaccatagatatgctccatttgtctttagggcgctttcaggcaatgcagcagcaatgtcacagttaaagattcaacatcttcccatgaggccccatctatagagatacctcacagtcattgtctatccagcgtcttatacatctcagagtgcagctttggaagcaggacccctcctccaggaaccatccaagtccctgcttcatgacttcctgaactccacatttctcaccaccagttctatggaatcttttttctcatctacaaaatacagtgggcaattcatatcccttcccatttccctctgatattctctccatactccaaccctctctgttcttctgctctatgctaaagcagtggctcttgaccttgactggacattagaattacttttaaacaagcccaccaaagctgggtcccaaccccagaacagccaaaaatcaaaatctctggggatagatcccagattccaagtgattcaaccctgaggtgagaattgggaatctctgccataaagaattaggattttggaatcctgcttttggtacagtagcattcctcctctgagggcgtagggaaggagggttacagagccaattatctatttatatgaaaggaagaaaaaaagagagaaattccagccatacaaatgaaaacaacagataaataactatcmtcagaccttctaggttggttttgaaatatgcaaaagtagtagcacatgctttattttgacttttcttgttcaatatatcaataaatagtttctggttatctttaacaagcaaaaagtagctttgcattctataaagcatttcatagagcatatttttactaaagtaaaatagtctagaggcctgtgacctgtttcattcttataaatgtatcacctctgctgagactgaaagccaagcaattgtcctgtaacttgtcccttaatgctgccacacagcctacggtaaacaaggacaagcattctgacacaagtacatggtatgggcctgaaagataatgatgatccgtggaaaatttgccattttgctcaatcaggttgcggaatgttctgttttagttccatttcatgtggctctgctaaatgagaaaatatcagatatctcatatttgaaaatattctctatttcatcaatataattgaccaaaattataataaaatttcatcaaaaatatttgtatagttcatcatgggagtaaagcatattccagagacctagcctgacatttctaacaactaactattacttttaaggcatttaaactgttgtctaatctcttttcattatagtgtacttaattcaaaccattaaattaataggctattatatctaagtctttaagttttctctatttcaaacataaacttcctttaaggtttcttccatgccaatatcaagaaaataaaaatccttttagcaaggtaatagagatcacatgggatatttgttatctcacttgttccctttatttcttaccttcatgggaagcttttggcataaaaatgaatgcctacccgttactgtgaagtatctgtcttatcgctgcatgcttttgttgtaaatcacaaatatcctcctttaaaactgcctgcgtatctaatgataatgtcttatcaaacagccagaaacacggggagtttagttggggataaatgaaagtcagaggccaataaatcaagctggttgactattccaaaaaccaaaagcatacgggggagagaagaaaaacccctcctccctgtaacacctccatttcagggacctcttccagtttcaaaattcataaaagagcaagagcaactaagggatctcttacaagaaacaacgcaatttcaatccacacgaaaattccaaggctaaaaactcccccaagggtcaaaggccaaatgttttagatttcaccctttcaaaggccaagggagacttccctacaaaaaagtacagagctccatatataacacatactcatgtcagggaaaccccagtccccagggaggtaaagattaagttacagcacacttttaagctctagataattattctcaatgttgaactcttggagctttattatcccatatatataatcctttttttttttttttcaatttttagcaagaaaaatgttgggtaagagctaaagtttcctgttctgtgtaatgcattgcctttctcctccatcatgcttagcatccactgtctcaggtgtagtcttctgaaaggaccatggctgtcagcacagaattgggaaagactagtttggttttccttctttaaaacttgtcaagtagtaataactaccacagggtgaaacatccaatactaaactaaactactaagatttcaaagagggattgatttggcaagcaatatttttgatggtgaatgaacatttgagttttctcatttgaagatattgcctaattaacaaaccatgaaccccttggcacagacattattttttaataatcttggtgactatcttttataacacttgtgacagacactaactgaatatttcatacatagtaaaataattaattaatcaatcatccaataaatcaatgaatcaccaaagctgatatatcttctttaactttaggcttcctatttttggttgaatagaatttttcagtatgactactgacttctaaaaactgagtagcaaagctaaatgacataaaacagcaaaagaaaggaaaaaaatatgaccttgacatggttataaaaccarctgaacagygtcagcaggtactgattgatttgagaagagactagaatggtctttggaaataaggaatgtcaataatggaaatgctatatcaggatccggagtcaaataaaggaatgcctttaggcctgtcaatttctcccaacaaataatcatctggcaatgaaacatttgaaaagacattttatagtggcagatatctatcatacacctcatytattacacaggcaaatgaccactaagggaaggaagtcttctttgcctataaaaaatggcagaggttatgggtggggacataatatatcttggagagtacagagcacgtttggtctaacaagcttattttcaggacacaaaataaatgtcagcattccaaagactcaagcttactatgaaagcgtctaatgaaggtccttgaatctggcctagaggctctcctcctgtctcctgtctcccatccatattccccattgtaaatccctaacatagtatagtcattgcatgctagcatgcctcagtcaattcccacagccccccattgctttcagaaaacatttcaaacacttcatcttggcaatcaagggccatttttcattgtattttgcttgcatttctatcatagcacttaatacaatgtgcctaatattgtaattaatttttgagaatacytacatagcttatgaactgctgttgaaaaaaggttatcctaatcaacagctactcatgtcaaaataaaccatatttgttggcaatctgttagtatcactcactatataggcatgggtaccatttgccaaatgtttctggtyctctaccattccaggcatgaggtaggacagtattttctcatccctttgtggatggatggaactagtgattagttctagtcaatgagttataagtagatgtgatttgtgtcacttcctggtcagaacatttaatggctgatggagggcctccaggatctcttttccctgtcttgatgattggaaatgttcactatagtgaccattccaacagcttgcatcccaaagtgaatatggtatgcagaacgcctctgttgatcagagatagacaaatagcataagcaaaaaataaaatttatcttaagtcacttatatttagaacatccaatagaatgttctgaacatcctacagaacatcctatccttactgataaaagtgctatgataaatactttcacatatattagttgacgttcactataacctgtgggtacgacagatgtgagcaatattttataaatgaggttttcaaaagtgaaaaatttgcccaaagtcaagtagctttatgcattatttcattcaacaaatgtttattgagcactgctttgtgccaggtaatgttctaagtagtcaaggtatagtagagaacaaaaggaaaaaggcccctgcyctcaagagtttacattctagtggaaagagacagataaaagaatcatttatacataagaaaattccagataataatatgtattactcagagaactaaaatcaggtggtatgacagaaaacaacagagtggctatttatattgatcatggaaagcctctctgaggcttaggctaagaggtaaatgagaasagagctcaatacacaaatatcaagaggaaaaagacttccataaaagggcaatagctcatgcaaaggtcttaacaaacagaaacaagcttgttacatggagaaaaagacaaaggtcagcrtggccatgtcataatggacaaggaaagaaacggtaaaagacagaagggaaagaaggaaaactatatagggttatatattgaaataagaaacagggatttgattttccatgtaatgagacactagatcaaagttttaagtagagttgtatgatttctctttttaaaaaaattgctctgtctgctatgtgaagaatgggttatgatggaacaagactggaacagaaagtccaatgtgatggccatggctgaagtccactaagatggtaataggtgatatagacagaagtggatggacttaggacaagacrtaaagggtagcatcaacaagacagatgcatggattgaaattggaggggtgatcaagtgtaacccctggggagaggaaggagttatctctacatttttggctagaaaaattgggtaaatggtgcttttgctggaatgggagaagttgggagagaaggaggtttgtagaagtggaaagaaatcaagttctgtcttatccatgttaagcatgaaattcctactaagcatctatgtgtacatgtcaagttgaatatataattcagaagttcagaaaaaagattggaactggagcgatacatttaggagttgttgacataaagatactattaaagctctaagattgatgaaggcatctaaaaagaacctataggtaaacaggggaaggggaccaggatagaaccggagggtactctaacctttcagaagtcagcagcacaagaatagctggggacattgggcaagagtgacaagtgacaaagagggaaaaccaggaaataggatggcacaaaagccaagaaaacatgtgctttaaagagcaaggtgtggtcagccctgctaaatgctgctgagataagaacactggctttagcaaaacagagttcataaatggccttgataaatgtatcctctgcagaatggtgagtatggaagtctgactggagagaggtgaggagcatatgtgagctgaataaatgtaaggtgaggacaataaccacaggcaaattaagaagttttgttgtgaggaaaagcagaaaaatagggaagcaggttgaaagaaatctgggatcaaaggaaggctttttaaagaaaaaaaaacctcacctatttkgtgacctatgaaaatccacagtcctcatcaagatttctgaaattcctgagaggaggcagtgatgataatgatgtgtgtgtatattagtaagtgtatgttggtgggggcagcagaaagaactgtaacaatggttacttgataatggttacctctgtggtccccacatcctaaatgcactggtatcctttctgttgtccaccatgtgaacttacattctaataggggagggagggcggttctcatgaggcattcagggtgggaagactttattgaagatttgagggtaagaaggaaaactcacatagcatactgtatggcaaaacaataaaaaaaaactcacataaaatatttcttctcttaaaaatcctttcagctatcctactattgggtggttttcaccagccctctgtcctccacagcacccaaccttctgttctctgactggttcctctcccctcctttctttctctcttttgttctgtcttttgtgttccctcttaggcacacacacaacaaaacaaaaaagcgtgtgtgtgtgtgtgtgtgtgtgtgtgtgtgtgtgtgtgtgtgtttgatgtagacttttcctgcagagccttactctttcctgtgtaggggggagaagggcacttgggtgcccactgatacccacactgttaccttttattccaaaccacatagttccctttctaaaagtaattgtggagccagttcttaagataacacattttccatcttgttccatatataaaccaccagacagagcgcctatcctattaaggcattcgacaagtgccagctcttgccttcctttctcagtgaggaaatccgagcaaagtcaagcattctggtagaatttcaacaaggtcttccacacagcagggcyttaattaatgtttattaagttgcataatatggtgctcttgggctaggaggatattcactgccttcttctaatcttagggttaaaagacgttaagagccacatttagtattaagaacagattgataggccctgtaactttacagctttttagaaagtgtttgtttattggtccgaaaaagttttgatcctttaaaacactgaaatcctagcgcactatgtttatgcagtctctctcttcttttcctaagagtattaattataatatgtaaaagacagataagtgagatgtgactttatgtggtcctcagaaacctgtgtcaatctgaactctccagcccttcacccaaagaatagtaacttataaatagacatcactggcaaagaaatttggacatactaacatgtgcccttaacttttgcaactttttgcacttctgaaaaggtcattcagaaaaaaaaagtacattaaaaatagcggtattatattctgagtaaagaatccactttttatataccaacgtgattggaacaaagagaaagatgcagacatcaggaaaagttacaacatgattgaaatcttgggttcaagggacccttttcttataacttacagatttagtatttaaacacatttggtccaagagaagaaaaacttggaatcttctaccacccttatccaatttactgttcatgtctgtatgtacatgattgaaaatataytggaaagccaaaccaaatgccccataaaaccagcgctactccaacagagtcagtgaccactgtagtgctaagggatatagaaagaggtgggacacagacaacaagcatatattaattaaatacagtttcgaccagctcccatatacctaaactttgaccaccaagtactccctgtcacctctttaaatttaatccttgtctttcccagtgggaacaaagtacattttcttatctacaaaaacacctcatcatgatgcaacgaaaataattgatactttctatttttagaactagtatatctaactccctcagtgttactattggcaactgggacttcagtttcaaatcacacacccatgtatgcaagcacacacacagaggcagaaatattgggagtggaaatcaattatgcagataatttatttattattgcttttttctcaaaaggtggggtgaagtaataaagagaagaactatttagataaaaatagtactttgtgcactaggaattaaacataataacacagacatggtgcagagaatggatgaattaaaaaaacaacactgcttcttaaagctcacctgtacaagagaagtcatccacacgaatgtatcctgggacacagtcacagcgatataacccaggaaggttgacacacacagtattggcatgacagtaatgcatcttagctgcacactcatcaatatctgaaggaaaaaaaataagtaagatcatggttagcaaaataatggaacracagtstaatcattttgcagataaattaaaaaagataaatgtccatagaagccaagagaaaaagtaacatgcattaaacacaaaagcttaggtgaaaattcagcttggtacgttagatcccatcctgagctgaaagtgtttccagaacgatgcatggtgagacaaaacaggtaagagcccaagaagtatgaagaatgaatttacaactattagtttcttaccaaggagaatactctttttaaatgtccaaattcaaggagttctgtgtccactaagtcgatatcaatgaatatttattaggtgtccacagtacatggtatagcttttatcagagggatcaagggaatccagcccctctctgcttgtatgtcttactaagacatgcttcaattcaaacgctacaaaatgatggtgtagctagtttctcccatgttgtactatgaatatagacaactgctgttgcctgatgcaaattaatgtctctcatcctttgacctggagctcctccccatgtgatagaataatgggctgattcaacaaaaagtcttgttctttttgggatggagttcagagcatcacctgctttctcataaaagttcgtgatagggattaaaataacctacaaccttaagcacagagtttagccttttctggagattgttttcaaaaacagatttatgttccttttactcagactgcttgtgtgtgatggttagagaaagaaggacatgagtacatcatgggaatccaagacagaaaatgtgagctctagttctggttctgctgattaatagtctatgacttgcattcaactactctgggtccaagtatcctcatcattttgtcccaatggtcaattctgaacccaatgttttatatctgtaaagatattatctaattcaatccatatgcaatcccatgagcaaaatacaaacactactcccgttttatagtctagaaaactggggcttagagaagttaaatatctggcataaagtcatcctgttagaacacgctagacctgggatttgaattcagaagttatttactattatttacttcatgaaagcttcttgaaaatggtgattagtcaaatacagtatttctattacaataatcattagagctttaatattattaatgtacagaaaccgaggataaaaatggctacattgagtcactaggaaactcattaatctatttatcttaaaagaaaagtaagttgatttatttcctaataaaatatattgaaataacatcagattcttttcagagctaaagatctgacagcctataaataaaagttattgcgaggtcattgagatctaagaaggagacccacagttagcaagactttcataaccatgaaataagaacaaaacaccagaaatcagtgaaataactcaggcaatcaacttcctgcaggccaaccacagaggttgcttcctggggaactcaacttccaccaagaatcctgatgaaggcaaggaattattacagtcagaccactggaatccaagagatggaaaactaaaagaaggagtcatagagtagtatggtgacattaagattttggaagtgatttagttattgttgcttataaggtctttggtaggacgatgaaaggttgggtgaaaataggcataacaagtgagaggctggaaacaagaagagaagccaggtattagagagggctgcttgacattagtgtgttgttcataaaatattaccagttttccactctctgggcacatagcacaattgtatttccccatccttttcaaatttaagcatggtttaaattaatctcatgattgatcatgaaatctgagtggaagcatatcacttctaagtggaaagattaagagccagcatccagcttaccacattttcttgtttctgccttgtaacccatggaagcaaagacatggagactctttcaacctgggcccccaagtgaggagcaagccaccatatacctgttgcataagcaagcaccatatacctgttgcatgagctagaaatatgcctttgttgacttaagccaccatgccttccctgattggtgcagagaatgactacaaaagttatctcaagaaaggatataattacgcttcatcttgaaagatgagcaagaattcatcaggtagagaatgaaggtagggaaactatagaggctaaagtttttgtctgtcaagttagaaatggaaagcatcatttagtcatgtacattcaaagaacattaattaggcttctactaagcccagaggcggactgatgaacaaaatgccacatagacctcgcagacaggcaaggcattgagcaaaatgtgtaataaattctaccaaggatgtgagatctttcaacaagaggaatttgacctactctgagagagtcagagaaggattctctctggtagtgatggttcatctgagacatgaaacagaagtgaaacaggccaagggaagagcaataacctaccagacagaaaagaatgtttgagaagacttaattacaaaaaggagctttgcgtatttgaaatgaaactggaaaaataagcttgggccagattctttgtggacattagtgtgctgttcataaaatattaccagttttagattccggcaggccttgcaggccgtgtgaaggagctcagactttcatcagggtagtaacacaattcaatttctctgttttaaaaatatcactctggctgtagtgaagagaattgattggagcagagtacgctgaaggctaaatcacattggtattttactcacagagatacagccacactgaactccatctcactctgctgggatgcccagccatcctttaagatgagaaactagtcaggacttgccttagaggcaattcaatcttcagcccatgggccacagctgccagccagcctgctgactgcaatgaatgtttccctgtcatggacccttgtcaacaccttccagagaaacctcctggctcatttttcttaggccatcaccaagctgctgagaggcctctgcctcatctagatttgaaggagttacttggctataacaagcttattttgagtcaagccagccaagctatttctttgtttmataagattccaaggccctgaataaaaatattttcaaaaatcaaacaagggatggttagaaaaccccagtgagaattttttacatggatttaatccaacccttgctctctacatgtcattgagactctgtgcccacacgtccctgatgctctgctgatgtgtttttgagtaggttttcagtttataccattattaatttcagctcttgcatatctaataatttcctggtactagtccagagaaagcactgaaataaagatgaaaagttgatgaatgtaccagaaaattaaaatgtcacaatcttgccttcattgcttattcttcatcatgtaaccaccagatataaaagctatcttgtggtaaaaatggtggggagaagagagagaaagtgaagtggagtactccagctgattctcttgaaacaagaagataaaagaaagaaagaaattggcaactctcacggttttgggatgggaacagaggatggaatggcaacacgtttgccaaaggattgcctctccatcctcagggaaacacacaacccagaagacagtttcaataggattcaagggtgtatcaaaagcaaatctgattataaacggagtaaaaaaggaattaacatctttagagagctgggctatcctgagaaaacaatcttcagaaatagcgaatgattgagattttataaattttatagatgagtctaggacaaaggctgctttttgttcacagaaaaaaggctctgaagggtattgaataattacaaaacaaaaatcataactccctaatgaaagaacaaactgacatttaaagagagaaattgagttggaccaaagcaattagtatgctaaccacagacttgaaatgcagtctgacctttgcccaggtggtgacagtactctgcctgaagcagatatcttgagcaatggtcatattcatccagaagccaggagacaagaagaggctaagcctgaagctgaatctcagagtggaagttgaacatacacaaatccatgttcacgctaaaaatttgaatcagtccagaaagctttactaggaagaaccacagttaacctgacatgtactggaaggacgaactattttaaaagcacatttttgggcacaggctgatacccatattctaagagtctaatagtacgtaccttataaaggaaaactaggaacagcccctggcaattggtaaatacccaaaaaatagatgctgttttttaggtatcagacactaygctagatactttatatggagcatctcatccttccatttatcttgactcctcgtggtaggtatctccatgccacgaaactgaggctcggaggttatcaggtgacttcacttgcccaagtacaaaatcagtaagcatagaaacctgggtctggatccaaacaatatgaccacaaagttgtcattgttctcactgtgccagttttagcactcaataacattttgatgctatgattatgttcgctgtagctgatgtttatgactgtgattatgttagatgcatcatgatgtgtatggaaacaaatagatctccaaattctatatccgtgtgcaaggccattcatgaatttgttctggcattacattctctgttaaaatggcaattctgctccgtgcatcactgcttccttggctcttttaaatcaaatccttatactttcacactttaggctccagtgacccaaggccccaaaacagacagaagcattttgctcccagctggaactcacagactgacacagcgtctactcataacgcttgagactatggaattagaaaagagtaacaaagagtcctaaggtttttattattaactattgttagagaaacatctataaaccccattgcagcatatatcatcttgagtataatggggcttaaattgcaattctttcatataaattgcttgtcgcttttgaaatattagagctcattttctggtggtcttttgaggtaataaaaatacatgatttacatccctccccaggatggtgaaayagtttgtttttgttttaaaaggtgtacttatggactgtaaaatgaaacttgatgtggcataatgattcttcatgtatcaccaggttccatctgcataagagttcagaacaaacacagactcaaatttggcatcatcatcattaaattagaaggcagggcctgggtaaccgatagaagcgatgcaaagaattctcttaataaaatgatatgatctactcagacttcttccataaacatttmctagaaaaagaacccagggagggatatacttaggaggggaaaaggcattccccactccctgtgtacatttaaaaaggaaagaagatcaacagctcttgagaacatgtttttggtcaagcactgtgtgcctctcatctcattgctcctaaccatcccagggattgacatcggatactacgtgtagagtgcctaaaatttcaaccaaggttcttatgactccaaagaggatagttgttccacactaactgttggacaaagaacactggattgacagttaagagtcaagttctattcttgctttttcatttagctaactgtggcactgggcaagtcacttttcttctcaagaccttggtttttcccacgtatacattcagggagttggaccagaaaccctttagccaaccatcacttctaaagttcttgacacattcaggtattttgtccacatcatacmagcctgcttctggagcagcttctcttgggccaccccctctttttgcaagaggagcttgcagatgttccagatgcctttcccaagatacaggtccaggaaaatactatctagatgacccgagcccccacactatttcttgatagctgtgtcaactgcgttgacatctcccctgaaaactaagagcaactagggtgaacaagcagatatccacacaaaagcatagctcttggcaagttcttcatggactggtaagataacttgcagagcaattttatcagacttgaacctactgactttgcagagatcatgagctataaaaacacagtggtgttggctaactggttggtatattagaacaatcactactttccctttgtgtcatactgatttttttttaattgggcctattatctctgatttgaacttataaaaatccagtgaggttttagggcagtgaaaatactctttatgatactgtaatggtggattcaggttattatatatttgtccaaacccaaaaaatatacaacaccacgagtgaaccctaaatgtatattayggactttgtgtaattataacatgtcagtgaaggtccatcaattgtaacaaatgttccactcaggtgagggatattgataacggataacagcaggaggtatatgggcaatctctgtgctttcagttttgctatgagcgtagaactgctctaaaaatacttttaaaattaaaaacaataaaaacatcgaggcacacaagatgtaaattattcttccctttttcagatgagaaagtaaagacccagagaaaatttccaacttgcccaaaggaacacagataatcattgcactgggaatagaatcaaagtcttctaattctgaaattagtgctttactcaatgttccatgtttttctataattatagcgtcctccctaaagcaaggggggaaaaacaaatgcctatagaacctaggaatataaatcaaatacctacagaagtcaggtaaaaaaatatatatgcaaaccatgtcctttccacaaagaaatcaagtctttcttatttttcttaacacagaaagccagctatctctctctctctctttcttttcctctttctcattttcctactccaagaacaatggaatggatctsttttataagagaaaaaacacgatgcaaggccaatggtaataaaaagtgacacttaaccccagtggcagaaaaacaataggaagagtgtggactgtagaaaactgtagctctagtgaaatagtaccaggaaggtgtgataagaaacagtgcttatatagtattttctatgcaccaggaagttttaagtgctttaaatggattaactcatttaatattcacactctatgaggtgcatattagaatcatcctcatgttacagatgaggaaatagaggcatagaaacatgcagtaaattgtctaaggtcacatagctaggaagcagacctggactgccaggagaggagttcaggcagcacaactccacagtctgtattgcctctcaggaattgtgggctaggtctctgatctttttagagaaggtgaaaatcttagcattattttttaaatattggcttcatatttttctccaaacattttgaaccaagcaaaacatagctatctatcagatttaatccatggaggtctgtgccttaaggcatgttatcacaaggagcattagtgagccaagaggagagagaaacagagagaaagaagaaagatgaaaggaagaaagagagggagggaggaaagaagggagggagggagggaatgagggagggagggaaggggaagaataaagaggacaggagaggagagaggacaggggaggcgaagggaacagagggaacccaccggagagaggggaagggagggaaggggagaggagggaaggggaaggttggggaggggaggggaggggagaggtaatgatataggagttaggaagaaattatttaggcagatagtgagggtaaggaagtccttggtaagattttccttttaatgaaaagcagcmccaaaatcaatttcttttctaacaaagagcaacccataaaatcgagctgcagacacagataagcaagctggaagcttgcacgggcaaatgctggcagctgtgccaataggaaaaggctatccgggccctaggcatgtccaacatggtggctccatcttctcctttctttgtcaaccacattcacagtagggagcaggcaacatggcaatggccaggtagagaccctatttgcataataaaagattaaggtggggtggccagcttccttgagtgtgacgtaaacaccacatctggttcaaccagtcttttggccctatgtaaatcagacactgtctcatcaagcctgtctataaaacactgtgcactttgccttgggcagaaattcccactttggtggccctctctctctctgcaggagagagagctatttctcttttctctttcttttgcctattaaacctccactcttaaccccactccacgtgtgtctgtgtccttgatttccttggcatgaggcaacaaaccttgggtatttaccccagacaatgatgctgcttcagtaagacaatctagggagatgcctrgataactgctatgaactgaactgtgtcccccccaaattcatatgtggaagccctacctcacaatatgttggtatttagagatggtgcccttaggagataattaggattagatgaggtcatgagggtgaggccttcacaatgggattagtgcccttataagaacagacatatagtgctctctttctgaagacacaaggaaaaggcaagtcagagagagcattcatgagaccctgaccatgctggcgcccagactatcagcctccagagatgtgagaaaataacatttgttgtgcaagccatctagtctatggtattttgttatggcagcttgagctgactaataatgataacataacactttacatttctcaggtgcccagtgaaatgaattttaacatcatcttctaacatatgcgtcaagcagatgtgttgattaccagatcaaatattttcagattaaaaattcaaacgacattttggtcatcccatgtatggtaaagaagtcttcttcaacaaggttacatacaccatgaaatacaaattagagtgttggattgctgacatttttcaagtattttccacatgtagctatgttaaatatttgggaattcatgctaagtcatttttatttccccttgctaggctcaatttcagaatcaaacactgtcataaagtaacatatctttttgtgcccctgggaatcacagcatacgaatttctagctggcactggaaaggcatcataagacaacaccccatgactttcttcccaacctggtatttctgacttttgagggtgtccataaaactgatgttaaatgtccacacggaaagaaacacattgagtgaagggtgatcaattcagtcttggccttaggatgtgcctcagcctacctcaatctgtcagggtgtgaactctgcttcaactgatggtaccaacaaacccagtgagtgcttccaaaaaggtccaatggacttaagacttttcagtccattgggcttatcaaagaacaccctagaaatgtaaaagctactatcgtcttttggattccctgaaattggaaaaggaaattcaaaaaatattgagaggctaccaaatgctataggccgtaaagtttccaaatgtcagtgggatgtggtctctgccttcacagaagctgtatcaatccagcagagaggcagtcacaagaacatgaactttgtaaaaacaataaaatttctacaagagaaagaagaggctaattccgttgaaagagactggggaaggaatcccccagaaaataataattgttttgagtcttgaaaatgcaagaaagatgccttcataaaacattgatggtctttcctatctctctgattccattagctagctactcttgttttgcaaagataaagaaaattcagtcaagagtaaacaagatgtaagagtgcaatactaccagcaaagctgtctatatcctctttatctctgattgtacctttttatataataataggtaccatttattaaccaccactttatgccaagcatagttttaagcattttgcatgtatcaattcatttcacctttacaagtaccacacaggtaggtattattaacatttttaccttatggaggctcaagagattaactagcaggaaggtgacctctggggaattttagcccctggcatctactctgttgtgcctctctacaaggcaaacttagcttcccctttaaaagtattcacatttcttggttaattcgatagcaatttcccacagttacttggtcaaattattcattcacccctcccctcaagcagtcaaaatagagtgaacaggctttaggcctttaaaaataaatgatttggtgccagaggtttagatctgattcactacaggatcaaattaaccaatgattaaacaccagactgaattacacaaacaaacaagggcctgtggacctatgagcaggtagttaatgaacacaacctcggttcattaaaaacattttgtcctctaccacctgtatgatgaatgatgatcagctraatgtactcaagaagactagttacgttactttttcatgtatttcgccatgtagagagtccttagatgaaataagcttctttaactgaaatcaaccttattcccaattccaaattcttatatatgtgactatatctatgaccttattatgaaaaccataaactactgaagctggttcttaaaaaatcactaagtccagactcctatgcaatgtgattgttgagacaaaaatgaatggatggggaaagaagagaaaacaattttaaatgcataataattattcatattatcactgaaaacacaacccaaaggtggaacggaaaacaccatgcaaaaggtgggaagtaggagagaatctggtgcccataatgtccagtggattttaagtcattttttaagtgaaagaactctgttaaaaataacaacaggtaacatttgtataacattttgcaagtgccaggtgctgtcctatattattaactcatttaatcctcataataaccctttgaagtaggtattgttttttagcatcccaagtctacagataaagaaattgagacatggagactaagcaactagtctaaggtcatacagcaggtaaggggcagagccaaacaaaaatccaggcagacctggctcctaatgtggtgcttctaacctctacaccatgcagtctcaactagagtgacattacctctaagggggtgaaaaactgggtctagaggtggtrgtaatggtggtgatattagatattataaaggtctgtggttccccaaagggccatgctcatgaacagatagtgtatctctggtaataaaatttcatgggacagggataaggtaaaaatgtttaaaagactccttagggaagcaataattttttaacaaaaaggttaagaaacattgtactttggccgggtgtggtggctcatgccagtcattccagcactttgggaggctgaggtgggtggatcaccagaggtcagaagttcgagactagcctggacaacatggtgaaaccccgtttctactaaaaacacaaaaattagctggtcacagtggcaagcacctgtaatcccagccactcaggaggctgaggcagattaatcgctcaaactcgggaggccaagatcacgccactgctctgcactacagcctggatgacaagagcaaaactccatctcaaaaagaaagaaagaaagaaagaaacgtgggatctaattaaactaaagagcttctgcacagcaaaataaactaccatcagagtgaacaggcaacctacagaatgggagaaaattgttgcaatctactcatctgacaaagggctaatatccagaatctacaatgaactcaaacaaacttacaagaaaaaaacaaacaaccccatcaaaaagtgggcgaaggatatgaacagacacttctcaaaagaagacatttatgcagccaaaagacacatgaaaaaatgctcatcatcactggccatcagagaaatgcaaatcaaaaccacaatgagataccatctcacaccagttagaatggcgatcattaaaaagtcaggaaacaacaggtgctggagaggatgtggagaaataggaacacttttacactgttgttgggactgtaaactagttcaaccattgtggaagtcagtgtggcatttcctcagggatctagaattagaaataccatttgacccagccatcccattactgggtatatacccaaaggattataaatcatgctgctataaagacacatgcacacatatgtttattgcggtactattcacaatagcaaagacctggaaccaacccttatgtccaacaatgatagactggattaagaaaatgtggcacatatacaccatggaatactatgcagccataaaaaatgacgagttcatgtcctttgtagggacatggatgaagctggaaaccatcattctcagcaaactatcacaaggacaaaatccaaacaccgcatattctcactcataggtgggaatcgaacaatgagaacacatggacacaggaaggggaacatcgcacactggggcctgctgtggggttgggggagkggggagggatagcatttggagatatacctaatgttaaataacaagttactgggtgcagcacaccaacatggcacatgtatacatatgtaactagcctgcacgttgtgcacatgtactctaaaacttraagtataattaaaaaaaagaaagaaagaaagaaagaaacattgtactttgctatactgtctctatctggaataatacctaacttggaagaacaatatataaaatagaattaagcaaagctgctatggtatagcagagtcttgggccctctatatgtggttgggattagaacaagccaccttttggctgttgtgaataatgctgcaacattggtgtacaagtatctcctcaagtgtctgctttcagttccttggagtatatgtctacaaatggaattgttggatcatatggtaattccatgtttaggcttttgagaaaccgctaagctgttttccatattgtggttccaccataaatttgaggtttccaggagctgggagatttcaagagctgaagggagaaaagattggacagtcgatgcttaatgagcacagagtttctgtatccagtgataaaaaagctttgaaaatagcgatgattgttgcacaacattgtgaatgtaattaatgccactgaactgtacacttaaaatggctaaaatggasgccgagcatggtggatgatgcctgtaatcctagcactttgggaagcctaggcgggaggattgcctgagctcaggatttagacaccagcctgggcaacgtggcgaaaccctgtctctactaaaaatacaaaaaattatccaggcgtggtgctgcatgtctctaatcccagctattcaggagtctgaggcatgagaatcagttgaacccgggaagtggaggttgcagtgagccaagactgtgacattgtactccagcctgggcaacaaagcaatactctgygtctcaaaaaaaaaaagggctaaaatggcaaattttatgttctatacattttagcacaatttgtaaaatactgtaatatactgaaatcccattgatttgtaccctttaaatgggtaaattgcctagtatgtgagttatatctcagtaaagttgttgaaaaataaaaagggtaccaatcccaggcctgtatttcttttcactcagaggacaagaaaacaggcatgcccctgagtagctgaatgtcacatagctggaaagaaaaaaatgtgacaaatagttcaaatgccagattttctacctattagtgttactgtgggaaagttccctaagatttctgaacttgggtttccacatctgaggaacacagggttgttgtgaagatccagtgagctggtgcacataatataccttgcaccacgtcttatgcctcaatacatgtctcaagctgctgcctctcatttttttggttcaaaggaagccattcttgacaggttactgggctttgctagccagccttggggacctaagcgaaagccagcgtctcctcaagttggtgttgccacccgtcagtgattaccctgactcatccaccgagccagccaatgccccttgactgtcccttcacaagatgagatgagagaggcattctcttcctccatggactgctgctccctgctgacaaccccagggctgctgcctcctgctcaggcaaactgacttttccttttccctgcctgagcccagctgctattccttggactatgccatgggatgacagctgatccgtgtgtgtgtgtgtgtgtttgtgtgtgtgtgtgtgtgtgtgtgtgtgtgtgtgtgtgtgttgttcagtgtctttttccaataaattgtgaaagaaattaaaactcctaagtttaaaaaaactcagaatttatgccttttgagtggaaaccttctttaggagtagcaaaataaaagagacttgaataaataaaaggctgataacaaagatgaattggtcgtcctacattaggtaaaggaaacgagtttttggaaaaatacaattaaaatacacaaatataataataataataattttctgaaggttaaaaaatgctgagatcactccttttagatatatgttgatgtctaactcagagacatgcctgagagttacaaacaaattttagaattttaggatacacaaacacacacatacacgagaggcagacagagagagagagaagggtagagggtagcaaaggaattgggggrtatttattatcaaatgctgatctaaaaagttttactgggggaaaaacctggagtaaaaaaatgggccagagttcaatcaatgacagcttcttcttcctcacacacctgtgaccctggagcacctgcttcaacataaagaccttcaacaaagtggtaccatcagggaaaaagtcccactggaaatttccactggtctttccaaatactactctactgttttgggtggggtaggacagagccaggtaggtgttttcactatgagtttctgagggtgagagtgtttacctgagtcctacacaagcccttagatattcacctgctcttaggagctcagctgcccaggagctatgctgggcgatgaggttacagagattaggcaggcttggccatgcctttcaccgttaataagaagagacagaggtaaaaataaaggaccctgacatgtacgaaatatgcatggaactgtcacaagaaggtgataagtaatcctatctagaaaaggtcgtgacacaagatgtcataaaagatggataaaggagaaggtaagaaatggaaaagaaaagaatacctggaaaaataattaccatagaaaagacacagggcatgaagaagccccacccatgaatgtgacttcacagaattggaagctggtgttaggaaccagaacttagctgtggcataaggaaggtcagatccaggcagaccttgaatgtctttagagtgtaaacttcatcctgaggacaatggggatatatgctctgcatgaaactacaaactgatcagggtagctttttttttttttttggagttgggagggagatttttaaaaatgtttttctttctttcttaaaaaacacaaatgagatatgtgcatttgagagcagtgttttcttgactgcttagttcactgttctatgcctctgaatgaatgcataaactaatatacaattatttaagtttttaagctaggaaatgacatgataactcatgcagttttaacacattgtaagayaaaataaatctttctgagtttctcttcaaaggatttagcctgttaacttccttatcctttgttctcaaactcaactttcttattcttccttgcccctagttgctgtaaacagcctaccctgcttcccgtcagctctaatcaataactcacatctgttccctcggctacctgtacccattgttcccccgaaattgcacatctcacacactccacctctgtacctcacatccccctcccccagtacatttaggaaaatatgtacaagtagccagttgggtcagttcagattgtgcagtccatccccagcccatagggagggacaaagagataaggactgcgtccaggatataaaaaccccctggtgtcctttgttctctgtgctcttgcaatcttgactgatgcgagtggcacccttctgcagaaatacattgccttgctgagagaattaaacttttgcctgagtgctggttttacttcacsgcaccaagcatttattcctggagcattttatatccaacaatgtcattttgaaagcaggatgaagggtaaatctgacagtcagcagagcatcggtgactacgttaagaacagtacaagtagaatgaacgtagaaatctggctgcagcgagttgatgagtggagtgagagtgtgcaaaaacttkgggctgaaagattctacctggaggttagtctgaatttatgattttaggagtagagtagttaagcaatggcaaggtcaagagcattaggaaggccaggggtggtggctcgtgcctgtaatcccagcactttgggaggccaaggaaggaggattactcaaacccaggagttgaagaccagccaggacaacacaacaaaacccgtctctacaaataataataatacaaaaacttagccaggtgtggtggcgtgtacctgtagtcccagctacctaggaggctgaggtgggagaatcacttacaggaggtcaaggctatagtgagccatgattgtgccactgggtgacagagtgagaccccgtatcaaaaaagagaaaaaacaaacaaaagagcatatggaagtggtatggagtgaagatgattgtagtccccaaaatagaaatcttcaaggctggacttctgcctagaatgatggtacagtttatgatagagataaagcctgagcaggtaggtgccaaagacctcaacaaatgagggggagtggccaggagatttgtcactgacagcaattagaagggataacaggtgttataagcagatggctggggcttcagaagagaaagggttttgtatgaggaaggaagaaattactctagatgcagcaaagctgtctttggaaaagttgatgctgcttctgggagaaaatacaacctccactcagagagctgtaggagagctgtatccccaaaggaattcaaaaaggctgagagacagagggacattctgtgaagagttcaatgaggatgtaggggacgtttttttacaatgcaataaggtttccaaagaacacagtgtggtgggtgggaaaagaacaggcagagagaagaatcagctcctaggacacacaaaaatagaaccggacattggcgctagaagagggtaagtcataaaaaggcctggtgatctgggtagtgggcaaaggcaactgatatggcttggctatgtccccacccaacttgcatcctcaattctcacatgttgtgggagagactgttgggaggtaattgaatcatgggggcaagactttcccttgctgttctcatgacagtgaataagtcttatgagatctgatggttttaaagaggagttcccctacacgagctctctctttgcctgctgccatccatgtaagatgtgactgcctgggtgcagtggctcacatctataatcccagcattttgggaggctgaggcgggtggattacctgaggtcaggagttcaagaccagcctgaccaacatgctgaaacctcatctctactaaaaatacaaaagtagttgggcatggtggtgcatgcctgtaatcccagccacttgggaggctgaggcaggagaatcacttgaacccaggaggtggaggctgtagtgagctgagactgtgccattgcactccagcctgggcaacaagaacaaaactctgtcttgaaaaaaaaagaaaaaagacgtgacttactcctcattgccttctgccatgattgtgaggcctccccagccatatggaactgtaagtccaattaaacctctttcttttttaaattgcccagtctctggtatgtctttctcagcagcatgaaaacaaactaatacagtaaaatggtaccagtagagtggggcactgctgaaaagatacccaaaaatgtggaagcgactttggaactgggttacaggcagagggtggaacaatttgcagggctcggaagaagacaggaaaatgtagaaaggtcagaacttcctagggacctgttgaatggctttgatgaaaagcctgatagcgatatggacaataaggttcaggctgaggtggtctcagatggagatgaggaacttgttgggaactggagcaaaggtgactcttgttatgttttagcaaagagactgggagcattttgcccctgccctagagatgtgtggaactttgaacttgacagagatgatttagggtatccagtggaagaaatttctaagcagcaaagcattcaagaggtgacttggctgctgctaaaggcattgagttttataagggaagcagagcataaaagttcagaaaatttgcagcccgaaaatgtgatagaaaagaaaaacccattttctgaagagaaattcaagccagctgcagaaatttgcataagtaatgaggagccaaatgttaatccccaagacaatggggagaatatctccagggcatgtcagaagtcttcacagcaaccccttccatcacaggcccagtggcctagaagaaaatggttttgtgggccargcccagggtcttcgtgctatgtgcagcctagggacttggtgacctgtgtcccagccttcttcagccaccgwtgaaagaagccaacatagagttcaggccatggtttcagagggtgaaagctccaagccttgacagcttccacatggtgttaagcttgctagaattgaggtttgggaaactccacctagatttcataagatgtatggaaatgcctggatgctcatgcagaagtttgctgcaggggcaggacactcatggagagcctctgctagggyggtgtggaagggaaatatggggctggagcccccacacagagaccctactggggtactgcctagtggggctgtgagaagagcgccacaccatcctccagaccccagaacagtagatccaccaacagcttgcactatgtgcctggaaaagatgcagacactcaatgccagcctgtgaaagcagcctggagggaggctgtaccctgcaaagccacagggtcagagctgcccaaaaccatgggaacccacctctttcatctgcatgacctggatgtgagacatggagtccaaggagatcactttggaattttaagatttgactgccctgatgaatttcagacttccatggggcctgtagyccctttgctttggccaatttcttccatttggagtggctgtatttacccaatcccgtacccccattgaatctaggaagtaactaacctgcttttgattttacagactcattagtgaaaggacttgtcttgtctcagatgagactttcgactgtggacttttgagttaatgctaaaatgagttaagactctgggggactgttgggaatgcatgactggttttgaaatacaaggacatgggatttgggagggtacaggggtggaatgatatgatttggctgtttccccaaccaaatctcatctcgaattcccatgtgttgtgtgaaggacccagtgggaggtaattgaatcatgggggcaagtctttcccatgcagttctcatgatagcgaataaatctcatgagatctgatggttttaaaaacagaagttccactgcacaagctctctctttttgcctgctgccatccatgtaagacgtgacttgctcctcattgccttccgctatgattatgaggcttccccagctacatggaactgtgattcgaattaaatctctttcttttgtaaattgcccagtctctcgtatgtctttatcagcagcatgaaagcaaactaatacagtaacagagatggctgtatggctacaggaggctcaggagaggatctgaggcaatatgaaaggcctgacgaacctggcagtgtatggttcagttgacaagtacaatctttgttggggaccaaattgaatgctagagagttggccaaagaagaagtacaactagtagtgactgcatcatgataacaaaaaaataaaaataaaaaaaatcaatcaatcagtaggactctgcccaaatggcaaagatggactttgtgggttaccagaataatccctacagtttgtcatcttgcatctcagtctggggccctggcttcagtggtatgtttccccaagttcacacaggctcatgaaagctgactctgcacatgtcttcccaaatccacagtcagtgatttcacattggcctgttgatggaaatatttacaccaaagaaatcaataaactacaaatcgggcttttcctcctcccacccctgaaccaatggtaaacattcagtagctctccactgcctgcctagccctgttcctgttgctcacagaaaacaagacttgtataccagactccaagctgactcttctctgctctgatcccgccagaccacctagaagagaattgtctgttcacctagatttctgckttcatctgcatctagattctcctttacatgctatcatcctagagctatccctaggccttctaggtcccaaagcctcccaactacttcccatcagcaagttctctagctctcaggtctccacataatattaaccatagataagtagaytttgatgtagattcagcttctgtaccttgctatgtaataacattgcacacattcattttgtctgtttccttttctacaaatggctattttgtagaaataccctcactggatttttttgacagcaaattgatcaggtatgtaaatttcctagagctgtacctaaaatgcagatgggcctcaatttttctcctctctagggggcatatattatcatcatcatcattatcattttaggaaatacacagtttctttctgcacatttcccacgtgccagacattgttctacaccctttacatgtattaactcatttaattctcactagaacctcatgtaatagtatctttattcattccattttacagatgggaaaaactaaggcacagaatagttaagtaacttgcttaagactgtacagccaaaacctactagatccaggtctaatgctagtcagccagctacagggtgctgacccttaaccactgagctattgtccctatagacactgttcccactgtccttctactaaccatgaatattttcagtctacctaacttgcccttctaatccaagctgctattgaccaaaatcctgaactacttactgagtcctattgacagatttgaaccaagaaaatgaaaaagccatccagtagatattatgtgttttaaaaaaatcacatcaccttggaatactcggtgccatttctcatcctgttccttccatctgggatgctctactcacctgttccttgagcaaatatattctcatccttcaaaatccatcttgagattcactccacaaaaaagttctgccttcccatcctccatccttacactaggccccctatggtaccttgtacacgtccttgacttagggcctaccctgagagaagaatcaccatcccttctcagtttttatgaagttaaattctgtaaagttcaattatattgtcattgtcattgtgcatgcatctacttcaatggcctgaattttttttaaacacaggggatgtcttacatttctgtatctttaaccctcagcacacatggaatctagtatcgaatgtgggctgaataacatttaaaaacaaatgactaaggacaaataattggatgaatggatggatagctggataaacaaacacagcaatggataagacgtatggtgaatatgttatatattaaaatcaaaatcaaaattagaagcatggtgagataacagtagaccctagaatgatcattttccctatttgcctagtctgttagttgaaaatgcattaaaaatttaaaaatatctgctctctaaagttgaaaatgaattttcagattatcatccattttatccatgtttccatgcattcgctgttggcttagaaataactttattcgctgagtccccgttctcacataactgagttatttaaaccagagttatataaaggccagtttttaactagctggaaattcctcaaggcattctttataatgctcaaaaaatgttctgaggtctttatctaggctgtttaaatagagggggtaaaatctaccagataatgttatatatttcccagctccagaaaagatcttcagagaaggggatatttatcattgaggagatactgagccagaaatggacctcctgatgttgcctgaggcaaaatctatgtcatataaaaatagctacagtttattaaacacctattatgtgccagaaaatgtgtattcatcatctttaatctacatgattctgcaaggcattttttatttttcagaaaaggaaactaaggtttgaaaagttaagtttcctaggctcttatgcttagcacatggcagagccagggttgaaatccaagtctattttgttttgacactccaggctctttcagttatatgatatccataaagagattatatccaataataggacagttgattaagaaaaatcatatatgtcctatatctgggtaaagctctcatttgcctcccaaggagctggaggttttgcctcaattcaaatctcacctaacagaaagaatcccccatcagccttactcatgaaggtatttgttaagatccacataaaaataagtgaaaagtaagcaggtcgaggtagccaaagtttaagcagacctctctgcatttatggcattgttctcaaccctcctaatttgtcttgctcaatataccaggtctttccatgagctcaacgtcacacagctgcaaagtgacagagccgagcccaaatctcaaacccctgaccccaagttcactgctgcttgttagaaatacatggccacaccatgaacataaatgctttttttaatagagccaaaatagctctgttagaactagagaaataaacactgaacaggcaaatagggagaaccccaatgcctttttctattatgtatgatccacatcatggctgtactatattttgcttaccctcctagagatgagtgttaaccataattttgtggctaacaccctcaccatcaacaacaacaaatgaggtcgttgaatactggaaagatgaactagcctttataaacccagctgagaccaatgtttctgggccatttaacacccattctttgaccattcctcttctttgtagactctatttattttctgtattattgtacatctcaaactacaggaagtggcaaaatggaaactaatctccaataagagatgaagatagctcacaaatacaccatggtccataggaagccctgcctctctcctccactatagctagtaagaaatcactgagaaactgcctgccatggcagaccctcactttcaaataagcaccatacgaaagcctaaccacaataaaagcacctcgtttgcccgcacttgttccaggaaatggccaaccacagaaagtcctccatccctaagattgaacaatccttcctcttttgaaatatccccaaatggctagcttgctccctagccatcaaccaaggactaccaatattcctaaagatgaatgagaaagtctcctctgcgtcctaaaatcgcaccctatagaatgattgccaatcagagactgcctcaatctttcctcttttaattstataaaacttactctcctttctgatatctttgcagcttgcagaaacaaataacggcagatggattaccttgccacaagtttacgaataaacagsctttgttaattttgtcttggtctttgatttgtttccgacaaaatttatatagttagcygtacaaatatgcatcctactgaggggggtttgtttcattatatatagcccaccattgctgtccataagaaaccattcaaagagagaagacatgcaccacaggggagaagacattcatccacaattatttttccttctaatctaattgataattttatgtaatgctatttaaatgtttggatgaatttcaagggattagcactttggttagttttcataaaagcttttcactcaccttggagaatgaaaaatgagacaaattaatgtaattaaaccaatttccacttggctactacatgattcacttttgtaagccattacatctgattcctctattggctcaggatrgacactgaattattatactgaaaaataagtaattcttgtcttagccttgctttactctaagcaattatgctaaaatagcactcagcatttttatctatgtcccatcccccattcatgaggggccacagtagggaggcttcacttctctcttttttatgtctaatactcttatactggctgtgtcctgtctctgtgctgtgatattgactagcctctcttaaaattcacatagatgctatcttcaaatgataaatcrtagcaggctacccatataattgatctcaaattccccatgaccccaacaacctttagctgtggcattttgaaggacttcgtacctctttgaaaaattaaatgctgatgaaaattctgatggggtatgtctcactctacctatgtttcaaatctcccaaagagtatgaacattgccctctataaccattttgaagatacactttaaaaaaattagacgtgaggtatgaatagcagttcgtggtaagaaactaatactttctcacttcgcagctaaaaaaaagtcacttgacctgtataggcagcataagattacatgcagtataagatggtgtgtaaagttaagaaaaaaatgatttgttgctatcaatacaaatctgttgaatttgtctgacttatgtgtataatttacccaagaagagcccaaatgtggtgatagaaaggacatatatgggttttggagccaaaggcaggtttgagtctggactcactagatttgttgttttaagaaaataacttctcagagcctcagttccctattttcctcatgtgaaactctaactgtactttgcatagtaattatgataatgagaaaaaaaccattgtgaaacacagatccagcaatacagaggcactctgtcaatatcagtttacttctatcacgattattattttgcccaaactgctgctatgtatcttttgaagcacattctctatgtcccggagggtatggtcrtggtcatctataaactcctatggccaggtacataaaatctagaacaatagcctttattgaagctacaaaatttattcagtgatacacacacacacacacacacacacacacacacacacacacacacacagagctactgggactcacagaamacaagctgtcatcatagaagactgatagacaatttgctttggggaattagggatggcaaactttaaaatctgcactatgacagggattagcagttttcttataaagggccagatagtaacagtctttctggaacacgtctctgacacaactgcccaattatgccactgtagcataaaaatagccataggtaatgcataagcaagtaagtgtggctatgttccaatcaaacctgatttacaaaaacaatcagctatataactaatacatatcaattttttaaaaaaccgtcaggaggccaggtttggtacatgggccataatttgctgactcctaatctaaagggaaacaattcgcctggactcaatatctcatactccctccttcctgctgcatttcagctgaccctggtgtttaaagcaccttatgtcccaaacaacttcccaggacatcaggttttgaacattcataaatgatattagagaaaagcaaagaagttcttactggccttaacataataatttctcattcacatataataatatttgtcagtatgataatagaaaaatagagaataaagatctctttccataaattttggcattctgctataatttgcaactctagtaactagcaaaatatttttttttttcttttcagatcacaccagcattaaattccttagtcaaaacctaaggcgactcaaacaaaaaaattttcttaaaaagttccaggatatgaacataaaatttcctcttcctatcttgttcttcacttgaagtttggtgaaaattttgattctacttgttttgctcttgacaatgaaataaaaggaacattttcattctgctacctccaatgtcaaagataagttttatatgtagttaaaaccattccactgggccaggagtggcgccttacgcctgtaatcccagcactttgggcggccgaggcgtgcggatcacgaggtcaggagatcgagaccatcctggctaacacggtgaaaccctgtctctactaaaaaatacgaaaaattagccaggcgtggtgacacacgcctgtagtcccagctactctggaggctgaggcaggagaatcacttgaaccttgaactggggagggggaggttgcagtgagccgagatcgttccactgcactgcagcctgggcgacagagtgagactccgtctcaaaaaaaaaaaaaaaaaaaaagatccattaagactcaacagtctacttgttattcattctttttctcttctattcaaggttttttctatctgcctttcaaatcagaagctctttatctgaaagtcacactgagttttatcttcagttagaacctattttagggtaaaagttgataaagggttaatgaattattatgaaaggaaatgaaagcttctaggatcaacaatgatgaagtaagaagttcccacgtgtaactgggtacatcaagctttccgtttaagttaatccaacgacagaagccaataggtgattgttgctggtggtgggtgaagattccggtatcagactcagcccaaattttatcttttagctactatattgatgacctgaaaagacttctaccaatgctacctaccccacacgtaaagataatatttagtaaatgaaaatactagtgcttttagtatcctgcaaaaacaaaatcttcttattctaaaatagttcatgtgcccaaacagaaagtaaaaactttgtttaatgtcactaggttcaatgtttgaaaatcaagaggctgaaaaaaaaagatacagaacactctcctttctttctaaatcatttgccattttcctttccttaggaatattcactccaattactgagaacaaaacagatctggtcaggtgttagggtatgacacagcccctgcctacaagggatgagggcaaggtacctgtcatacgtggaatttacagagtttcctggttcattcaatttatttattcatccaataggcagttactaagtacctattgcattctgaaaaatggagaatggagagatgagcccttcagaagctcacgggtgtgaaaacataaactccaacagcttgatggtgttcctgcttcaactcattcctcaaagttcactcttcccacagcctgagccacttttgtgaaatacataaatcaggtcatacccctctcttccttaaaatgctcctttgctttcccgttacatttagaataaaatccattttttcttctggttcttctacgacctgtcccatgtttcctatcaccttgcctgtcctgtcccctattctactctaacaatgccaaatttctatctgttctttgaatgtttcaaattccttcttgcattggggcatttgttgttgtcccctgactagaaaatcgttttttgttttttggtttttttttaatagacaaagtctcacccaggctgcagtgcagtggtgtgatcatggttcactgtaacgttgaactcctgggctcaagtgatcttcctacctgagccttctgagtagctgagtctacaaatatgggccaccaaaactggctaattttttaagatttttctgtagaggtggggcctcattagttgctcaggctgatctcaaacttggggcctcaagtgatcctcccaacttagcctcccaaagtactggtattataggtgtgagacactgtgcccagactaaaataaactttgaccaaagctagtcccttttatgtctcaactcaaaagtcacctctaccttttacatcatcctgaaagtatggagttcatttattcactttttatttgtcacctatttcttccactagcatgtgggttccatgacagtgtggctcattgtgccccccaatactcagaataatgttgaacatattataggtactcaataaatatttagatgaatagctaaacatgtaaacacagaaataatagttaacatttatttaattttaggtgccagatattgttataaatatattgtatgaattatcacctttaattcctacaccataaaagataagtatgtcttacccccattgtataactgaggaaactacatattatgtggtcaagttctagtccagggtcactctgctaataaatggcaaagctaggattcaataccaggtagtctaattctggaggatgtgcgcttaaccattatcacactgaaaaaggaaaatcctggacagtgtatttttaatgtctctgggtctatgcacagcttgccactaagctctcccaactatagtattgtgagagggggtagaaacataagacacaaacgcacagtggttgcgctatcaagacaaagggaactaaacacagtaagatgactggcaattccactactgataaaccacagactaataaatggcactcatccggaaatgcccctggtgcctctattctcttggtatgcccctagagttagccctgcaaaccaccatttcacccagggccagagaagtccttgatcgtaatgtggagagcgagactctcatctctgacctactgagcccagagccaacttcataaatcaataaatcaagcgatcactataagagttaacatctattggacaaaatactatgtttagaaagtattcattatctcattttatgctatcagcaatcatatgcagtaggtgccattataatcactctattattagataaagaaattgctggttgaatggcatattggtctattttacagcaattaaacagccagaaaaactagaaaatggagatgatgcatacataaactatctttgacactaacattgatgcacatatgtccaggacctcagtgttcaggagaagctcaggacatagcatcactattatctgcaackgcaatcgtggacaaacaagggaaacaaagcatctcttacttacaatatttcaatgtcatctgcctgaaaatcaccataataacaatataaacctgcagtaattacaatgagaacgctcactgtagtcatccacaagagctccctggggtagtgccaagtgcagcctacaccatcatgatcatgtccctgccaagtcatttctattttataaggctccttgtatatttcttaatgaaatcccaaaatacgattacaaaaatggtaataacttttgccttatataaattaacacttttaacataatagtgcattttcattttgtcattggcaagacaataataaaagtatttaatgtgttttaatttatatgatactacatgcagtgagggacagtaataagacccaagtttaaagttgaatgacagatgaacactttcaatactctcagaatgtctctgtagttcaggtataagctgacagggacatatacatactctaaactaagatacagcccagatctagtttattttttaaacttcaatgtcttcccagtggctgacaagcaaaggctagatgttattttagcattcaagatctgtgtgaatggtccttccactcaccctgtgatagggcttgaatcctatcacaatttgtattgtaactgccaacaagaattgttctgagaagcagtgtgtaacctgttaacactggcaccataaggaatacagctagcagtgtgacctcgagcaagtcacttgtttctccaagcctccttttcttccgtaaggctcttataaaaggaaatttagcagtaaagtttgggaagactggtccttgactgggcaaaacacccctataccctctgacctcagaccatttgatgccatatgagtaacacacacccagcaatctgctacgggctatcttttgtctaccacacttctgatcattttcctccaatggccccgtggttgacacctttgatattttttacctaccaatggccccataaaaacacatactgacttaattcttatgtatggacttgctcctttctctctacttcagccaagagctggccacatgcctactcttgctgactagcctggagattcagagacctctatctgaatattcattattcaagccgcaggctctagctgaccaacatagtctatccactgtactctgcattcttattaatccaatttcctgagccacttctctactaaaagtcaggctacaggaaaaataaagagtagcaaatagtaacaataatttaatttctacctagcactatgctgtatgttttcgcaccttaaataaggatttttaaatgcagacgttgggtagggtgaagcatttcagttgaagaagatatgagaacaaagaagactaagacacagagtgagaatatagagcttgtgtaggaaaaattaactgtttttttggggggaggggaatcatgtacataaatggaatagacagagataagtctgagaaaaaatagcataggaaccagatcctagaggctttcaaatgctagagcaagatctggcctttgttgggaagagaagactttgaagtttaaaccacgaacttcctggatttgggctgtattttagaaaaatgaatttaacagtatagagaggatggattggagagaaagaactagcagtgcttgtttttatgcagatcktcatgggaaaattgtcatataatgacacggtctctctctgcatctttgattactatgattaactgataagagactagtaggtattctgcagttgctgagaaatgtatgtaaatatgctatttccatagaatcaccttggtgcttttctaaattaatctgtactttcagagaaaatgattttttcctgtagtgcatccccatcaacagcatcataaaatagtgtgtataaaatcctgttcacctgaatggagccctctaggagttcaggatgcagccccaacaagcatgtcctaattcagctgcctaaaccaagactccctttgatgccgagtgccaggaaaagaaatgatcgccattgtaaagaattcagctgtaattttcaaggtccccagaggcaatacaggtgaagtattaagctacaatagttcaagttgctgttaggaagaaaatggtacatttttgtgagagagtatggcgtagtgtttcagagtataggctctaaagccaagtggcctgcgtctaaatctcagttcccccatctgagtaaattatttaacttctttaagggctatagtagttcctgtctcataagatcatttgaaaaataaatgagataaccttcataagtccctgamcacacagttagtattcacatgatttaatttatactttttacgaagatcactctggctgcattagattggatgagtagaaggagagatatggagagcagaaaggagggtatttaactagttcacaaaagagatcatagcagtttgaacatgggtaaaattatatgaatttgagacacattttccagagaaactagacaagacttgctagatgaagtcaagaatgactctcatgcttccagtgttcaaattggagggacggtgctataataagctgagatagtaaagactgccagagatatatttagagtagaaagttagaagttgagtttaagacacactattttgtgagctgaaatagtaattgggcatttggatacaaattcagacctcaaagaaaagatatgggctggagatgttgatctgtgatcaccttcgtttataggggggaaaaaaaggaaaagagaaaccaggttggaagcctagaaaacttcaacatatttagtttagatagaacaggagcctgcaaagattattaaaaaagggtaattagaaaggtggcaagggaaacaatagaatgtgttaccacagaaaagagaagaaagtgtctcaagaagggggttggtgattgacaaaggtcaaatgctactgagacatcaaataaggtgacagcagtgatatgtctcctggagctgccaacattaagtcagagaagagtgataaggctggaaatggaattggaacagtttatggaatggatgtggataaagaattgacaacaatctacagagccaattctaagaaaatgacttgaaaggtcatatggatgggaggaggatgtgggtgacagagcaagatcctgtttaaaaaaaaaggctcaaagaagaacaagttaaaataataaggtaccattttatctctgtgtgtgtgtgcgtgtgtgtgtgtgtgtatgtaatatatatcagattggcaaagatcatataatccaacactactttgttggcgaggatgtaaagaaagatgtactatcatatgttactattagaaatgtaaattgctacaaattctttggaaggcaagttggaaatatctatcaaaatttaaaatgtacatacctttgacatagtaatccacttacaagattatttttctacagataaacatatgcatgtaccatgtgcacagataggtacaagtttattcactgaaatgttctttttggaagtaaacctggaaaaaamctaaaagattcaccaatagtgatctgtttaaataaatcatgccacagccacactaagaatacaatataggcatagaaagatataatatgattctatatgttgcacacatgagactatatccaacatactaagtgaaaaaggaggtatttaacaatatataatatgcctctagtttataaataaaaagggttatatgcataaatctatacgtacatattttccgaatattcatgccagatcatgaaaaggacatccaagaaacaagaaaagtaattatttctacacagggctgttggtggtctgagatagcaagaggtagctatattaacacatttcattcaataatctcttttacaagttaaatttttatgacgtgctgtattgctttttaaaaataaagccattatatttaattgaaatgaaaaaataagacatagacaaatactttaaaggtataggaatataatgggaattcattgaggtaatactgtaaagcacttagcacagtgtctaggacatttcaaacccttaataaaaatatttactgtcattatgattgtaattattaccttgttttaatgtagtaatgaatcacacatcagtatgttcaaaaccaaggtcatcattttctctaccaatcctctattcccctcctcatccagaaatcactttcaaaaagtaccacccacatcactaagaaactttattatcttctactgtaagtggcattcatagcactttagcaactgacaactgcccctttcaattttccttaactttatttccaataacttaccttctgttctaggcagtgctatagagcacacttcctggaatgacaaaatatgcaaagatatgaatttatttcaaaatatagttttggccatgtggaagtttggcatatagtgctgtgtttattcccatatattctagtaattctaaataatttgttactcatgttttattctttctttgaacaatttgttatttaggaggtttactttactagacgtttctcagtagttgtggtttcttggtttgtggaaacttttgtcattctttcagagttttactgtgtatagccaaataattcctggtttacaaacatgactagtgttttctactatcattgttggtaatattccatgaacacttgaaaaataggaatattctctatagggtacaaattttgagatatatgtggtaattcacctttatgaattatttaatccttattcttgtatttattttctgtgtcgcttgttacaaactgagaacggtgcattaaaatctgccactgcaagtctgtttctgccaatcttccttgcttaagatatttgctttatgtgttttcatgttttattagtaaacacagattcatatctatgatgtctatatgatgaagtttacctttcatcaatattaagtgtctagtcactcacaattctttcaaggttttttcccttgaattctatttttacagatattaacattacctccactgcattctttctgttcagaattgctttacatttgcccaattctggattttttttttttagttatcagtcttataacttaatgttgttgatttttaaaatacaaatgcatagtttttgctttataagtgggaagctaaaccatttatacttaattataccatatagttaatattttattattttatatttgacattctatattgtaggctgccctgttatcttttaaaaatctatawgttttattaagaggactacgattartttgcttgtacctgatgtggtgattkggaaaactaatctatctttaattctactagaatttacttttaagattttcaacacctaaatcttatctgcctccccaccttctctcatatattgcaggtatgacataatatatacatacacacatacccatgcagtatgcatgtatatatgtgtgtatctctgtgtgtatgttggtatgtgagaatatagagacatatagatagttgtagagcaatatatcacttcagactcacatgtgaaatataaaatttaatatgcattcattttcccttgcggttgcaccatgactgcctatttcctatggaacatttttctctttagatttatattttctttttaatgtgttctgccttagtagttaatttatgtaaaacaattattttaattctcttctatgagcaactggctttgatattcttttctgtgtctttaatgaagtgattattcttggggtctttattttaaattacctgctggtatgtggagtgccttattcaatgtgttttttgaactcttaaactttttattatcatcatatagaaagaaaaatttggctggatatgtatttattgaatcacataattttctccattaaaatgtagtagcatttatcttttatgttttgatttcttttgcagagaaaagctctgggatgcactagatttttgtttctttgaggttatacttttcattcttttatcctcctctatagaattttgtatccttgaaaaaaattatctttgaaaaaatcataaggacgtaattaggtgtaacactctattattgttacctggagccttgtgttctacagatgaatgtatggttctgctttataaaatgttattatataatttactaatctatattttggtatgtttcatttgagaaacactgctgtggttgtatcttacctgctaccttcagactcatcttttctgtctttctttccctctgctttctaagacaacttcttaattttgaattatttaccattagttctattttgtaatatgttatttatttatgttacagtatgggaattttaattcttctttttttttttttcctgagacagagtctcactctgtcgcccaggctgaagtgcggtgatgcaatcttggctcactgcaacctccgtctcccaggttcaagtgattcttgtgcttcagcctcccgagtagctgggattacaggcacgtgccaccacgccagggtaatttttgtatttttagtagagacagggtttcaccatgttggccaggctggtctcraactcctgacctcaagtgayccacctgcctcgccctcccaaagtgctgtgattacaggcgtgagccaccattcctggccctaattctgctcttgaattttcaatattcttgtggtggtttcttcctctcagtcaagatgcctatcatctcagattattgactttttatggcttattggctttttatagcattctgatatctctttgtgatatatatctttatttcctatcataatgagatagcatcttaaattgccttttgttgcctgtaaagcatcatttacaagagtatgcatttcctctatgtctttagaataatattgtcatgttactcaggtgaatttttaaattagctcatttattttcctttttatgcatctttaaagaaacagagagcaactcggtgtgaatgaccctttttatcactacttttattcccttgcatgctattatttgccctttccatacttaaaatgggaaggtgggttgacatgtgtcttagttcattgtgttgctataaagaaatacctgagactcggtaatttataaagaaaagaggtttatttggctcgtggttctgcaggctatacagaagcataggttggcatctgcaactggtgaggatctcagactgctcccactcatggcaggaggggaaggggaktcagcgtgtacagagatcacacagtgagagagaaagaagcaagcagagagagagaaagatggggaggtgccaggctcwttctaacaaccagctctcatggaaactaataaagcaagaattcactcattaccaagaggacagcaccaaggcattcatgcgctatctgccccctttacccaaacacctccaattaggccctacctccaacactggggatcaaatttcaacatgagttttcagggcacaagcatccaaattatagcaacatgaataaacctttgctcactcatcaaatacagctccgctggctagagataacgtattctcttacctccactgcctggctctgtgagtctgagaaggatttttgtcctaggaaactgagagagtttaacttccttctttaaccaaattcagccaatgaaaagccataattcctaacacatgtactatttccaggtcactttctccatcagccttgcctccaccactgtgtgtgaaataaccacagatcccaacaacgtcccaaaccttgtttacagttacaggctctagtggatgaaagtgaggggccaatgaagaggaactgaggggaaaccctgactccatccacctagaatgtggtatccgtgttacacagggtcagccccatttctggttgatgtggaatctcattcatcctaaacactgaaggcgttgagcctgcttccaatccttttctattaactgtgccaatcacatacagagaataaaagaccgtttccacagctgtttttcaatccaactcaataaaacttccctcagactctggaaaactgttttagtcatccttagttaacagttaaaatgtccagttatgtatgtgtttgtatgtgtttataaaaatttgctcagaatcaataaaattccaagagattcatagttagaggttctaatagattccaacaattattcctactgttctaagaccaggtttatctcctgaccatgctcaataactatacttcttctgaactctgtaccccatgaccgattatagaaaaataaaaggagaaaattgctggaaatttacattcttatgaattcaagagtaaagtgagttgaaaacactgtagagctgagatcttgtcaaagactgatcttaggccaggtctggtggctcacgcctgtaatcccagcactttaggaggatcacttgagcataggtgtttgagacaagcytaagcaaacataatggaaccccrtgtctctgcaagaaaacaattaaaaattatccaggctgaggtgggagaatcacttgagcccaggagttcaaggcagtagtgagacattattgtaccattgtagtgtatcactgcactccagcctgggtgacagagtgagaccctgtctcaaaaaacaaacaaacaaacaaagactgatctgagaatgaaccactcatggttacctcaagcatgaagctcctgcctcttccttgtgatattatagtaaaaacaggcatgtgtaaataaagagtattcagagtgtagcaatatatgtacttcttatcaacccacctttaaggaagatacatggaggtatgaagaagggtctgtgcaacaaacaagggatagatcacaacacagattgtctttaattgcagatttaaaaggtactaaattccgatattcaggagtttcttgggtgtagtatacctattgttgctcctgctgaatttggctatgttgaatttcataaataatctgaaagtctaaatattttatgcctcttgccatttccctaatctctgaataaaaatgagccctacacaggaaagagggaagtgagcccacaggtgtcactatccatctagtcggtcaaatgaaactgacataatcctagactattgaattagttctctacccatgcmaaattaatttttaaaatctgttaattcaacctcagagaattctctgaatttctctctacatcttagcctcacacatccgtacagacttcattcattgacactactgaaaatcagatctctttgtttcccaatgggagtatataagagcctcctgctagtctttctccaggggttctcaggcttgactgcacatcagaattatcctgaaacctttttwaaaaaaagttgctgtatggatgaactttgtggtatataaattatatctaagtaagtctgctttaaaaaaaaacacatgtgtaaattccacccaaggctaattaaatcagtatctctggaggactgaacctagcattataatttttttaaacatcacaaatgattctagagagcagttagagttatgaatcactactctagtctcatacatcagcagcatccaaacctggattaccagaattgcctgtgaaactctttgaaatgtagaaacctctatattatatataatacagtttctacaacctctgcctaccacagcccccaacttctgactcattagatctgagttactgttaaaaaaatgttttaattaaatttaacaaataccacctagatgattctgctgattatcagctgggtaccacagcattacaacaggctgtccatctgagaattctgctgcctctcaaatgttaaagtgtgtacaaatgatccaggagtctcgttaatatgcagaatctgattcagtaggtctgggagggtactcagattatgtatttttaatagaatcccagtttatgctgatgttactggtcccagaaccacatcttgagtcgcaagaatcttattctcttagaaatgtaatttgacacgagaactcatcctcaaccaataaggcttaaagactctgacttttccagccttcctctagttttccagtatataattccaatttttaaaaaatttctgactacttgacattcaacacctattggaatgaggtagtttcctatattctttagcttaaatcttttttgttgttgttgtttgcctaaaagaagcctctttaaaactacctccattctctttgtacatttctaaacagataattgaaaaatttattcattttctatttatagcactcgaattaattggttgaatctagcaaccgaagtaacgtttagaaatatattactaaaatgtaaaataatgaaacaactcaactacttttaatgttttcattttacttccttcaaatctcattgcaaatgctacttcctccaggaagccttccctgactgtgcttgttcataataacatttggttctgtgagcttgtattaccttcagaccccaccaagtagtctttgatcacatacagctgtgatgccatacatgggctttaagcatcaaggtcttgccctacccatgaagacatgcagattcaaaggtctggcatttctttggctcaacactaagccattacacaaggactcaacttgaaaatcaactcattcgttagataagttgtacttgctgacgtccatatatatccaaccayagattcccaaaattgtcagaccacaatggacccaaaattggtgtatacctgtatttttccttcttccattcagcaaactgacccaagccatcctggaaygtgtaccctctgattttttctttaaaatctccaggcactgagactctagatggatcccaagtaatctactcaaagatgacccatgatggttaccaaagattatttacaaaatgctagagctgatgaaagtttgtcatctgcctccaaggtaatcagatcaaacagactcaacataatttccaggttttgagaggctctattccaagacatcttctaccaaattgacgagacacctrcaatgccagcaacagagaaaaaggagggaggtggtctaggagagggttcagggatcttgctattataaacgatggggaaatgaaggaagaaagagcaagctagattaaaaggtcagggacacatttctgcgtgttgtgtgttcgagcaggaagcagaacacatgttaatgaaatatgggctacagctgtattgctgactaaaatgtacacatatggctaatggcacatattctgaataatcaacagaaaaagaaatgttttgcttctaagacaacaaaattagggcatgtyattccttactgatactgcctgaggcagccaagtctcattatagctttgaagcatacgttcttcacttctttttcagttcctctttactgatttctctggcatgaacagtagttttgcttctctgtataaatctttgccaagctttatatgctgggttttgttacaacttaaccacctatctttagtctgtcatgtcttatttctcctatccctataaagaattgttactgtgctatattcctcatagaaaatgccaagaacwtgcagcatgaagaatgctcttatacaatgaactattgatgtttaaaatgaaaatggaattcaagactgagttctgcagctggggagaaaaaataacttatctgagaattgtaaataaaacccagagatcaccttatacaggacaataatagtgaaagaactgtgtggtgtgtagcttccatatttcaacttggattgttctttccttcaaataataatagagtaatttataagcactcagcaattctatttcgggccattgcgcttgtgcttaataatacccacatttattgctttgattattatatgccatttggctattagcaacataagctacccaaaagttcacctgccacattagaaacttgaatggcttgcacaacaaagctaaacaagttaatagaccaggtcttgataaatatatcttagttgctagtttaaatttattctcttctgcatatattgttgacaaggcaacctaatccccatgataatgagaaaattgtggcttccaaatttttgcttctcacgggcttctgctaccaaattgggcagcataatgaagaccctgatcattgttgtgagacaaagtgagtcatcagagatcaaagaaactaagcctgaaggaaggtaaatacattcactcaaagatactctcattatttaaaggaaggaaatagaaatgcttcctggagtgatcatctcattaagacacctattcagccaaaaggactcaaagaactttccatcctctcccctcttagagccgagctttgattcctgatgtctgcatccatgaaccacctgctgcttccaggagccactcaacagtctggaaacacagcttgcaagagagggagactggaagtcagattattctcaaagtttggccttgtgaaataagacatggccagagactgttttgtccaaagctacactgatgatatgaaaagggcattgaagtttaggaggctgccttcggaaatgtcattttaaacatatccagtcttccagccgcaaaatattctttgtagtttttcaaaatttatttcaaaagatgtagtaacttaatgataatgatacaacaactaccattattattattgccatctttactatttattgagaggccaatatgtgccagacatgttgccaactgcttaagatgcattatccattaattttctywtgtaatatttactgagtgtatgctatgggcactggagttactgcaatgtttaaaccagaggtgatcccttctccaaagagagtatgcaattctggcttattaatttatttatcatcacaacaaacttactagtgaggtgttactatttatattttgcaaataataaaactgaggccccaaatttgcccaagattacacagcgaatggggcaggatttaaaaccaagtcaccctgactgcaaaactacactcttaacctcatagctatggtgatgttctgagattctgaggcaaacctggactatatgaagtaggagggctaaaaacaaggttagcacttaaaatgcttagcgtctttacaatgggagatgtgtttgtcagtttttaagtaagcatgataagtagkgctccctgttgtcagaataagggagagaaaaagtatttttctgatattttcgatctggcaagagggatagttgacctggctaaggtcactcatacttaaagatgctttttaaggcatctttaggctcaaatctcagacaatgattctcagattttatgagacgctaacttgaatgtcatggttgctctgcaactcatcatgaactattgaaacattatactcaaataatactgtgctgaatggtatatgctcggctcacacaagactctggaaaaggcaagaaatagcaggtgccaaaattaagaaaaagcatggatgcaaacctagaaaataagcacactctctgtattaatgtatttttttgcaaattaggaaaaatattgttcaatttcagtagcagaatcctcatggagcccctggaacagcaataagatttactgctattgaatcagccccaacatctggttttctaattccttttagctcttactttagtctctgagaagccaaccttataataccatttggagagtataaaaaactctagattaaagttcatccaggatcctcaaacaccaagtctactaattttaaaaccttcatttctttataagggcagtttaactcctgaaattttctacctctattaaatgagaaaacctccaaggagacaagatatgtatagatactagtgtacatccagctgcctttgagttttcttctcatttaatttagtacaaggctccacattgaaatcactgtcagcatatgtttggcattaggctacttcaaaaaaaaaaacagccttggagtgactcagtaagtaggttagtcgaggtgtgagatgagcaaacccgtcatttcaggcaaggaaactattttgtccctccaatatacgttatcacatggttcctgacagcatcattattatctatgagcgtctatctatttgaaagaagggaaggaatgaaagtaaggatttatagcgcacttactgtgtgttggacattgtgtccacacatttcaactatttaaagcttaaagaagctcagagaggttacatggctttcccaaacaggatcacacagayagcaagtggtgaaattgacaggggagcctggcctcctgcctgcaaaatccatatttttctagtctacaccaccggcccttaatcagtgattcccaccctacagtatcacaatcatttcagtcaagaaagatactaaaattctacaaataatacttcaaaccaaaaatctagttaattttaaacataattttaaatatatatgtcacacaatgctttgtatggaagagtagctttaattagatgacatcaggtcaaacagcttcacaaaagggtgggacttactggactaaatgcatagattttactccccatgttgcttcccttccattcctcctccctccagagtgccagtccctctattaagtcaggtgccagccatcagtagtgtccaaagactctacttattgatgtctttaagtggtgttgacaacttatagaagctctcactgtaaatggatgatactgtgagtaacaattttccatgcaataaaccattcaaaagagttgaagaacaaacatgtctgttttctttcttttttattttttctaacttttatgttaagttcaagggtacatgtgcaggacgtgcagctttgttacataggtaaatgtgtgtcctggtggtttgctgcacagatcatcccatcaccaaggtattaagccctgtatccattagctattcttcctgtgtccaaattctaaggccttctgttcgtgccaaatggacacagacattcactactttcaaatccaaattacaagagccaaatggagtgtttccacaagaaagaaaattctgaatgaaaagcagtgtctggttgtattctgtaggatttgagtccaaagaaatgtggactccaaaggaatgtgtacatttatgtatacacccatgtttagagctaatccattccctttgtcactgccttaatttaggggctccccaggccccgaaagcctcatttatttaatacatattaagcactctccaaggccctgaagatttccttcaggcaaactttaggtattcaaaaggtagttctgctcaattaattcagccccaagtatttattcaatgcacctctagccacactgcacagctattggaggcacttgggatcctgaatctaatcgtcaatagcaaacaatctgcattatcggtggactggcctttttgctcagcagccccgcccactggctgcacccatttatctctgcrtacaaatgtgttttcaagtattatgtgtgttttcagtgtgtatgtgtgtgttgaagggcaaagagaagtgagaagagagtaagaatcagactaatatagcaagttcctattccatgtctacatttattccaggccactcagtggattctaattcttatagaattatccgttgtttatctaatgaagtggaaagagtagacttgactcagatggtcctactttaaattctgactctactatttattaactccatggtcttgggcaaattagttaagccttttatgtttatttctaaaatggagagaatgttgtgatgattaaatgaggtaatatatgtaaamggtataaaactgaacataccacatgatatgcactccagaaatgttagccatcatttatatcaatagggccccttcttgcacaaagacctccattcatccaggcacagggtctaggatacatccaaaggccactagacaccagaatgaatacatctccatctatgagaaaaatgtacttaaagcaacaaatctgttaaagaatatagttctagaatagaggtctttttttttttttttttttttttttttgagatggcatctcactctgttgcccaggctggagtgcagtgatgcaatctcggctcactacaacctccgcctcccgagttcaagttattttcccgcctcgacctcccaggtagctgggattgcaggtgtgtgccaccacacccggctaatttttatatttttagtagagaccaggtttcaccatgttggctaggctggtcttgaactcctgacctcaagtgatccatccaccttggcctcccaaagtgctgggattacaggcgtgagccaccatgcccggcctagaatagagttctaaacaaagtgacaaatctgttaaagaatatagattatactattttagaaatatatcttattcatggtatatactaagccaatgctctccaaagcattttgcaattcacctgcagttagttttcagactccttcgttaacacatctttttccccaaggaaagagaacttcctctctgtaaaatttcttcattagtttttcctttggtcaaaaacatttctgaagatattcctctgagcactgtgagttgtcttcctcccagcatacaggcctcggaagagcaagccttactctaattagagacagtagtgttacatcccagactgggccagtgagatttttgaacactactttaaaatgcaagactttaaaaaaaaatcatgtttgcaaaattagaaggttttaactctcccaagcagtcagaatctaggacatttgacttcagcgctgtccagaaatttctcctaatcatttcctttccttgtacttgttaggaactcttatgtttaaaagttacaacttcaccacaaattcccctttcagatttgaaagcaaagcaacaaaaatgaagcacaaaaataataattataaatatactttcatgaagctaattccttactgtgaagggagaaaaggtaaaaagaaatagcaatataggaaggaatatatgtgtcagatggtctcacttgctgtctccttcacaccttaataaaaggtaactccaagagggtaggaactctatttatttatttatttatttatttatttactttttaaatttttttgcaatggagtctcgctctgtcgctcaggctggattgcagtggtgcaatcttggctcactacaacccctgcctcctgggttcaagcgaccctcctgcctcagcctcccaagtagctgggattacaagcgtgcaccatcacacccagctaacttttgtatttttagtagagacaaggtttcaccatgttgctgagccaggctggtttctaattcgtgacctcaagtgatctgcccacctcagcctcccaaagtgctgagattacagtcatgagccaccacactggacctggaactcttttattcagtgttatatatactcagtacctagaatacttcctgaaagataggcattctaataaatatgcattgaatgaatgatagcaacctttatttcacagattagtgagctgatgaacacagagagaaataaattaacttgcccaaagtacgcagagaaaggaaaagctgtggattgaaaagtctaaatccctagtccatatttttggttgtttccttttgtacttttttatgttgtatttaaaacaaaaataaaggccaaaaaatcatcctgctaccaactccactaatacagtaagagaagaaagtaaaatacttatcacaggcaactatccatgcaaagtgtgagatgatcacgtgaggaaggcaatttcagtgctgactgttaagattttctatcacagcaatgaaaatggtgtactaagagaacagggagacacaatgtctttgtgaagagattggcagcttgaagtaaggtaaagagaaaaaggtgtcatcattcatcactcaaatatccatctgaaaagccttttgtttcattactagcaaggactccaaagcaaatgggcacaaaagaacaatcaaatctgatgaaccgtattcatttaaaagtgaaactaagaataccactcaggaataggctgcaaatcagataaattgtaatattcaaaattacaactgaattaggaacatgtagggtagacatgggtgagttcccctacaaaggaacaagtatttataaatggtcctagcaagtccattctgatgaacaaggggaaaataactcgatctttaaaaattctagtttgatttttcttaactatttcctctttcttgtgtagcacatacaatatcagaacatttaatctcaaaagcacttattcaattgaatacagaaaagacatttctttgcatattcattgcaaaatcttttgccattttatagtaactaaaagtgaattcagagttaaaatgagcagtgtccccttagaattatttactccacagttgacatctagccctgtgtaatatagctaggactagagttctctttgaatgcaacgcatgcaatccaatgccaggttaccaggaaaataaaaagagaatccattatcaagggtggtaaaaacaaaatcaatgttttgtgtctttttttcagcctcttaataattctatagacatcctcactgaatcagagtggaaaatagttccacaatgacataaacagaccgtattatagcaaatcgagtcaaggagcaaaatcatccaatcattctagcaagttcaagataagttgtacaagaaacagaaggtaacttctgaaaaatgaatgtagaaattatataacaaaccctaggacatggtaaacacttggatttctctaaaatcctgcctttatgaagctagtgaaaaccagatccttttaaaggtccctctcagacaacacagctttctaactgttctcggggtatccagagtcatttaatccattaggcttatgagcctataaggtttttaggagcctataaaaaccttagagacttgtataaaagaaagtatgtgctcaaaaatgcaaaaagaagatgacataatcagacataatcaatattaagatgtgttgatttgtctacacaatgtaccactgtatcattaaactctacattgttaaaaattacaaattgtaaaaaatatgtttacatctgaaatcaacttgtaggtcagattttctcacttaagtatgcataatgattgctgaggaatcaaagtgatttgtgaattaaatgggtaatccaggtcaaataatttcacaagcaaaattattaaactgctttacaatttttatagcaaaattgttatttaataggagatgtgggtgtgttttaatgtctaatatgaaatgacatgggtcatctaacttaagagcacttaatacctacaaggagtttaaatgctacctctccaccccccaccctccactcttccccactttcccatccttcctccatagaacctccagagtgacttttataatatgctaatataatcaggccactcagcttatactcttcagcagctttccattgcacacaggataaaatctgaactttttaccrtagcctagaagacatccagtacccagtcttaccttggactactcaacccctcagttttcaatttcggaggaaatcctatcggctctagcttcaaaacatatccaaaacctgaccgaytgtcaccccctcctctcttaacaccctgttctgaactactatcatctcgctcctggaaaatgacaactgcctcaaaactagtattccttctattcttgtttgttatagtccgtttttaccacagcagcctgtgtaaatttattaaagaggaagttagtgccattctccaaatggaagagttcactcagaaaaaagtcaaagactacacaatggcctatgagtccctacaccatctggccccttgctgcctctatttctctcctctcccactgtcttccctggttctggttacaagggccttctagctgtttcctgactatgacagaaacatacctgccttcagccctttgcactggctatttccttgactaaaacattcttctccatgattgctgcaaggctaactccatcacttccttcaagtctttgcttcagtgccactctcctagaagatctacactgaacagtgtattacaaattacaacccacagtttgccaatcacaccacaccaacactgacaatctgttttatttttgctttctcccatagcaccaacttcaaatagtttttataattgatttattagttagtttgtttattgttgtctgtgtcacctgctggaatgtaaggttcaagaacaggaatgtttgatattcactaatatatctgaagtgtctagaaaaatgcggcrcaataaacattagttaaatggtgaattcgtctttttgctcttctcacactgcacttttcagtstgttgtgttacaaagaatttgtctggtctttgtttcaggctcctggcacagagcttctaaaatccttgaaatttctcaagtaatataagtgtgtctttgttatatatgagcctcctgtatcacacatgtgtttatgctaatgaaataactcatggtggacccctagataatgtcaggattggggctggtcaccaaaaagaagaagcctataattagagggttgggattttgaagcaatttgacctccagggagagaagggggactagagattgagttcaactaaatggtcagtgattcaatcaaccatgcctgtgtaataaaactccaataaaacctctggacaccgaagctcagcagagcttcctggttggtgaacayctcagtgtgccaggaggttgatgcgccctgattccaggggaagaagccatggaagctctgtgctagggcctctcccagaactcaccttctgtgtctcatcatttaactgttcctgatttgtattcttcttaacaaaactataagcagctgggcccagtggctcacatttgtaatcctagcacttcaggagtctgaggcagggggatcactggagctcaggagttcaagaccagcctggccaacatggtgaaaccycatctytcctaaaaatacatatacacatacacacacacacacattagctgggcttggtggcatacgtttgtaatcccagctacttggaaggctaagggatgagaattgcttgaacccaggaggcagaggttgcagtgagctgagattgtgccaatgcaccccagtctgggcracagagtgagactctgtctaaaaaataaataaataaataaataaataaacaaacaaacaaaaaaggaaaactataatcataactgtagaacttgcctgaattctgtgatttgttcccatgaattatcaagcccagggaaggccataagaatccccagatttatagtcagttagtatgaaaggagggcagtcttgcygtggaatgtgccctttagcttgtaggatcaatggtaattccagggggttagtgccagaactgaattgcagtataccaattgatgttggaatatagtccctcaaacactaaaggcaartgaaccaaagttcactccttctaccttttggtttataactagttcatgaaacagaaaagaaagtttagccaaaagctttctagttaatagatttattaataactggattgacaactgtggcttagatctaagggagaatggaagcttctagtcttctcatacttctagatcagcactactcaraagaaatataagcctcaaatctgaaccacctatgtaattttaagtttttcagtaatcaccgttaacaaattcaaaagggtaaagctaatgttcattatatattttatgtaaccaactatgtcttagatattagcctaagttataatcaacactaaaaaattattaatgattttactttttcacattaatttatgaaaatgtagtgtgcatttcacacttataacacatctcaaattcgactaaccacatttcaagtgctatcaataaccacagtggtaagtggccaccatattggatgcatagttctaaacatttgaaactaccttggggaaaaatagaccaaccagttgcaagtagacaatctggagaatgtatggtctgaggcaagtcctgcctaactcactcccttcaaggagagagaatagaaagactaaggctgagttggaggaagaatgagagttcagctaattgaaaagaacacagaccattcctaaagagatttacctcatctaataaaacatggctcagttaatgtctcagactcttaccagtctaattggagacgtgagtgagaaagaagcataaatgctcccacctccagttctctggaggagaagcaaaaatggacttttgcttctctaccaccgacagcaaaatccgaagtatcagcgaagactatctccctttctctcactctaaggcctttgcaaatgttaatgacagttcatgtttcttgagcacagcaccaaattgagcaatgtaagaaatacattttaatctaatccttatagcaaatcyctttttcagatgggtagacaaaagtataatgaggttaaataccttgtccaaggctagctagtcaaaagtggatctggccccaaagtctaacttcctaactaaaactttacagtggaacagctytctccttcttttttatctggtcaactcctgtgtacccttcaaagttctactgaaatatcacttcctcagtgaagtcttccctgatctctttgataaagccaatcctactgtcactccactccagtcaattctatttcattattctggttgatttagtgttttatcatgacttgaaatcattttacacacacacatacactccttacttatgtgtttgcctactgtctggctccaccagaatataarctccatgtgaactcaggctttatctgtcttgtttactgttgtatccccaggatttaaatctgtggttaatgcayagtaggaagaactaacacttctaccagcagatttaggctggttgttaggctttgcaatatcaaagtccctttaggcataaaaaagaaagggtggggccaggygtggtggctcacgcctgtaatcccagcactttgggatgccgaggcaggcggatcatggggtcaggagttcaagtcctgcctgaccaatagggtgaaaccccatctctactaaaaaatayaaaaattagccrggcatagtggtgcacacctgtaatcccagctactcaggaggctgagcatgcctgtaatcccagctactcagaaggctgaggcaggagaatcacttgaacctgggaggcgaaggttgcagtgagcggagatcatgccattgcactccagcctgggcaacaaagtgagactctgtctcaaaacaaaaacraaatcaaaaacaaaaacaaaggtggaggatgtccacaaacacaagtgctttcagagataatggagctagtcctagacaattcaagaattttcttcttttgtactctacttctcccaactctctggctcattatttgctacataatggaatgctgatatcaataatataacattttaccagatgtcagcaagtataatgagaactaggttgcaatgttatatagaaacatacacacacacaaagacaatcccccataataatgatggcatagctaaggcacatattcacaggaagcaaatgactgaacttattaattaacaacaacagctaacgtttttaagtgtttacaggctattaacatgcatagtttgatttaataatcacaacaatcctatgaaggaaataaaattttcataatacagaaggagaaatcgagactcatagaggttaagtgacttgcccagtgtcccaaagataataagtagcagagtcaagattcaagaccaggctgtgggagttcagagccatagctgtgccaagtgaggctacagctacagatacagcttgtagaaatgaatggtgacagcatggtcttcctagcagaagcagagagtgacaccaaggtcctatttacctaattaatgtgcctaaccccatgtggttcattagcataaggcacgctactatggctagtgtgctgggtccaggcagatgggctcttgagaaaataagagctttttaataaatttgaccagtttcttgttactagacattgtttcaagactttctctagtttaaataatagagagaaatatattggcatatttatgcacaaccataatcacaagatgtcataagatgaactgatttttttaatttaaggacatagctccaacctctgactcagcaaaagcctattctacttaattccagtagcagcaaaggaagatgcagtagcgaaaggcaaacctgtttaytcatccccatgctctgttattcctggggtcctatagggcatagaagagatgactactgtcctacagagtaggggaattaagtcatattacgttaatcactttcagaccctrgtgtatatccgaaagtaaaaagctcttaatttctccaaattggtaaaataccaatttttctatggcttggtgaaataaaatattataccagggtaattaatactttcttattgggatgccttttggtatcatcaggactaaaatccaagagaagagcaaagattcttcttggggagtaagggtgaaggctacatttaagaaaggctttcttagaatggattcagaatgaagtatgaaaagcagctggaaaaatcccaaggttccggtcagcaaaggcagcaaatgttcactgagtactgactatgagttaggtacattttttatctgcagatacaaatttgaaaaaaaaaaaaacaaaacaaaacttgttctgtgccctcaggaagcttggaaactcaaagtgtagatgtagagatggagagttaagaaaatgcaactgccataaaaaaggtgaaacatatgtaaacctctgttctaccataaagaagggtaccatttgtgctgagccctgaaggataagcaggatttcacaattcatcctgtgcccagtatattattaagtgttgagaatgtaaaggccaatggtactcaaacagagaagatcagaaaaaaatgatgattggccaccaaaggtggctctgagtccatattcaatgcaattttattttccacttgcacagaaatcatgaatctcatcctggaacttgacacaaaaccaaaaagataacaataaaaagatgaaagaaattaggttctataaatctgtgggaagtcccacagctaagctagtccctctgacactcaatgcaagaccaagtgccctcatcaaaattagatgtcacatttccataagatattctagagtgctaaagccctgtttatataaataatacatcactacatgtcagttaattatatctcccccaaaacccacagaaaatgcacttggcactgtggagaaagaaaaagttcatgttagatctagaagatcacccttctttactagtaggggataaacacaaatatcatcaccattagagttttgccaatcaggggcttaagtgtcactctgcaagcaagataaaatgctacaaagtctcccaccccatttccataatacatctmaatgcacagtgtgaaacaagaaatgacattaagtgtgcttactaataacagcaaaggagaacaacgatttaatttaaacaagctaaaccaaacatttgyttcacttagagcttggaatatgtcatttcattaaatcatgttttcatttcaaaagatgactgtcagactcaaactattttattataattgaaggaggatataaagacaatacatttttaggcaaagtaattcaaaatgtattctaattttaaaaaattgtaatgaacttatgaatctgtatgcctaaaccagaaaccaaatttgtacagatttgtttcatatgccttccatggtcccatacccatacaattgtctttctayccatcagtctatcagttatatattatgagagctctgcccactggtgagtattaaaatctccttagccttgtacacagtgacattttttatatttctggaactttctatggcctagatttcaagctgaaactcaacctcctcttctgaaagatggcaaacaattgacatagcaggttttaatcaacaaactctgcctataggagaaagcataagaaaaaaataataacagtttctttaaaccatgtaagcatgtttggaaataattctagtattaattttttcctagcataaaactaatttatggtcattatagaaaagttaaaaawcacagataggcaaaattttaaaaactatccataatctatagtcagtttttatattttggggatacatttttaagtactggtataattttttaaaataggaatttaattaaacacccatctgcagcttgtgttttgtatacataataatataccaaatattcatttcttttcattgcatattttctatattattattttaaatactactttttaattgtatggatatagactaatacatttgaccagtttcttgttgttaaacattgtttcaagactttttctattttaaataataggtagataaatatattgatatatttacaaacaagcataatcactcctaaagataaattcctaagagtaaaattgctggctcagaggatatgcaacattttaagacacttgatgaaactgacaaatttctctggtaaaaaaagtagttcccatccacttcccaaaagaaaagtgagagggtgtcctttttcctgctggtgtgatctttacctaatcttgtcttattcgatagatgaaaaatgcatctaatcattttagtttgcatatatttgattagcagagaaatttaacagttttcaatgggccatttatgtcttatgaaatgccttcttatgtgttttgttttgccccatttttaaaatttacatgtttaccttttttcttattgatttgacaaagttcttaatatattaagsatacactcactcatatatatggcaagtttgttatcttttgtttttcaagccttcaaactttaaaactcataaaccccttttcttatcctttttctcctagaaatttcttcattttttttgtttttgctacccaaatatttttacagtggaaatcactgtcataatacaggctgtagctagaagccaaacatggttttcaatcatatttctgccacttactccctgtgtaatttcaggaagtaattcaggatcccagagcttcagtttccttatctgtgctagataatctctaatatactttcatgttctaaaattcagtacttctatgaattggcaaatatggaagttttcatttgatgtgcatttatgtttacaggaacatttattttaagttttaataaaaaatgaaatgtaatgtaatggagaaaagagcttgctaaagtaattgatttgttaaaagaataagctttctgtccagcgagaaaacatgtgtctcaaatgaatgttcctttaaaaggtagattttccagaagactgtattataacaaccacagtttgttagtgttcctaaaatgttccctgaaatttacataatcctccctcatttttttagatgacaacactgaggtcagaaagggaaggtgacttaataaggagttagatgaagagtaaaacagggacccaaacctcctcacttctgaggggaagtctttctgctacagtacctctttaccctgagatcccaactataatcagtttgacttctaaaagttagcaaataaggtatcattgtttgccaatatcataatgccatggataatacgatgtcatattattcttggaagggactttcatgaggggaatgcccaagaagcaatgtagctcagcctttaggagccagggctattgaactgctgccctgcttcattcagtctgactctatccctactgtctctgtgatctgggcaaattactggacctctctcacttcagcttttctatcctcaaatagaggatatcctcatcagcatgttgtgaagattaaatgcattaatccatgatgagtgtctggcccagagcctagaccactgatagtgctcagtaactgttagcagttggtaatacattgacctagatattataatactccaaagtatacagagtggaagtcaatattgctgtttagccctcctttcccatcctcattattaccagaagtaaaaaaggattatttgaataaccaaaaaagcatttttaaatgatttttactgagcttctgtggtatgttcaacacagtccttaactgtataggaatagaaaatgaaaggaacagtccatgacccagtgttttgccttgagaggcatccctgacccacctctcccaccttggccatgtttaaccaatccctcctgggtactccctccattcagtatgagatgagtcaaaaaataaaaccgtcggtcaatatctttcctaaataaaaccaacaatcaattagaacagataacagaagaaagaaggtttctattcatattagtgaaccagatgctcaaagacacagtaacagatttataaagaattatgtaaggtctataaaaagaaaataagcttcaaaattttattaagggatatagaagttgacttgcaaaagagggatactgtgttcacataaaagcgttagcactctcaaaactatttataaatctaatgcaattccaattaaaatgtatatttgaaatttgatacaactattaggaacacctagaaaaatcaataaaaaagaagaataaaacaatttttaaaggaaaaagagagaaaaattaaaattgaaaataagctgagctaaaaatatgtataacctgatgataaaaacacagcataatgctacaaaaactaaaatgctgacttaggtatacataattttttccatataataaaagacattttaaattagcaataaaattaggattatttaataagtagttctggtacatttgatcaactatttgagaaaaaaataataacattagacacctacctcacaccataaggcaaggtaagccacaactaaacaattaattctttaaaattaaactataaaattgtatagaaattaaaaatagtctaccagtgaggactgactttcaaattataaaagcaaggaaagaagcaagatgataaagattttaagggtatgacataaatcaaaaatgtctgacaattcatgaacaccattaaagaaaattaagaggcaaattataaacttaggaaataactgaccatcttttaagccataaaaataaaaaagactaagatgaatatacaagtagaaaaatgagcaaaggacatcaatttgcaattcacagaagaaataaaatgcataatatgcatacaaaaatgtttaacatattagcaataaaaataatgtaagttaaaacaaaaatgggctctcgcttgtttacctaccaaattaacaaagtcaaaaactataatattagtgaagacaatccggtagggctaatagcacttatctatrctgtggaatataaatggttacacacttttttgaggacaaattaggtttatcagctgaggtttaagaagaaccttaaaatgatagaatccattttctttagccattccaartactgtaagaaaaataataaatatactcacaaaaatatatatacaagataatcacaacactgtgtttaaacaatattaaacattagataactatagtacataaaagatagaatgcaagaaatcattaaaaattatggtttsaatatttaaggttgaagaatatattattactatttgaaaaagaatgttggcaaatagtaactacactgttatcctaactttgtaaaaagaaaaatatttatattacagagaaagggtaagagagagagaaaaaaagagagggaaacacacaggcagaaattggaagagttcaaatcaaaatgttaactatggtttatctctaggtaataggattatggatggttttatttcatttttaagatttttctacattccaacttttctgtaatgaaaatgtattgcttctgaaatcatggaaagcaatcatgttttgaaagatacgtaggaagaacctacaaaatagtgaatggggaaaaaaactaagttctttattgctgttgttattcttattgtttagatttcatataagcagaaattgattttgaccaagaatctggtttatcagagagacacattcgctccagaaaggcaccctgcagcctgaaggagatctagtgtaaacatggacacatatacaaagaaaagcaattttgccaaacaattatgttttagggaaaccttcccaggcctgacaatttctccagctccatctgtttttgactgatggagactgtggcaggatgctcttgaaagtgacagaaaagactgaaagaaaagctgatggttttttcccttcactgtatgggactcaggaaggttttcctagcaccatctgctacttctaagctaacactgaggatgcagtactgagtgcatccctctgtgttccctgaggagggctcctgccctgaagtcttcaaggctcttgaagaaagctcaaagctgtaagagtgcaattaagttcaaaatgggtcatcctgagttcatgtcctttgcagagacatggatgaagctggaaaccatcattctcagcaaactaacacaagaacagaaaaccaaacaccgcatgttctcacttataagtgggagttgaacaatgaaaacacatggacacagggaagggaacatcacacactggggcctgtcacagggtggggggctaggggagggatagcattaggagaaatacctaatgtagatgacaggttgatgggtgcaacaaaccaccatggcacacgtatacctatgtaacaaacctgcacattctgtacacgtatcccagaacttaaagtataataataaaaacaatgggtcatcctaacacagaccagttccagctttacccactgttcaggttgggacgggagccctcctgcaaatgggctccagacagctgacattctgcttcagtgggtggtctaatatcaaacacagagtgtctatctcccttcaagctgcctggtgtctctgccacaagcctcagtgacccaaactctcttcccttatctacaaattccccacctgatttggtcctgcctaccattccaacttcatcttttatctccacctcccactccctcgactcacccacagacactggactccttgtttcttcaracaggccaagcttgtacctgtcttggggcctttgcatccgtatcccctctgaagtggattgctctactgcaaggtttgatgtgggggcttctcctcactcagacctcagcaacctcatcagtgaccaaactaaatgcaccagtcctctcgcccactcactctccagagtcccaaatataacccactttatttccttcacagcacagctggagatttccttcctcactatttcttcatacctggaactgtagctggcatatagaagattactcgataaatgtttattgattgactcactacattcataaattattggctatactcccaacatatatgaagaatgttaccattcttaccacctctgttgctaccatgtggtccaagataccatcatctcttcttggatttttctaggagcctcctaagtgatctgcctgcctccccgcttgccacactgatcctgtttaaatgtaagtgagatcatgtgactgttcagttcagactcttctgtggtcccaacttcacccaaagcaaaagcaaaaggtcttacaatgatgtacaagaccttggagatcctgcctaccctaatctctacttcacatcccactttcccccatctcaccacactccagacataatggtctcctggttgttcattcttgtcttgtggcatttgtactggctatttcttcagcctgaaacacycttctccagatacctacatagctcactcactctatgcaggtctgtttttggctaccttctcagtgaggaacaccctactaaaaatcgtacgcttcccactaccagcatttcccgtytccctgactctgctgtatttttctcatccacacttgtcatcttctaacatactatacaatgtacttatctattatgtttattttctatttactcttgctaggatgtaatccccacaaaagcagggatttttctcagtcttttgtcactgttacagccccctccctggcccctagaaccatgcctgatgcattgtaggttctcaatttttgttgaatgaatgaaagaatgtgccaggagaagagagaaaacaagtatttattttggcagcactggtgctagacatgcagtgaagatcacttccttatcccccaccactcctagccctggaatctacaaatgaaaagtgtcatgtcccatagatgggaggccatagttacacggatgctaataacaatccaaccactggatttcttttattattattattatttttctcagttttctcaggttttattacttttctcaagtttttggggaacaggtggtgtttagttacattaataagtcctttagtggtagcttctgagattttggtgcacatatcacccgagcagtgtacacgtacccaatgtatagtcttttatccctgagccccctcccaccatttctcctgagttccaaaagtccattgtatacttcttatgcctttgtgtcctcatagcttagctcccatttacaagtgagaacatatagtgtttggttttccattcctgagttacttcacttaagaataatggtctccaactccatccaggttgctgtgaatgctattatttcattcctttttatggctgagtagtattccatggtatatgtatgccacattttctttatctactagttgattaaggggcatttgggctggttccatattttgtaattgtgaattgggttgctatgaacatgtatgtcaagtatcttttttgtataagtactttctttcctctgagtagacaaccaccgggtttcgagcattgggtgcagagtccaggaagtgagaaaggtgtctatatgaggctcctgaccctgggatccgtttccattggaaagccatcaacctcagcagctaggacaacctcggggagccagtaaggtggtgaggaattgtaagaagtagcctcctgaaccccagatctatagagacacagccacttggctatctagaatagatctcagaattacagagtatcagaatcaggtggaatctttgtggtcctagagtctaacctccttactatacagatgagaaaactaagtcccagagagtttaggaggcwgaggtgaccctggtatttcttcatcctagttaaagaagaagacagacattaacagagaaaacatttttaaaaatcatttatctttagaagyagttcttactgaccctgaaccaagccttgtaggctgatccaggatatgggtctgaatatttatgtgtcatagaagatttagaaataatttctcttctccgagtcagataacactgtatattttaattcttccagtcatttcagagcctgtgctatctaacattcatatgacaccttattaaatcaacttccttcaaaaaaaaaagccaatttaaaatagattgtctcaaaaattacatttatataatttatgagttttaagtaatctctattcagattgtcacttccaggaatctgattaaaattattagtttactgaagaaagattgaagctgttaaaaaaaagtggggggcggggatgggtttgcaagttttcctttttcagtttcttcacatacctctaatatcacaatgctaaataaaaccatacatattatctcatgtgctaagaaggagtggggcaagccaagttaataatactgctgacaaaggcagataattatatcttatattttttattcatcgcctctgaaagcttttaagatgcagcattagccatcaccagtgattgaygtctacatctgcgtttgcttgtggcatcagttgtcaaactaacgyttaattaacatatatatgtttcccaatttaacttttaaagcaytgaattcaggcctgcaataggccacaaattaatggcacgaattaattaacctgaagtcaggagttcgggaccagactgaccaatatggtgaaacaccgtctctactaaaaatacaaaaattagccaggagtggtggcatgcacctgtagtcccagctactcaggaggctgagacaggagaatcgcttgaacctgggagatggaggttgcagggagctgagatgatgccacagcactccagcctgggtgacagagagagacttcatctcaaaaaaaaaaaaaagttattgagtcaatatctcactctgaggcagcagactctaaagatacaccctatggcagtggccctggttagcaaagaaggtgtttatgtgcagttccacacatttaatcaaatgcaatctagttctcatcttgggggtaatttgctctatgttccttaatgacagaccttacaagtttctggcatcatctagaagccaaatcaactaaagttggctaaaagagatgtaatttctttgggagagagaaaaatttgaaaactcttacaatggggtggctgctcaggagaagtttcaaaaacaaaatcaaaagcacgttgaaaagggtaacagtaaagcttcctttaataactgcaggggctttatggcctagctcccttataaaggcctgaaacatttattccttccgattctggaagtgtgggtaactgacagctttcagctgagtctctttctgggaatttcccttagtggagaagagctgcctctgtcggaataggattaccagaattatgtctccttcctagggggtacatccaatgactagcgtctgccaggttgatgtgatccatttatttcaatgcaggacaactcagctgagccataccagcatcagagcttcctgtggaactggctgagggttttattgtgactgcatggcagttcaacttctctattttcctgctctgtttcttccatttttttcacagatatcgatcttgagaagaccccccaataaattcctgcatgctagtctccaagtcagagtgtgctttctggggaagcacatcttagagactctcagcagcactgagctctgtcttgccagctggaacaataaagggcagcaagcatggagggaagccatggcataacaggacaatgccaacagaggaaaatgagagaagccagcggaggcrtggacattccatgtgcatggaagggaagggagggaagtgagagcctaagaatcgtaaggtagttggtaaacagtgctaarcatgcttatggctgtctccctgtggtttgcatagcccccggaaagcaagaatcatctttgtttacaacaagaaaaggtcaagcctaagtcacaggtgccagaaaattaaaaggaacccagcaggttaaaaactcctctcctgtaagagggaggatgagaagcaagggaacatggttacattatccaagagaggattgtaaaaggaacaaagacatcaacagagtgaaggaagcaaagagacagatcatcataattaggaatgcaaatgaggatttcacagaagacccaaaggtatgaaaaacactttcacttttttaaatgaatatgaaaattctgaggaaacagataacttyctaggaaacatgaccatagattgacccagaagtataaaacgtgagtagatcaaaaagtgtacaataaatgggaaaagacatctagcaattattttcaaaaaaagctccagatctcttttcaccagaaagttgtttcaaacttcaaaaytaccaatagctcctatattctattagtatcctgagttaaggaaaaaaaaatggatgtttcctaataagtcataactgggtctactctagggtgggtaaaagagtcagaaacagaacacagaaagtagtacccaactgtacaagaaatgccttatagggcaattcagtgtggaactgccatcagcrtaagggtgtaaaggcaaaagacctcagctctgggcctccctgacttgaagcattcaccttctacgtgatgcgctggttacctagtttttggcacacttctctgaagaattagagatgctggggagcagtgtccattcrctcacatcctcagctgctgtacaccttttagactgcatgttagctggttcaygaaacaaaccaagtagaagtaacattaaactaattgtgagttatcattcttgaacctaaactagccctctgaagtctggctaaacatttcctggcccattttatatgttagcataaacttggtactaaaacctaatacaataacacgaaagaatcagaaagatagctccaagataaaagccagttctggtgtaaaatactaggaaacagtatttaagaaatttagaaattctagaaattgtacatctgaaatgttaaataaattgtatactactactaactaagtaggcatttgttcagtaatgcaaaatggcttgacattagaaaagctattagcatattacatgacatcaagaagtcatttattaatagccattaggttcatctaatacatgcctaaagtcaatgtggtaaaatttgacaccaattattataaaattgtattataaaaaagtatttccatyaaattataaacaaaaaaacggggggatgcatactatcattttttcaaacatgagctaccatcagaaagttctggctgacaaacatatatagcaactgaaaagaaagggatataattggtaattttttgcagaaagtaggtgttttgttttgttttatctagacttcccaagagcaacatttctcatacttaaattcacagaagcctaaaagttcatgggtatgttatcagggatcctccagtctccaacagtgattctatacttgtatctttattcctctaatcatctgaaaaacaaatataagcttttaacaaatctagagtaaatagcccaggtgctggggctcacacctgtaatcccaacactttgaggggccaaggtgagagtatcacttgagcccaagtattcaagaccagcctgggcaacagaaggaaaccccatctctacaaaaaaaaaaaaaagtttaaaaattagccaggcatggtggtacatggctatactcccagctgcttgggaggctgaggtgggagaatgccttgagcctgggaagtcaaagctgtagtgagctgtattcacaccacaccactgcactccagcctgggtgacagagtgagaccctgcctcaatataaataaataaataaataaataaataaataaataaataattgagtaaataaatgggcaaagctgcatttggcctgcaggccaagaataattatagttgtgaatgtcacttgattgggacacaattgctcctaagtattactgttttaatcactgagtattgataagaaaagaacaaagtcggacataacataaattttgcattttcatcaagtaatgatataaacgaaggtcttgcagtgatgggaaaagaggaaaccagagagagaattgagcctgcacagaacacattatagttgaggcatgctaaacccaatctaggctgaaacagtcagtacacagccataccaaaagcactggtttgaattcagccaaataatggtagtaagaacatatatgataagtgctgttaacttgatgttgattagttttgtggtttatgattaaaagccaccagaataagaagtgtactcttagttataagttttacattttagaaatattcttcttattatctcaaaaataatttaaattgtcaggttgctcaaaacattttttctctttaaaaattggtctataccttacagagacttaaaaacactgccttagagaatgaattaaaatgccattaatactcacaaaagagttcagtaataaagacagatataaagtaaatatacagaaatcaatagcatccttaaatgcctgcaataaaatggtacaaaatacaatggaaaaagataatcaccatattagcagcacaacaaacgataaccagaaataacattaacaagaaatattcagagaggacatatgtgtgtgttggggggattataaaactttacctagagactcaagagtatttgaatacgtggaaaggcatttatgactaaactaaagaatgtttaaaaggcagttattctgaaatttaattatatgtttaatttaatttcaattagagtccatataggattattactgaaatgtggctatgttagtctggaagactgcaatggtgaaaacagccaagaaaatttagcaaaggtaagaaatgaggaggtggtcaagaacagaaaagttctaaaataaaattaacataaattaattaagtacattaaacaggtatctttccagcagagcttcttggagctttctatatgctaatataaactattatgctaatacagattgtgaggaagaaggtgatagaatagtatgcagtgtttaccaagtgtatttgaacatgaaactcttctctataaaacatttcctatgtatataatttctgtatgccacagaacaatttgaaaaacactcaaaatactactatgaaaaagtctccctggactctcagtttcttgaccttgtcaccttcaacactctcttccctcaaaccacttcagacattcacaactttattcacaccctcgccttatcataaccagaaactgtgctagctccaaccatctcacctaaaaccttttacgattcaaaatactatctcttaggctctcaactcactttcattgtttagcctctgccacatttctcactcatagaggataccaatccgttaatctatttactttctcactattcatcagcctgccctcctgcctttacttgccctggataatctttctttttaatcattttcctaagctcaactcccttggccatctgttttccgatgtacttgcccaggctaaactctaaacttttttgaactcaactttctacttttctgtgctttcacacaactaactgaagcaagttcacacaaccagctgtgtagagtgtcagagggacattactacatattccttttagcccctcttccccatctctgagactagtcaaaccttctcttaccttcagaggccgcagatgtatactttacagctctcatttgataatcccacttcacagagaaaccacactgtctaatatagaaacactctcatcctccaaccatcaaatcaacactcctacctgcatccatcttttacttcttgttaagaaaaaaaggcatgtccattcccctatcagtgggcagtttccccacttgacccctagatgttaagccacttgctcctaaaaggtcccctccttcctacttcaaacatctctattggatctttcccattcacttatatacatgctctggtatcgctcatcttaaaacatcaacatgcatacacataaccaaacaacagcaaaacaaatttccatttgtcccctgatctgccctttctgatccatttttctgctactacgccaaacttctcaaatgcgttgcttaacatgctttctccacattcttacttttaattcactcttcctttctggcagctttctgccctcaccactcctatgaaaactgcttcaacaaggtcaccagcaacagacctcctgataagtaaaatacagtagatatgtttctgatctcctaatgtatctcagcagcatttgacagaattaactcctccttcttaaaatcccttcctgctgctgctttctygctaaaggcaccttctatcaccctgggcacaatgtatccatcctctttgttggcttctccatctgcaccctaactctaaacttcaagcatcctcaggatttgatctgagccctatcattctctctgccaatctcaagcatttttatggtttcaaatgtcatttatatcctgataactcccaggatatatctccagtagcagatatctttgaacttaagacttaatgtgtccaaccttctactgcttatctccacttatgtatttcacagatatctgaaaaagaacatggtccaaatagaaatcttgcaatttcccttctcaaagtgactccattatctgcggttactaaagccagaaaccctggagtgatccctgactcctccctctcctttaccctactatattcaattcagaaacgagtaccatgcatttaacttcaataaatatatctcaaactcattcactttcctttatcttcacagcaaccacccaatctccatcctctctcactggagaagcttccctggcattcctgctttcgctattgcctcctccaatagattcaccaaaaaccagtcgttggatcacataaaaatctaaatcacatgttacatctctgcttagaatcctttactagtaaactcttacacttagaaaaattgaatattccttaacatagcccatggacctttcataacgtgaacccttacatggacatcatggtggaggcacatcatgacctgcctctgtctccctttctctctcagcaaaagccacactccctagaacacaccatgttctttctaaccttaaggactttacatctagcatgtattaaaatctgtccatttgtttcttttctcatttaatatccatctcccacccagaatataactttcacaagttcagagccagagcttttcaatctctttactgttatatcccctgcaatgaacacagatgcctgggcccagtcatagtaggtgcacaataaatacttttaaagttggtgaatgaatagcagtactctcattgcccacaccagctctttctccccaaatgggactggcaaattttcttgcatccatcttcagttgttttaaaaatatattttttcatagccatgcccccttttccaccactatgagttattaatagcaccgtaagcaattttcagtgtgcttattgcaattccagaagatgcttcaatgtacagatctgcaattgctattcattctatgtcctcaatttatgaaaagacatgttgattcactaaaaataaaaaaaaataggcatttcaaatgaaatgaaatctcacaaagcatattctgtatcatacagctactgccatggtaataagccaaatacggtaaaatacagtttcaaacagagctggaacacacagcttggaatttatgttgraaacagctccctgacctcccatttacctcagatgttttcaaacgtcatcacctgcaagtcctcaggtcagtatggcaaagtactggctctcaccaccaagagatgacaagaaggtagctacagtaaggaagccactgtctccagaatgggtttccatttcaggcacctggtgctgagacaacttctggcttctctgtcatctgaggccccagcttttggctgggtgatgtaggtgatgtgctgtttggactagcaccataattgactctttcaatggatactgctcyacagcaatactgtgctccgtaatacctgtgaatattcattttcttagccccttgtcctgttgcctctcaaaccttatcttccctgtgggctgctgctcatgagcatagtagtatggcccatagcactatggcccactgccctgaaaatggttccacaggacattaataatacayagatgtttccaggatctatgaatcccatacaacaatatattttgacaatagccttaacattttcatttaagcatattctggattgttttgatgaattctttataactgaatactgccatgcaatttttatgcccatttttgtttttcgtttataatacattgtgttaagaggttatattttaagtattgttagcaaatgagaaaaaamgtaaaagtagacttgattcataaatgatgtattcaagctaaatgaaggcaagatggtatttacagcatgcttctcmaaagaagacttagcgatggttcaaatatagcaagaagagaaacatgaatcaccatgccacatgtggcggtgcacacaccagccccaaagaacctgtaccttagaatccacgcttcacacacactgccagtgctgacttcacttcagcaaaacaccatccttggtcatgttaaatcattgtaattaatttgaattgtattcgactgtagttttgtttacagttacctagtaactttctttgtagttgtgtaagacccataattattagcactatacacstgattttgtttgtacatatttaaggactattagaataaacataactaaatcaaggtctaggttttcttgtccattttccacttttaaaactttgtgaataatggtctagtataaaaaccttgaatttttgaatcagacccaggtgagctcaaatcccacttctgcaagcaactggaactatggtcttacagagcaacttacacattctcttggaaccacattttctccagagtggttgtgagcatcatgaaaggtgataaggtaatatatactaaccacccaacctatagctggtgagaaataaaactcagttacctttcacgtsactctctgactttttgctataaaaaagtagcctaaaaattgaactcaatatccatggaatgttcatccattaatgccacgatattatatttatattaactatttttattaacaattaaytatgttgtgttaactcaaagcgactacgcaaggtaaggcattaccttattgacgtggaagattagttttaaagcagtggagagacttgctgagagtcatgcagtgatacatgatagtgcggcttggactttccaccaagccttctcagtcaagtgccattgttctcttcactgtactatgtcaaattatgaccaaaggaatcattctctaaattctttcaacataatcgtatattgtagcttgcttatagatgtaagaaagggcctatttcataaataatgtattaaagatatttataaaataggagaaagttgacaaaggaaagctggaaagccacagcaggtgacattgcttttaaagcaaggacactgattactgaccttgacaatctcattttttcctctgctctcccttaatcattcctcgtacaatggtatccttttagaattttaaggtctattatgattcatgctacaaacaggatgtgtaatagctttataaattatattaggtcagcgaacagttatttttttctaacaatccaagataatatgagtaataagtggtttaaacatttgccatgaaaactactgaaattggatgaactactcattctggtctttttaatctaagattggctatgaggaccaaagaagtcaaagactggctaatgatactgatggagaaaatccagtgtccaagcagacataaaaaatctctattaagagtaaaccagctccttctttgtgctcatatcaggaagggtccgagccaggactaccaacaaatccatgacttaaagagcacaagatgatagaggcaggaatataggcacaggtataaatattagagagatacaaggctttgatgcacgataatacatttgcatacaactacttaattaatacagcaatttcctcaaaatgtaaacaaagatgagtaaaaagatgtttatcaactcatacatataataggaaaaaatgtaaagcaaagtaaatgttcaaagaagtagaatatttatatattttattctctttgtgataggatattgttcaaccattcaattgatgtttacaagtaattctaatgaaatagttttttcacatgatgcctagtattaaatttacacacacacacatatatagtgtgtgtgtgtaataatttcaacctgtaaaaaaaaattatatgagggcacaagaaaaaaaaagccgggaaaaaataccaatattagtgataattttaggctggtgagattaggaggaaatatatttttatttatattttatctgtattttccaccatgttcaaaataatcatgttacttttgtatyggtaaaaaagttamattatacaatttctacaaagttattaagatttattgcatccattgcaacaaaattgagctccttcaaaagagggctttgtaacaccaaaagccaagaaaggtgtgggttaatagaataagggcattagagatatatatcagctccagaatgacctcaaactgcctttgggaattcctaccctccaattttattcattttagataagaacttttctctctgttagttcctaaatggggactcaataaaggcaaacctgccatattattgcacctttttgttttatacaatgaaaattgtaccagttggcaataacaatattgaagatgtttaccagaaaccttggtacgcatcttccccagaatactgaattttgctccawctagaaaatcaatgagcagtggtaactttttctttaggggtcatatataaaacttttctgtgacagagtaaacataaactttaaaaagaaaaattcctggccaggtgtggtggctcacgcctgtaatcccagcactttgggaggccaaggcaggtggatcacctgaggtcaggagtttaagaccagcctagccaacatggtgaaaccccgtctctactcaaaatacaaaaattagccaggtgttgtgatacatgcttgtaatcccatctacttgggaggctgagacaggagaattgcttgaacccaggaggcagaggttgcagtgagccgagattgcgccagtgcactccagcccgggagacagcagagcaagactctgtctcggagaaaaaaaaaagaaaaagaaaaattcctggagtcattcttatctcaaactcttcccctttcccttaaacatagctccttcaaattcacctctgaccttacatttatctcccactagtgtcacttcaaccccttatcacccccttgatctttttgatccttcttcatcctctaacccagtgttactcaaagtggttagtctgagtactttttcctacagtccacaggataaggagttcacatcagaatgtaagtcagcactcactacttccttcaaagagaaagtcttgctagaaagaacacaatgcaaacagacaaatgaacaaaaaaatcatctgaaataaacagcatgcttagtgacatagttgatttacagtctagagcaaagtctttttcttgtcataaactagtaacacacatttgcaggccagcattggtccacaggccacactgttgagttgagctaatctacccctccccactctctccaaaattatatctcagtgtgttcagatcatgataaatgcaatggagaaaataaaacagggccacagcacagagagagtagtaagagaccaggatggtcaggaaagatttctattggcagtggcgtttgagttggtaagaaaaacttagccaagcaaatatcagaaaataagccagcagtgctaacccttccctgtttacctcagtccaaatatagttatatacttctctttctagtagaagttacccttggccttctgtttctgtatcatatagttgtttttcttgtgttagcatctaatttacatatgcatttttaaatggagagtcatagaaaacatattgactagttataaccaatagactcatcaaaccaagattatctttccaaatacaaccaaaaacacataaaacaacaaaagcatttatgatctattgcctcactgattgaatctcattattatcttccaggccttttgtacagttgcaataaggcaatatgaccttcacaacatggactcgtggctcatatattaataatcctttgtgccctgatgcagctgggagaatggatgcttgcagttcgcttataagccaggtatgttaaaccctaactataaacacataaacagcattcagttgccaatacmtagtatcatgtttcatctatttttttcctgaatttaatggcccatgaaaggaacatttttacattcctgttctgttatttaacaaccaacaaacatctctcttcatgcccagcaagaaaatctaccaatacctgtccacaataaagaaattaatcagtcaaaaagaactggggacacttccatttccagcaataaggcagaatacatgtcctgaaaactgcgtattacaaaacagtaatgttggataaaatatagcaaacccttcttcagatgactctctgagcttgtaagaatttaagggaagtttgcaggggtcaaaaaaaggagggagggactgaaaagagagatataagtggttgctgcccaaataactgtttggagctgtttaccaatctctataaccaggtttcgatgactgtttgggaaagcagagaaggatttagattttctcaaaatggaaaattaaatccttaaataaagctggggctctatgcatatgcaatgtatgcatataaaaaactaggcatacatcggggaacatgtggactaaaaatttatctgcccaccagaaaagggagatggataatgaggaatatgtcttccttgtatatataaaaatatcccctagaattgtataagcacaggcctacactgacagtttcaaggtcaaatttatttatttgtgtagagtgagatagccatttccaaaaaattaacatagagtggcccaaggttagcagttcccaaatgcacttagaagaagccaaagcaaagctctctagacctgcactatccagtaaggtgggtaaattcacatttttaattaattaaaattaaattaagttacaaaattggcttctcacattagccacatttcargagctcaataatcacatgtggctagtggctactattaatgaaccctgaagatataaaacattttcatcaccgtggaaatttctattaaacagtrctggtacttgcaggtacatccttaatccaggcttcacaggatccctatgataattgctgctgaaaataagttcacaatccaaaattactactagatgaataagaaaaaaagacactatgagtgaaagtaagtagaacatgagtaaacagtgaaataagactaataataacattagataatagtattatctaatacgtgtcataaaaataaatgtttttcatgtttttaaaaatttaacatggactaaaaatacaacaaaggaaaaagatcctatcaaaggaaaccagaaaacaaaattttaaactaacagaatttctagaagtgtgtgtgtttgtgtgtgtgagtgtgtgtgtgtgagacagagagagagagagatcactgaaattatgaattcagtgactaaaggaagaattcattaactggcagagagatctaaataaatttccaagagtgcagcagaggaaaatggaaagtgtggaaatcaggattgagagacttcaaaggcagaatgcaagtctaattggagttccaaggaagagaaaatagagaatatgggaaagagataatacttgaagaacaccatgctgttttggttactgtagccctgtaatatagtttgcagtcagtgtgatgcctccagctttgtcctttttgcttaggattgccttggctatttggctgttttttggttccatataaatttyaaaatagttttctctagctctgtgaaggatgtcgttggtagtttgatakgagtagcactgaatctataaactgctttgggcagtatgaccattttaatgatattaattcttctatttatgagcatgagatgtttttccatttgtttatgtcatctttgatttacttgagcagtgttttgtagtttcctcatagagatctttcacctccctggttagctgtattcctaggtattttattttttgtgtggcaattgtgaataagactgcattcctgatttggctgtcagcttgactgttgttggtgcatagtaacgttaatttttttgcacatttattttgtatcctgagactttgctgaagttgtttatcagcttaagaagcttttgggctgagactacggggttttctacttacaagatcatgtagtctgcaaacaaggatagtttgacttcctcccttcctatttgaatgcccttttatatctttctcttgcctgattactctggccaagacttccaatactatgttgaataggagttgtgagagagggcatcccttgtcttgtgccagttttcaagggaaatgcttccagcttttgcccattcagtatgatgttggctgtgggtttgtcatagatggctcctatcattttgaagtatgttccttcgatacccagtttatagagactttttaacatgaggggtgttgaattttattgaaagctttttctgcatctattgagataatcatgtgccttttgtctttggttctatttatgtgatgaatcacatttattgattcacatatgttgaaccaagcttgcgttcgagggaaaaagcctacttgatcgtggtgaataagctttctgatgtgctgctggattcatttgccagttttattttttttttttttttaggatttttgcgtcaatgttcatcaaggatattggcctgaagttttattttttttgttgtgtctctaccaggttttggtattaggatgatgctggcctcatagcatgttagagaagagtccttcctcctcgatttttggaatagtttcagtgggaatagtatcagctcttctttgtacatctggtagaatttagctgtgaatctgtctgatcctgggcttgtttctggttggtaggctacttattactgactcaatttcagagttcatgattagtctattcagggattcaatttcttcctgggtcagtcttgggagggtgtatgtgtccaggaatgtatccagttcttctacattttccagtttatatatatagactcctctaatggttgtttgtagttctgtggggtcagtggtattatcccccttattacttctgattgtgtttatttgaatcttctctcttttcttctttattagtctagctagcagtctattttcctgagttttttcaaagaatgagtttctggattcattgatctttyaaatttttttgtgtctcaatctccttcagttcagctctgatcttggttatttcttgtcgtctgctagctttgggatttgtttgaccttggttctctggttctgtttgttgtgatgttaggttaacttgagatctttctagctttttgatgtgggcatttagtggtataaatttccctcttagctctggtctgtgtcccagagattctagtatgttgtatccttattctcattagtttcaaagaactttttaacttttgccttaatttcattatttacccaaaagctattcaggagcatattattaaatttccatgtaaytgtatggttttgagtaaatttcatagtattgatttctaatttgattgcactgtagtccaagagattgtttgttatgatttcaggtctttcgcatttgctcaggagtgttttacttccaatgatgtgatcaattttagagtatgtgccatgtggcaatgagaagaatgtatattctgttatttttgggtagagagttctgtggttgatttgatccagtgctcagttcaggtcctgaacagacacacagaccaatggaacagaatacagaacccagaaataaggccacgtacctataactatctgatctttcacaaacstgacaaaaacaagcaatggaggaaggattcccacttcaataaatggtgctggataactgggaagccatgggcagaagaatgaagctagatyccctccttacaccatatataaaaattaactcaagattarttaaagacttaaatgtaaaacccaaatctataaaaacccgcaaggcaacgtaggcaacaccattctggacataggaatgggcaaaggtttcataatgaagacaccaaaagcaactgcaataaaaacaaaaaytgacaaactgaatctaataaaactaaagtgctcaacatcactgatcattaaagaaatgcaaatcaaaaccacaatgagataccatctcatgtcagtcaaaatggctatcattaaaaagtccaaaaaacaacagatgctggcgaggttgtggagaaaaaggaatgcttatacagggttagtagaagttaaatcagtttcaccattgtggaagacagtatggtgattcctcaaagacaaaaaacagaaataccattcgacccagcaattctattactgggtatatacccaaaggaatataaattgttctatattaaagacacatgcacgtgtatactcattgcagcactattttcaatagcaaaagacatggaatcaaccaaaatgcccatcgatggtagactggattaaaaaaatatatggtacatatacactatggaatactatgcagccataaaaaaagaatgatatcatgtccttggcaaagacatggatgcagctggaggccactatccttagmaaactaataaagaaacagaaaatcaaataccacatgttttcatttataagtgaaagctaaatgatgagaacaaatggacacatagagggtaactacagacactagagcctacttggaggtggagggtgggaggagggaaaggatcagaaaaaataactattgagtactatatatcaaacttgcacatttacccctaaacttaaaatagaagttaaatttaaaaaaatacttggagaatagctgaaaattttccagattttatgacaatcaccaatcttcaaattcaagaaattattaccaggcagaattaatacaaagtaacccacacctggataaatcataataaagcagcagatcaccaaagcaaaagagatgatcatccaggtaatcagggtaaaaagcatcatctacaaaggaatatcaaggtccacattagcagacttcacaccaagagagccaaaagaccatgggattatgcctgtaatcttagaattaaacactaagataaatcattatttaaaaataaaagtgaaatagtcattttcaaataaagaaaaaacaaatgtgttcaccactaacagttctcactaaagaaacttctcacagatgcaacagttatatcaaaggaaagcaagccaggaagaaagattgagattaggaragaatgatgagcaaagcctacatggataaatcacatcaacatgactgtgcagtataataatataaataacaattgatttcggtagtaacaaaacaaattagaactaaaagtctggaaaaagtaacaagaaagacaaagagatgtttggacttaaaacatcctacatcggctgggtacagtggctcatgcctgtatccaagcaytttgagaggctggggcgggtgaatcacaagttcaggagtttgagaccagcctggccaacatggtgaaaccctgtctctactaaaaatacaaaaaattagccaggcatggtgccaggcacctgtaatcccagctacctgggaggctgaggcaagagaatcagttgaacccgggaggtggaagttgcagtgagctgagacgtgccactgcactccagcctgggcaacagagtgagattctgtctaaaaacaacaacaacaaaaacaacaacaaaaattctacataaagtctataaggaaaacaaaaatatatttagattttgttaaggtaagtctgaatgttaaaacttgaagggtagcaacccacaataaagaaataaaggatacaacttcaaagccagtgaagttataaagacatgctgagaatgacagactcctgggggagtaggggcaatgcactggagccgaagtacaatgcctgacctagattaataattaacacataaagaggtatttcttaaaatagatggtagccacacggattgttttcaattttgtttattttatcattattattattattattattattattattattattattttgacatggagtctcactctgtcgcccaggctggcgtgcaggagcgcaatcttggctcactgcaacctccgcctcccaggttcaagcgattctctcacctcagcctcttaagtagctggaactacaggcatgcaccacaatgctcagctaatttttgtatttttagtagagacaggggtttcttcatgttggctgatctcgcactcctgacctcaggtgatccgcctgcctcgcccttccaaagtgctgggattacaggcgtgagccaccatgcccggcccaattttattttttgtatcttaccatctgtttaaaatcatttatttataataaattaaaacaaaaagtaatatgccccacttaaaaaaaaatctgctacactaagaaatgttaagaaaaatcttaaaagagtaaagtgttctaaaatttacaaagtgctattattttcactgcctcacaactggaaaaagaaagacaagttccatattcttccttttgcaaatgaggaagggaaacaggcagagtggtgaaccaccttccttaatatcacacaactaagaagtatcagaatgtgttctcaatctgtctcctaaactctgatacaatttcttacagtgcacaatgctgctaccttgcatctgtcaataaatccaaagaataaattacagaattagcaagtctcatagaaatggcattatacctgaaaagaattctgaacattaacataagaattactcaaagggaacagtcagggatttaaacaagatttatatacaaggatgttcactgaagcattatttataagaatggaaattgaaaatgatctaaatatgtaacagcagggaagtgcacagaacggtctatctgtacagtgcaatgtkacctagtcattataattaattttctaaaagaatatgaaatagctgagaagtatgctaatgatagaatattaagaaagaatattatattgaaagtataataccctttttattcaaatatagatggtaatgtaaaaattaagaaaagccgtgcacaatggcacagtcccagctacttgggaggctggggccagagaattgcctgagcccaggagttagaatccagcctgggcaacacagcagaaccctgttcctaaaccagaaataaaaccttttttaaaattaagaatgataatagaatacatgcatagtaaaaccctggaaggaaatatgccaaatatcaatagtaattatagctacgatggaggggttcaaattattggtgatttttgtctttattctctaaatgaacacattgctactgtaatctaaatttwaaaaaattaacaaataagttttagaacatcttttttgcaaaagcattgccaactttgaatatctccctcccctacaaggttaaataagtaaaaaaaaaaaaaaaaaaaatmcaagaaaataacataagaaaataaatcaaagatgaaaataaaayrtctctgaaattgaattatatgaggcaatggcctggttagttctcattgtcactgggtcctaatcaaataagttaactggcctccaatatgtaactgaaaatcaaatacaagactccagttacccaagtttctggtttaacagcattagctgaatatcaaaaaggctgcccaaggaaggcacctcagccaagacatttcatgtataactgctgtctgtacgactaaaaggtcaaatggctctcaaaaagtgcaaactacccatacagagatatatcatatcttctcaatgtgacaaggctttaacctgaaccaggaagaatcagggacccttcctggccatctacagttcctacatccgacatgcaaggccagtaacaattttctcatacaagatgcctgtttcaccaagtcttttctgctgacccctaaagaaatatctaacgtaattttaaagttcaattcacaagctaacatccaatactacaggctgtcactttcccaaacttgtgcagatctatcatctaatatatcgtgatgagcttccaatcacttcatttacttctgtactggcaatctctcaagtacccattcagcaggtcactctagaggtcttgctgatgatggagaaattttaagatcttcaatcttgttttcaggtataatgcgcctgccatcaaaataaaagtggttaatggttttcccatttcttttccattacagaaatagatgaatggagagaagattgaaagaggattggagaggattgaaagctggacgctagtacagtaggtggttcttgcctttatttaaatcaaatgttcttccatgccctttattcaacccctctcctgttctcttcttcttctcctgcttgtacttgggactatgaacccaaatccaagacttatggcagcaaattggtcaaggaaaaaatgtttggaaaatcagattaatctagttgaagtcattaaaatggagttttcagagacaaccctagcaggtcaggcatttgcacagggattcacacctcaattacgttttcatagtgcatttgtgtgatcacagtgatggtgacggtggtggtggtggtgatgataacaggattgtgagggagaggaggagatgttgaggaagaaattatgagttggaagactcagcaaacataaacctatgacacaacaaaacaagtgtgttacacagacaccaaattgacgaaagataaaaatcaaaggaagacagtatagacgttgtaatgtgacgtttaaattaacttcataaattgaactttatgataggaaatttaagcttgttaaagtgaactaaatatggcctaagaagaactccatacttctgtatttgagtccttgtgtcatttgttgaggacaaaacccctttctcttccccctttaatgaatacgattaaagtatagcagagcaagcacatccttaccacccaaacaagacggttacaaagaagcaaaaatctgtgtacttctctgcttggtttcagaaacattaaagtcaacacttacaaatctacaatacagagaattggaaaggagcagtaactggctcaggtgattccaatttaacttatgttgtaacagcttaggcagggaatctgtttctactaaattccagaaaccaccagagggaaagagcagagttaggggttataaacttttaagggcaatatacaaataaaataataataacttgagagctttttaaattaagagaaataaaaactgcccagctaatttgcttttaaaataaatcattagagacatacaattcctcaataaacactgcaaacagcacaaaataaaccttatctcttactctggccaaagggagaaataagaaaagggaaagaaaaaagtagacaaatataaatcaaagaagaaaggtaacgttaaaaaagaaagaggtagagagagcatggatacaactgataggggaaaatgggagagaagtgcagcaaaagagaataaaatcagactgggacagttgtagtagattcttggggaaatatattaattaaactgctttggcaatcctagcttttcatttcgtcagtgggcattacctgttatcactgcactttgaaatgccaatttaggtcttcagcatggagtcactgatttaaagcccctgttttgtaaatgttttcttagctctgaatgggtcagattttctctggccaaagtgcattaagcctgcaagaggtaattattctcttcmcaccsagcccagaggtggcttaaagcagaggttctcaatcctggctgcatgttagaatcaccgggagagcattaaaataaaatgctgatgtgctattttctctggactaattaaattaaaatatccaaggaacagccccaaacaaggacatcttatgtgctaggtgacactcttacatcccttcagaaatatagaatggcttctagggtgtgggtacacaagatttttacatggttacattttgtttttactctattttcagctcgttcttcagcgaacaaagtttctgagaactgagtatggggacatattcttgctgcagacttgaatacacctaactttttataaaatgtgtgcatgagttagactccagaaaaaaacacacactgcagcagcagcaattcagcattgcatgaagcacagctcagcttcactatcttctccactgccaggcccacccagcaatacaactccttgtagtgccttttaactgaacatttttgttcaacaatgaactgttccagattgttaaggtttcagggaaactaaactgcattttgctaaaaatcaaaacaagaagaaaaagtccttcaggaactgtaaacagtcagaaattatttttaaaacggcccttccccactggtcttatttgaagaatcccagaacctaagaggtggttattgctgagatctgccaactctgagagagccaaagcattatttgtatataatcccatcaacatccttgagagatacctgcagtgaagaaaaacaagcatgaagatcagtgtcaactatggcctaatgtgaagattcacaaagaggatctctaggaatggacttcatgtaattatggatttgtttattctggcagcttggaatcttgtttcatttacctttgttaataatcactagtgtatcactagctggcaataaaaaaacatccaggatcataaaaactagatagaaaaccagaaatagagatgaaaccactaaactaaactaaactaaactaaactaaactaaactaaactaaactaaactaaactaaactaggcttttcccagattaaccacaggaactccctttttgatgatccaagtagaggtgccctgtgagacagactggcattctgtctcatggcagagttattgccttgccagaactagaacaaagtgtttagcacttttcatataaatttcatttaaaatgaatttttgtcctaaaccttgctttatctacttcctttaatgctcagtgagaggaaaataaatgctagcattgattctaccccttctcccaaggaatgcttgttaatctttcccaggatgctgggaaatgccatgtcatagcccacaggaaggaaaagcccaagaagcctaaaattgcctgtatttctaagaagggctggggtggaaaatctgggctggcatacaaaagccagcagaatgtaattgtttgtgaggttatgcagacctatgtcatacttagctgtgtgaccttgagcaaaatacttaatctctcaagctcatgtttctcatctataaaggatgtttggtaagattacttaactcaaaggatcacggtgaatattttacaatttaataatgaatgtagactgctcaacacaatgccttacacaaagtaaatacacaatttattcattcattcaacaaacactgaatgagtgcatagaatattccaggcaatgttctatagtgactgggacaaccaacgcaacaggcaaaaatccctgcttttatactacttgccatctattgttcataaactggatagtattttagacagtgatgattgctgtggagactatataagagagaagggggatggcgaatgggaatcatatgctatttaaacagagtagccagcaaagaccatactgattcagtgaaatgtgagtaaaaaactgaagaggtgagggaatgagccatgcagagtaatttcaaaggcccaaatggagaagcctgtctgctgtgttggcaggtcagcacagaggccagcatggaggctaagcatggggagaatcaggaggagacaggatcagggaggtaagggcatcgctcactaggtagggcttccaagctttgcttttacactgagtgaactgggaagcagctgaaaaggtctaggaagaagaataacatgatctgatttacaatttaacaggaccatattaggagtggtttgcaaaagagattgggcagaaacagagagaagagttaagagactaatgcaataacagaggtgaaagtttatgrgggcttaaacaagatgatgacaataaaaatgcgaagatgtgaccagatagagtctaaatgtattttgcagggagtcaacaggatttactaatgaattgaaattgcaatggaagaaacagaaattaagaatgactccagaggtttyagcctaagcaactggaataattgcctttaattgatgggaaagactaaagaagatgcaggtttggggagggcaagttgttggggaataactggagctcattttgggacatgttaaattttgcattcattttcaacgtcaagtggagatataaagcaatcagtaaaatatcagtctaggctgaaatcagatgtaaacatgggcatcacttctacatagatgctatctaaaaccacagaacaagatcagatcacgaagsgagtgagtataaacagaaagaaaagtccatgaagagagtcctgggacattttaatgtttagaactcaggcaagtgaggagaaaccagcaaagagagaattagaggaaatccaggatatatacataatgtaaacttcctatacattaaatttgttcacctaattatgcaggtagccatgcatctattcatctagtatagcaaaacaagttaagaaaatgggctctagaatgagattaacctgaattcaaatccagattccctcacttaccagctctgagaccctgggaagttacttaaccttgctgtccctgctttcttgaactatgaaataaggagaatagcaccaaccttacagaattgtgagaattaagtgaagtttcgtatctaaagcataaggcttggtataccaaaagctcaatagagaatgctatggtttttataattattattcaagtactttttgagcacctgtaatggatgcacaaataaccatgtcaggtacagggaagcggattctacctcagaaggataacaacctaaccaacaataaaagatacataaaaatttcaaaaaacattatayagaccatggtccccaagacaagctctttgaggacagtgacattttctgtatggtttatacaatatcyttagggagtgggacatggcacagagctggcttgcaagtgtttcatgaatgaatgaatcagattgagatgaagaaacactttcagtttgtagcagaaagagattactgggagttgaaacggacagaggrcatttcattcacaagacaggaagaaaagttttaggtaattctttttcatgcaatgaaccataatgtacataaataggaaaggtggaagaatagtctgaattataagaaactatagccttggaaattattgaataaaccctggaaactaaatagatagaaggaagatcatttttgctgctgtgtcttgttttagacaagtttattttgtttcatgtttttcactgatagaatgcaagccttttcatgagagataacacaaataaaagctaaatgtcactgagctcttactatgccaggcattcttgtaagcaatttatatccagttactcctcaaaataatcctttaagatagatattactcccgcttgatagaagaagtttgaacaataaattttaactaacacttcaaagtggtagaattggaactgatacatatgtgagaccataactattacagcgcttcctatggggaccatatgagtccaggagccaaaatactgacagattttcaaagactcttttgggtaaacaaagccataaaacagacaatgtagtcaaattaatgataaaaataatagtcaagatcactcctctggcttacttgattttaagtaaatcaatgtagaaggtattttctaagttggtttggtagttcagatatttgtgaatgaagtaaataaatgaacgaaaccagtgcattcctaaaatttcctcaatttctgaatgacctggtgtttccacattctggaacatcaaaacttatctaggccttcttttcttctctataaagaataggaattgttattacttttgagaagtaaatcgctatcttttttgtagcaaggcttttgtaagaagctttcttacaaaaggaaggattttggaaggatttctaagaaacatttgcatctgttttggtagaatagtttctatgcaacactgcaatgtcttagagcaatgcttagtgattattaatatatgtaaaaaatgaaaaagtaaaatatggtacactgaaacccattgattcaaatgagccaaaagacatatgcatttgttttccccaaaatgaaagaccaggacaatgacaccacaccaggcacctgtgcacatgcaggtgggggctggagccagtagatgtcatacattgtctttattagcatgttccacactatattactccacaagccaagcagggctgcacactgcctactttctaagtagtaagacatgcaggaagttgttttctaggtagggagtattcccccaccagtctattaaatttgcagtttcatacactaaaaaawaaatttagcagcattgaatagtttctgatttgaaaaataataaatatgcacattagaatatttagaaaatataagtaaacacacacacacaaattaaaatsaaagtcatattgccrctacccagtgataaccccttagattcacataattttgaatcaaaatataagtcatttggagagataatagagctgtggctggctgtattgtttctgttggtactcttttcgcattactataaagtcattttgtgacttttttaaggtactaaggcttagtcacaattcttcattttacaatgagaaaactaaggttcaaaggagaagaatggctggctgaagaacacacactgcttggctctggaaagaacttaaccgctgacattttaactcctgtgctaaccttccaaggcaatatcccactgttctatctctatggctttgggtctttatagtgttttgcttttcaaatttccctataaatttgaaataccctattaagctttgggttagaaaatttcagtgagtattcttcccagatgcaggcccttcgagggaaccatagagcactaatgagtaagatatcaccctagtcctcagttcagccccactcctcatgtggcccttctttcctatcacagcccctagggtcctgcctgtttccctttaatatcttgaactctaccatcatcccctttcttttggagttagtaatcatcatatcaacaattgattgactgcttaatatatggcaggtgccatactatacatacataatctaatttaacccttatgataactttgtgttcagtttattatctctattttctagagatagaaatataggaggcatgttgccaaggtcacaaaaaagtaaatgatgaactcagacttgaaactaggattgtccaactctcaactctctctcctcctgtctggatactgagaaagatgaactcttccaagttcttgccatcaaggctgttcttgaaatccttttagcgtcaagagttttactgtagatcactctggggaaattggaaagagaaaattaaagcaactgatgcaactttggacttagtcccattttcaaggtttagcaacccaatttagtagctgtgtaacctgacctttggtaaattacttgaacttctgagcctaatttccttttatgcaattacraagttttgagcatctcccccaaaactagagtacctatacaatttaccattagaatcagtagagtttgaaagtgaaacagggttctgttaataattttggtggtacaacaggtgtgaaacaggagttgcctgagcaaatcagtacctatggtcctttaaaggtaacgccaaagaacctgccacatggtccagcatacaattttagggtttcaacattttagaatcctttcttttccatatacatgaagcatcaaatagcatagtggttttcaactaggaataattttgccaaccaggggaaattttgcttcccagggaatatttggcaatacgtggagatatttttggttgtcacaactggggcaggggatgtgactggcatctagtgggaagaggtcaaagatgatgctaaacatcctacaatgtacaggacaagcccctacaacaagaattattaatgcccaatggcaacaatgccaaggtagagatttggtgaaactgtattcttcaacgccagagtagaagacatggtagagaaagtctgctgccaaggacgcaagttcaatttgcttctcacagtttaattgagggtcagcccaaacatgaagctaatgaaatcagcccatttggaattcaagagaaatggaacattattttgatagtttaattactataaacagatttgcaaatgggcctatcaccaccgtgaaatcatctcacatctcagagacaacttgctatgcaagaaaacaagaggccaagtaccatgtacataatgcaatttgcatgcattcaaagaacagcagttcatgtgcaatttacacaggtgcttctctaaagatatgaaactataattagcaataataaagctttcatctgacttgccttccctaagacgtgctctgataatgaaaataagtttaatgttttaagccccatgcctaaaataaagcaactatttgggggaaccaaagttccttgaaagagaatgagcaattatccacaactctatgggccatagttaattgatcattcatggcattttcacactcgcagataaacatgaaagagatattgaagttttaaagctctcttcatattcacaccccacccccacccccagccccatcaagccaagcttcagtattcattgttgcattcagagtatgcagcttggctcaggagactggctgtaagactgaatatgtaaactcatatttatctcaactcttaaggcaaatatagttcataaaaatacagttgcaagcaaaacatcatctctgtttctctgtggaaagaacatttggtagttgtgaaagtctaaaaactacagtaaagagattttaactctgtgtgtgtgtgtgtgtgtgtgtgtgtgtgtgtgtgttctaagtttctttctgctctatcagctggcccctccttaccaggaaggattttttcctgattatcgtgagagtgaaccagttcaaacaactccacagatcactgctatttggtacaatacaatgtccagctggccagctgcatgagctcttaagattagtggttgtttatgggcttcctacagtggtgtctcttctgagcaggaaagggaatgaaaggcacctgttcagagaccctcccacacaaagatgtattttctgacataaatctatgtatccaggcagaaaaagtggagaggggcaagaaggagtgatgtcttccagctactgcagatgagggagaggaatacaaagtgataccagttggggagacagagcagcttagatgtgcagaagcttcaagaaatagcacatcttgggttaggctaataaggagaagtttctactttcaacttttcctgatctgctttgtcatcttttaaaaactaaccttccaaaaaaagaaaaaaaaacaaaactaactttcttctcagatggcttcagatagaattaatcattccaatctggtgccaccatagtagagcatatacggttctattacactcgttggactatatagtaacaaatttacttattgcctgtgagttcacttagagcacttgtgatttcccactgctcaacgctgtgtctggcatgaagcaaggcatgaaataaagctttgaccaattaaagtaaaatggtatgagaaccacacaataatgttgtgttggtatgctattgttctgaagtatagtcaattacgtaatggttaacagctgctaagcacttactaagtgccaagtaccattcaaggtgcttattaattggcatatagtatttttatttgtgcatattaattgacatataaccatataagatgaatactcatatctccattgtatagtttagttagctaaggcatagagaatttcctatgggtcacatagctagtaaatgacaggtaaggattcaaagtagacattctagctgcaaagtctaaattcttaactattagcaratattgataacaagagatttccaaggaaactgaacagagaagaatctaacagtggttgatgtaagtgcagggcttattaggctagaaacctgaagcagaattcaggtgggcccaggggctaagctaagccattcagggtgctcatcacctcctcagagttctctgcatcctaatgcagctcatcctgcttggccctggaactctgggacagggttaaataagatacatcattgtgtctcaaccacagcagtattgggatttgagatcagatcatttgttgttgttgggagcttctcttgtgcttgtagaatgttcagcagcattggtggcctctacccatcagatgccaggagcactccctccttcccctgtggttgaaacaggaaaaaatgtcttcagacattttcatatgtcccctgaaaggtaaaattgccccyagttgagaaccaataagatacacatagcccctaattcgacaagaatgcctcgcagagtgcagaatgactctactcttttctaccatcagagtataccatactgtgcctggaatgacccttcttgggccacatatacttgtgcattctttcccgactggatgtcagcaggataagatgcagtattaaagttcagctgtgttttattcactgcttgggatccaatgttcctatgtaaaagctcactcatttagagaaaaagaaatactacctctaggtttgccctagaattaggaaatttaatcagactaacacaccctaggaggtaagaagagcaattataatcatttccatttaaaagagcatgaacatgaagctcagaaaggttaagtatttgtccaaaatcacaaagctagttcatgttagagctagagctcaagcccagacccttttatctcaaactctattatatctccctgccatccgcaggggagtagagctttcaaaagaccaattaaagcagaaagataggcgaaaacttcccaactgcaatctgatgactaaatcatcttgagtggagtgggagatgtccaaacattaggaatacttaaaatgaagtagaacacagagctgaataggaagcagcctctgcagatgagaaatgaataaggatcctgccacatagcatccatctctaactcataccatttggtaaataatagatctaagcattcctgcagtaaacccactcgctaaaaatttccaagtgcagctgaacaatcactgaaaatatacatcttctcttgcaccagcttgtggggaaacaacaggacattacccactggcctcacgttgacatgggcacccaggacctcttttgccagcaggaggtcataatctaatgtgcctaccacattgaaagaaacagcagtgacaacggccagactgacagagaggaaaatagctctgtctctctctctgaagaattagatattctcctaatcaggatgatcaaaaccaaacatctgacactgctgtagccacaacagcagtaagtttgttcccagtcactatcagtctaacagatcactcttcgtgcccactggccaaaatgttgcttgaagttccataaactgcagcacagctcttacaggatgacagaatctgtaacagcatggcctctaattcccacggctaagtgtactcctttgaaagttataaggcctatgttagtattaaagtgtttgatcattcattcattgaacatgtattattgaaacctattctatcctagtttcygggctagaaatgccaagagaaataagaaaggattctcttcccaaacatcctgcataattaaagaaaatacaaatacacaaatatgtaattgaatatgtcaatcaagcctgataaataaggctgaaatacagcaggatcaaagaggactctccaaatgcgacaaattgtgcctaggatctcagaggcgtggatgaaagatagaaagttctccccagcagatggaatagcaacagcaaagacacagaagtgtgaaatactagagcaagttttgggttccttttgaagttcagtagggctacagcagaggctgtgagtagataagtcatcaatcatggtagacttcattctttcattccaacaagctgatttccacttcccctcatagataaggatgatagaaagatggggagctcctcgtgataagaagacagacatgatcaagtttgcatttagaaatagtattcctctaataaaataaggaatggatatattatgcaagcaagactgagagtagagaaggctcccaataagggtgtatagaatagaatggagctcatattccagtagcggacacaaaatattaagaagtatataatatgttcaaagagcttcaggtatgtttgtttttcagttaattctctgaagccggtaccataattctctgcattaaactgatgagaacattgcaccactcagggtatggctagaaaaacagaagccactccatgtattacaggtataaaaaataggtaattagagataatcataacattgggaagaactaggaacacaaaagctgggaagcagccaccagcaatcctaggctgtaggcagcaacaaagtcacttattttaagaactcactagcaagcctctaaaagttttaagaatctccaggaagcttctaccactgtttagagctacagcagcaaacaagtcattctcaagagtttcttgggaaatgactgtggctgtcacatttgcccaggtgtctggctgcaacagcttctggagaatggtggctcctcctttcctgcctcccaacatttgygccagtgcccgtcattggctatctctaacacgaaatcatatagggaaagaaatgctgggaaagtgttcctgtttctctgcaatatgatgcagaagggacctttagaagggaatggtggtgatgatgccaggtggataacatggaatccagcataaaaattgaggcaaaggaaatttagatgactttcccaagaacacctaggaattgagaccagagaaattaaataatttgcccagggtaacatagctcataaaaagtggagccaggattttggactttgcagtcatattacaatgcttaccaattttaccactatgttgatatgggaagttagggggaaaaaagagagtaaactcctgaaaggtttcaagttggaaaatgaccttaggtgctattaagtttagaataggtacaatcatgtaccaagtagagatgtggcctgaaggtggaaatgatcaatatacaggtgggaaaggggtcaccggaggtttaacaaggataggacatgtggcagtaacctgcatgtagcataggagtttatcggctggtgggtgcagagtgggagactatagcagggaaaggtaatttgaggtaagaacacattgtgtataaaggcaccaagaggtgactgggcatgatttgttacaggaactgtgatatcttcactatggctagaacaaagggtacgtgtgggtaagaatggagaaagagactagaaaggtggtggaactaaatcatggcaaacctgaggtgccctgcttgggagtttggggagctactgactgtatgaagcatgaaaagttcatatttataaaaatcactcagccaaatgcatcagaggcctaagaaaaagtaagtagtatgttcacttatttgatttatcccaaagcttctctagttaatttatcttcacctattgaaagggagaaagtgaatgaattaagccaaagctgatttgtcatttaaaacaaagcatgttattacactcaccttgccctgaatgatcctgtyggtcctaacacacaagagaggaagaaaggtaaggcttcggatatattcgttatctgctatccatccattagtgtccaataatgccgataagcaccacaatggcagtcgcttctcattgcaggacccacaagctcactttctgccaataccagacgcacaaaaggcaaacgctacaagaccctacagcttagccctcggacacaaaagctctacacattgcattcacacaaaccaggactaaatggtcatttataaagcaaaacagtcacccagaaacggtcacaatgcaaggatgattagcaggaggcttgtgggaatggagcatatactgtgttgacaacaggacgtgcctggcttatgaggggcaatggcatgttttaacttaaatgcaatgttaacacctgtaaaggagagtcatttagagggaaagcacagatgggactctggaattgattcttagtgggagggaaaggagaaagaactagaggagggaaaaaaaagtcttgaaaatgggccctacactccattaccaaacaaaggtgtttcagaagctgctgacctttccacaatggcattgatccagccacagggggaaacaaagctgcaaataaaataaagtcacctcagtataacagcttaaagcaaattgtgaaaagaagaaagaagttgaccttgaaaggcaaatacattgtcaggccaacaccacctggacaggcatttttaaccaaggtcactctaaggtaggaaccactatgagcacagggaaaagggtactgatttacagagcaagtcatgagcccacgtatcaagtaatcacagcaataatttcaacggcgaggacgaatctctgcttttcctccctcttctgggcttttcattgacaaccttgcttcattcacacttggttctctagcggcttgttcattctttgtacaggcatcccagtcatgtatgaaactaatatattcatcaaactcctgatgttaaagctgcaagaaaattgagcactacactcacagaataaggggaaaaggaagaagaaagaaaacagaaagaagacgtgtcaaaagacagttaccttaagaaaaagagaattgacatgacaagaaaagatccagagatctaaaaaaatgaacaaagttcaagtcagtgaacaagtrtgttcagtgataagtgaaaatcaagaaaaagaaaatatctgataaatacaatggggaagttcagctgacgaaaacaagagccaaaatcaagactatttttctcagaagtactttaagaggttcatcataatgaaataaccacaacaagggcagggagactataactttgcttgaatattaatttcatcrtatatgttgattataagatttcaagttaattaaattggataaacaaactaattacattccccatccaatattcttcgtttattcaatcaacattattgggcagctaacatagcaccatgttagacactgggtttacaaatatgtataaaacatagtgtcagccctccaagagttcacagtaccctcagattacagcaatttgcaggcaaataattacagaaatataagtgctgaaaccaggaggtaagcaggcattgagttatgggtttatcaaccctgtgaatatgaaacctatattcgttttgtaacctagttttggttaggaaaagttcagactctctgaggaatgccagcattactgggctgagaaagtggtacattcaactacatttcttcattaagctgtcttagaaaggatctttcccagttagttttcaaacagaatttacagtgtgaacagggagaaaagaaaaggaaaagaaagcaagcttggctctaccccaagaatttctattttagaacataggaagacctgcagggcacatggcttgatgcaatctgccaagtggaagcatcgagtcatagtcaaaggcagtaagagtgcaggccacccctactcagaatcccagttgcctattacatcaaatccaactgaatcattgagttgacttagttgagtcaaacttaaaatccctgtcagaagagtcaactgaaacagcctccatttgccaaagctggaacaattagagaaacaaaataaagcagtattgtattataaccctaagtgtaaaataaatatcaatgagtcttcctcctcaatacacataaccccagcctaattataagaaaaaaatcagacaaatccaaactgagggatattctaaaaaaatacctgaccagtactcttcaatattgtcaaaatcatgaaaagcaaagacactgtcacaggcaaggaaagcctaaggaaacataatgactaaatataagtggtagcccgaatgggataccgaacagataaaggacaataggcaaaaactaaggaaatctgaataaaggtatagactttagttaaacacagtgtattaacattggttcattaattgtaactaagtactgtactaagcttatgtaaaatgttaatagtaaggaagactgcaagctctgtacacatcttcacaatttttctgtgactctgaaactgttctaaaataagaagctcattaaaaaagagagraagaggggaaatacatccttagcagataacgtaggacccatttattcytcagcagtccatttaggcagctgccataggcaggtgatatcttctggctggttacttccttggatgccttgtccatagcccagtgctgcagctctccattttcaccacttgcctcaatatttggagccaaattggcccctctcaaccatctccaagcagctctaatcttcctggagcactatttcctataccctgtggccagaatgagggcctgactcaagtgtccattccaacacrgggcataagccagcaggtcccagcgggtggccaaagttctgcttatgaggtcaaaaagagggccacgatgaaattgcctttgcaaaaaattagaacagtgataaaattgtgacagtaaaagagatctgacytaactgactcaatcttgcctttaacctccaagctgccctttgttcattcttgggcttaggccaaagtaacttgggcagaaatttaatttataagttaactttgaaacaaagatgataacagcccttctccaaaacaaatcctttcttttcttggagaccagaccacctttgtaaaaacaaacaaaacagccacaagattagaaattacggctcaggattcatgaagccagagggcacaggattactaatccccccaattgctcctagagataacatcactactataaagcctaagattggtgtttgaggtatttttcagaccctgcattctgatggatcagatggcatcattcagactcgtaaatggactcatctgatcttgtggcccctacccaggaactgactctgtacaagaggacagcttcatctccctatgatttcatccctgacccaaccaattagcatttgccattcccaacctctctgcccaccagactatctttaaaaactctagcctccaaattttcagggaggttaatttgagtaataataaaactccagcctcatttttagcgaactgtatgtatattagactctttctctattgcaattcccctgtcttgataaattggcatatctggacagtgggcaagaggttctcatcaggcagttacaatgggagagaccaaggatcatagcttgtcctaatagatgccagccactcccatgcaggatgggggtgagcaggtttctgatgaccctaatttcaagacaatggccctaactggggagaaagggaggtcatgaaagaagaaaactgtgtggtcttgaatggaaggctggcagggagaacaactctgaatgttgaacacagacaatatctaacatatgctctcaaggttggaataaacaaagcaaaccatatgaagatgtgcaaggccaggatgctgtaaaaaacagagcattctggatggagcagagcactctccttactgtagtgcggcagcaactgaaaagtagagcggctgcagtggggctcaacttgggggtggcctatgttattcgacattgggttggactcttaatatggaagccagagaaaacacaggtcttaacccaaaaagtgctctcagcatggtgcccagaagctcttagcgcagtggttggcaccctagaggggcacagaaaatagttttctacacttcacattacggtgatgaatacagtgatagaaataactccagaagttgaacatgaaaataaacactggttttatgcctatttgtggaatgcttatttaatagtttattggatgttcattatgcactaagtggtggaggcgaggaacaaaagatcagtgagagggagctcacaggcctgtggaaaaggtagacaacaatcaattaactatacacatgagtgtgttcactaagaacctaaaagaaatactctgcatgtgcagtaggcacaaagatggaaacctaagatctccgttcatggaaggacttgctgcccaactgcagagagtgtaatcagccgacattccccagctgtcagttctttcagggtccacttcagctccagagagatgcctggtctgaggacacaatctccccagggcagtctgcatctggcaaggggagccgggtggaggtataaaggtgtaagggtctggttattttggtccaacataggaaactcaggtacagtatttgttactgatctttgtcatgccagaattataatttcttcctcttctctctctgcttaatcctgcttcctcccctttcctttcataggtgttgatcactaataaatattttgcacccctaatgccatctcagccatatctgcttccagagaatccaacttgtaacaggaagaaagggacttgtcaatgaaaatgaataacaaataactctgggctagaccaggagatccagaaagacttcatcatagaggatattcttgggttgatttctgcatttgattagattttaaggaagcaaagataggggaaataaaattgccagctgggaattaaatacataaaatccacatacaatgtgtgagattaaccatctggggaaataaagctagaaaatgtctgtaaatgtttgactgaggaaaccaggaacattgaaacccccaatcaaggtgatttgggagtaatttcaaggaaggagaagtgcagtrtgattgtaatttactaagcagaaggaagtctaatcaatggcattgtaccctgtttagagacagactgaacagaaagggggctgggcagcccaaggtagaacagtactttacaaggtgacacagctcaagactggggaagctaagggcagtttgctgttttctaattatctggggcagggaaagggagtatttttgcctgccttaaaaattccctagtaaaaaatgttcctagtcaagctttacggcacctcacttttcaaaagagcccctcagctttactccctatttagcctatttttaaggtgtatagttctaggcactttaaatgtattttattgttcaccctcactttctagacagcgagtattaccactttgattttgaggaagaaggaaaccagggtcctaaattgtaaattaacgtgtcttcagtcagctgttaggtcaaagaatggagattttgcacactggtctattatgccccaggcattggggtttataactgcaagctcattcctttcaaacctcacctgaagcttccagttgatcctagctctattgtattagaacttggaaagagaaggagacaggcaggsagggtggagcaaggggtagttagcaagctgaatcctcactataagagaaaggsaatagataataaataaaattgtataaaatatagcaatacaagcacattattagaagaaaagaatggaagtaaacagtagaagcaacttaagaagaaacttcttaggggaggaatagggaggagtgagcagtagactgctgtttttcatcayaagccatgtaacacatatcatattaatacatgaattatatgaattaaacaatgctctactaagagaaaaatgtttgtgtggtacagtctgagagagatgcagtcaatccattcctataaatccttcacaccaccattcctgggttaagccagaatagcaaacagccacatcccacagcacagggagaagattagcaagttggcagggcccgtaacagtgggtggggggagggggagggggtgctgatggttgctcaaaaactgccaccccttgactctgtttgcatgttgttgtgatgtactaaccagcctaccagaacccactgctattaaaccttcctctgagcacacgctcgttaaggaagcttctgaccattttttccttcccttcaaggtgagaatatcctagtctgagataaatgtctgacctgcctgacagttactgtaaattactgaattgacattctgagatatcatatataatcaagttctacgggcatgtcaaatataatcctgtccctaagagacggaactcttctcagcaaactggcaaaatcagatttctgaggcagcaagacacagaccctgggtagtcgtgatttcaagcagaagaaatgccacgttgcatgtgagctctgggtaaccaattatgcacccttgtgcctgtgataccctctgcctcactgtgagccacagatgtgtcctatgagaacttacagggtcaaatttggatttgggttttattactctcctcatcagcagtgagcaccacgaacacaagcaatgcatcttttcctctttatatcctcagcactttgcatgccatctaacaaacagaagaccttcaattactgttagctgaatggatgaatgaataaatgaacaagtgatactaattgccatgaggctacatagaagttgatgtgaaacaacatagggatggatcaatgccgaggagaatgctcaatcaggtgaattaatgttccaggaattatgctggaggcagccgtgartcagagatgagcatccttgggtcccatgaaaagtggctgtcatgattccaacagtaaattgcagcacaacagtttcacacataccaaataaacacaggtccatggacatcaaggtgtttataaacattcatgtcccaccaatcaaattgccacagttgccctctccctgatgaacctgattggatcccgttggagactctaccttacttgacacactgaatgctgcagttgatggaacctcgaaaccaacagtattttagaagcttcttcttctcctccatgttaaattctactttcccttacctgttaaattacttttgttaaattactcactgttaaatcataattgcatgttaatgagttactagaagagctggtactatgatacaaaagaaagttatctctgccccagaccccacagagaaacctctggacttcacctgcccctcattcttgcctgggatacatgtgaggatgggtataggtctccyaaaaagctaacctttccctataattatctctcccacaccacacttctgtccatagcttttctccttattagttctttatacacatttttcattacttacccattcattcattgactcaataaacatgtttttcagcacctactatgattctaaaaattactataatacagcgcctgtcccagtctgactagatcccatatattagaaagaaatctgaaacattcagacattaagaaaaaatgtcctagtatccctttacttagaatcatgcagacaaaatacttagatattttagtcaataaataaatattcattgaatctttctactaaataattagcatcaatttagccttcataatagaaaggatttaagatgtagtttgtattcagctacacttaaggtatagctgaaaatacgttaaatattttcaatgaagtaggttagacaagtctgcacatatgaaacaataaagagtaatgtaagaagttccaaaatgtgtgatcagtctgtaattatttggggattcagagatataattattgtaggagatgagagctagcgagtccaacctcttttaccaagtagttaaaggcaagttacttcacttctgtaagcaaccatttaccctaccataaattgaggagtctgaattaaatgatttataaaatcactctgagctctgaattccttgatatgtctctaggacaaatcacagaaagcttcaggttgaggcattaacttcatctgagcctttgcaaattaacaaatgtggatatttctattcatattgacatctttagctatgtatctgaggtgttacaaaaatcatcttatgtaagtgggccataccttaacttcaaaatgtcttttttgtaagtgggcatctaaatccgattatcattgttctttgagaatggaaggatgtgttaaaattactcactgttaagtcataattgcatagcacctacaattgcaagtaagtgtgaatgtacaggtgtccctcctacacaaacccatcaccgagacaccaaaaggatggaatctggctgccttgtttctaacaaaaaaagaaatcttagagtgagaagagaatgccagtgaggaaggctaacagagagtgtaagatatgcatgcaaaaagctccaggcaagggtttcagcagttcctgcagagagcggccccaggctaagactaactttcatcccaatcatttctgcagtttctcactgcatgcctgatgtgcgtgtctgtctgtgtgtgtgtgtgtgtgtgtgtgtctgtgtgtgtgtacatacacatacacattggttgtgaatgccccaatcctatcaatgtcacatgttattatgtcttctgcagaggagagatcactaaaaactgacatttgtagcaagtttaaaggttctagtgatttcagaaatgcctaccctcaacactgaaaacaaaatgtataaccagacaataagaggataagggaaagatgtgaggtgcagttgactgctttctcttgtctccctacttatgagacaggatggaggattaagtctggaatagaatccttccttgctcaagagaacaggcctattcttgtgactgttctaatcataggaataaagcagggtcagccracatttgcttctagattgttatatataaatatatcaatatatcaccagctacccctccaacaggtagatatccatacaaagttaacttcgatctttattttgtgctttgcattctaaggtattcaccatgttaaaggttgctagagatgatgtttatttcactctaagaccaaagaatttcctttggcccagccygcccgcttccctgtggggttgtcagagacaacagtcttgtaaagggtaataccaagtggaaagtattgtatcacagtggtcaaaactccaacgccaagctctcagataaacatgatgtagttgaagctttcaaccctgagaggcgttgggggtcttatccctcttcagccagctgcaaaaagagaccgtgtcactgaaacttataagcgccaaggggaaagaaaaaacaaaaagggattcgagagactgactatgcatgctgccattctgagtcttagagattccaggcaaagcatttgataaaaatgttttttgaataccaccaggaaaataacatacagaagaaatcctgtcttaatatgttttctgttgctataacagaataccacagactgggtaattaataagaaaaagaaatttactttttacagttctagagtctgaaaagtccaaggttaagggactatatctggggaagacagcattactgcattataacgtggcagaaggcatcgcatggtgagagggcaagagcatatcagatcgggtccctcttccccttcttatagagccaccagtcccatcatgggatcccccatcctaattctaataccttccaaagcctccacctctaaatatcatcaacatctaaatttggggattaagctttcaacacataaaatttgggggacacattcaaatcatagcagacccacacattcaaaccatagcagatctcatcctggaacttcactagatgctaagtatatatttttttctcatttaatttcccactcccccccccaaatctatgaaattatcaattatatctatttaatggataagaaactgtgattaaaggagatgaagtgagttgctcaaggccactaataactgacacaggtgggattcaaacctcagttggtctaagtccaaagcctatgtgattgctactttgctataccagtgacagaagagatgttcctaatattttgaaaaggcattaaccaagaataagtataccgtggtggcacccaccactctggtttgtatttctaaagaatccatcacggttacgtttgccactgcaaattaaagtcatttgaactgtgatgattcaagcaagtgtgcacagacaatattaaaaatgaaatgccattgtgagttaatgagacatcagaaagcttttaacctcaggctgcaaaactgtgttgttaatgccaatgctcatgaacacagtctttatcaacaagagaagagattggaaatacatgctacccatttataaagacaagagccagaaggtagcaaaatgccagcaatcaagcagcagcacccctgtgctgtgagctgggctctaaatgccaccagtctggtgaaccaacaatgttccttccctggcaaaaaccctgccactgtccagtctgaacagccacagggtggaaatgtagcctgagataaaaccacattcactctgttgcattagcctctaagtcaaaaagagtgaaatctgtgatgttacctaatttgtaaacacagaaacaaaacatgtaattgtctacaatgctctggacataatacaatattaattttaagtggcttaaatgagaagtagaagtaaacctcactttaaaccatattgtggaaaatcatcatatcgatgtttttaaccactcatgtyggtaaatataataatgaaacacaagttgataagaatgacatgcctacagagttattattctgaatatgagctctcccttttcagggctatagctaaaacaaatataagaaattaaatttagtacattcttattccaggacacaccctaaatggtttttggatggatgttatcctaattaaattcctgatataagcctgttttctcattatttgcttccaaaagacaggtatagaaaaaattaactagttgaggtgttccacaaaggtagctatggttcctaggctttgaggtttagcagactagtaacacttcaaaaaattatttttaataatatatgtcttacaaattgcagccaatgttcctttggacacacgattttttaatatactatatgctgccactctaattttattttaaaaggggacattttagcacacacacacacaaggatggcccttcatcttaacataatcttagcactatacattaatgtatcttagcattatttaaaaaacttcacttttattactcttatctcacttaatcatggacatataaaattatccaactactagcaatccatacctggtatctgaaaacctccctgtggagaccaaggcatgtggactgatgcccggatgggtggaaaactcaatttctcattagataacattaaatatggcttctctgattctgtgccttcctatagaaacagtgataatcacaactccctcatggggatgatattagaatcataatcgagcaagacaataaacaaaaatactttataatttaaaatattataaaaatgtttattataatgtataatattagctaaactagactgactctaattaattagtttttattaaccacttcaattactgcattttgaacatctwctacatgccagtacacataataagcattagggacataaagatgaatacagctattccccgccactcaaactcacagcacagccagggagagtcacagaaataactaaaataactaaaccttagtaccacaagtactataaagtgcataggaacacagatgggacaacaatctattctgcaagatggatcaaagggcattagtgatgcatggatgaataaaagtttcccaggcagagaagttgaggaagagattcaagggcaatggaaagtgcaagaaaatctgtatgagtcctctatttttctcacattcatcactccacaattatctagaagaatattcatctgtatattatatttagtacttctcaactttgagaatttgaatctacaaagtttagaggtactgaacttcaataatttatggataatgcaaaaggtaatctaaacttaaagtataataataataaaataaaaaaatwaaaaaaaggtaatctagcattagtgctcacagtttgtttcttggagtcagagaccctcagagaggaggaccttggatccaactcatcctgcagcttaccaagtgacaaaatctcttccagcttccctgacacaggtccataggtctctgtaccaaaaacagcagggcaaaacagagtatagagaaggagacagggtcccagctctttcatttacaggccccatgactatgggcaagacatttttttctcttcaagcttttgyctctgtaccacaaaataaagagtttgcactagatgacctctaatacttctgcaagcctaaacttttcaggatgtccaaagcacaagatttatgtgacctagcaaaaaaactggcattttagtaaccattgcattgttgatgcactttgagtttgttctttgcattgtatatcttgattcagaggtagttgttcaccaattatttccccactctgtcaagaaaccagagatctaatcattaagctaaatgggaaaaacaacacattttttcagaaaagaagttatatgtttataggcatgatttgcaggaaaagctaaagactgagcatcctgaagttggagactatatctaaattagtttattcccaaatttattccgcacagatcctggaacataggaaatgctcagcaaatgtttattcaatagaaaatgcttattcaattaattatcaattagatgagaagagatcgcacatttaaaaatacaaaaaagaaatcaattccactaatggatgaaatattaatttaatattaattctattagtagttaaaaaatataatcatgttaaggattcagtgcaaaacccaagaagaagaggaattgggggaattaagataaattcttagcattcatggatgctcctagaatagccaaagtttgctgaaaataattcactgcaagtgaaattgkcaggagacagagtgtgacaactgcaggtggaaataggattggcagaagaacaagtttaaggacactgtgcctcaccaaggtgacttataagaagaggaaatttttccactggcttagatccacaatacatgaggcaattctctcagtaaagcagaaccctagacaagagaacctctttctgccatattttttggatggagcagggtagactgttgttggatggaatgtagaggcaggtttaatgcaggcccatggagacttttctggctgaggaagtccctaagtgtagctaacccttgctctgcagtatcctatctatctttatttttctgattaaagctttctaataaaacagaaagtagtaatctgtccagacaaacagaaagactttccaatctaccattcacctacccaagcccaaccccactaacagcatttccctgctataggcataatatttaccaaagacggaatagtcagaatgtccaaatatctgcacagactttccttttacaaaaggaatgtaggtaactgttntaatatattcttgctcagctttgatattcttctagtctaaagccttttatggcttcgatatgtagattctcctctgaaatgctagctgtagagatgctgaaatggctgtgaaatatatggagagrcagtttgccattcccagtacccatagaggtacactgcttgaatctctcttcaagaaagaccttgctactcagttgtgaaaagtatagttagccaacagacttcatgtgcattagccctggaatccactacagtggcatcagagctgaggttcttcaaccaatgactgagtattacaggggtactaaggctgggccattttgcccaacatgggactctaacagacactcttcattcaaatggccccttagcctgctgcctasggctgtttccatcagctctcactcttcagattggcaagtggtgagtcagatagtgaacagtcttcccctagctccaggaaatgtgcaatttctccagagcatccttgaggctgttctcgctaggcttaagaggaagacagaatccacctctcccccttccaatgtgggagctccccrttgattgcccaagactttgtaagattcacatttggtctgaggctctcttattttctctattttgcttctttctttcctcttcatttttcataggcattcccctctttcttaataaaccatctgcccctctagctcggtctcagcatccgcttcccagagaacccaaataacacaccagggatatctggaatgtaactccagtgggggtgcagatcctttccattcrtgccccttagcctgctgcccagggctgcttccatcagctgtcactcttcaggttggcaagtggtgagtcagacatcagtgaacggtcttcccctagctctgggaaatgcacaacttctccagagcatccttgaggctgttctcactaggcttaagcggaagacagaatccacctctcccctttccaatgtgggaaaaagtgggaacaacttaacaactttgtccaaataaatgttttatttaatcctcagctcccctcatacctttccaaccacttaatagaataaagtgagaagtcaggagttcttaccacaggataataataaatacaataataataatgatgggataggagaaaactttggaaggtgattgatacagctatggccttgaagatgctactcttttcatgagtgtatactcatccccaaaatatggacagttttacatttcaatcacactttagtttaagaaaagagagttctttgtgagccctgcttacatggcccagcatttccagtttggaatgggggagtatcatctgatcttggaagctaagcagggtcaggcctggttagtacttggatgggagacctcctgggaataccgggtgctgtaggctgtctacgaccataacaccctgaatgtgcctgatcttgtctggaatgggggagtagagtgtccacctgctattctgttctacgcatgtgggcttccacccatgggacagaaagagtactattttaacatcctgctgcataaagaatatttaacttcagaaatgtctatcaaaagcctcatcttctgctgtatcttgcagaaaagcaattaatttgatctatataaatcccggtcaaatgtactccattgagataaattggaggcattatatcactcttttccatggagtctcctcacttcaggaaaatcatgagactttgaaagtgacttaaagctggctttgtctttcctaggttttccttttgcttttttaaaagtgcattatgtcatgtcctaactgctagattgggaatctgatttygtcagaggattctgggtaaagatcaacagacaacaatagctctgggaaattttaactctgggttccgaaaagattatttgaatgacaaagttcataaaggttcccttaagtaggtaatacacaaacactttataatgatcttgaatctcaccaccctctgacacagtaaactggattaagattctttttttttttattatactttaagttttagggtacatgtgcacattgtgtaggttagttacatatgtatacatgtgccgtgctggtgcgattaagattcttattcaaggtcaaacaatagctaagaatgtcagctaagtagaaaagttttccaaggccagatccacatctttcactgtgatttagtcaatcattgccaacaccttttgttcaactccatttatttaccyttggtggatctgaggaacatcatctattagtgctctgagacatccccatccaaagacacacacacacacacaaccttcatatgacctttcaactaatcaaatataattagcaaacatgctctggagtatcgatgtcctttacagggcaggtggcagattagagctaaaactttaacaccataatgaagaaaacaacaacagaagctaccttaattgactgaagctgagagacatttccagttaaaacagctgaaaaytcaaatcaagagaagtccataccttttaaagttggaagactcaagcgaagttggggcttttttttttttgcaagggtaccaaaggttttatataatgaactttttagaaaacaaggtctggaagatacatatgaggggataggctactaattttgagggtgaattcaatggatgctcctcaacttcccctaaagactcatactcatgctttggaaataaaaaacagcatgtgatcaaaggaaattcaaactggtcacacatttttagtaggaaagtctaaggaataagttgagtctcttaggtaggactctttctgcccaatgagtggaagcccacattcacggaacagaacaacaggtggttgtcaccatttaaaatgtcatacaccacatagagtgcagccagggtcctaagaactagcatgtagaacaaaagcaaagctatggacagactgaggtgaggatgagacagtagcatcacattaaagcttaatggagtcccaaatcttagataggagccaagaatgatgggcaatgtggcaaacaaagaagcaaaggaactaaacwgaaggttgtggtatctcttttacgtacagaattctgccatgacagggtttctgagagtcttacaggyttggaaccttaaccccagcatttgatatccatcattgacttagcatggggatgtggcaaataatgtaaaacatcacaaaccaccatatacaccaaacttggactctatgagtcttttttgcaaacctgaacttagccaaatgtrtgatagaactctcatttaattttgtccaagttgcatttgctgcttttcaagtaatggtagaagtcacccttcgtctgattcctattgaaaatgtatatttcattttaagaaaggctgagtttacagaaagaaggaagagctccataaaagcaatttttacatgaatgtaagaggacatgcaattttcatcatccctggcattatatagattgaatttaatccaatctcatcttctacagaagcatacacaggcagcagttctcaagctcactcattaaactgtggagttaataatgctgaccagcaggaagatggaaracagccgatgttttcctactggtcaacattattgaccaagccaaagctgttaaattagctgctgctttggcttaacagttctcaagatgcattttgtgtcaaggtgcttacacacctaggagagatgataaatttggataataacagaactggaggtatatagagatggtgtaggactatttataaggtgtttaatgaaaattgtcaccatcctcactgtggaaaaaaaaattgtaaactaagagtacaaaaatatatcttagcaaaagaaacttcagaaggggtaacaaacaaaattcagctatggctaaaacaaaatgaaaaaaagcttatgttatctaaactaaatgcagaatatcctgcactctgagggaarattaatctatcaggagtgttagaaaatcaacatttttctctctcttttgtaatatctgcatggctatttactaaatagctatttattgaaaacagggctataagtaaaacaatgaaaatacacatatatacatacacaaagaaatatgagagtttttcacttcttaatattcttataatttttaaaatattctaaaaatctcaggagatggaaaatgttaacaattttaagaagattgtaacaagaaatataatagtttgcattttgcttgttgcttgtgggyttgtccatagktacaaagaatttaattttttatttttattcattttttgtttgtttgtttgtttagagatagggtcttggtctatcacccaggctggaatgcaatggtgtgatcatggctcactgaaatytagaactcctgggctcaagtgattctcctgcttcagcctgctgagcagctaagactacaggcacaccatcacacccagctaatttgttaatttcttgtagagacagggtcttgctatgttacccaggctggtcctgaactcctgggctcaagcaatgctcaaaatgctgagattacaggcgtaagccaccgtgcctgatcccaaataatttattttaaataaactttctacgtgggaataattttacacacacaaaaaagttgtaaagatagtacagacagctcctgaatacctctaccacagtttccccttatattaacatcttatataccatggtgagtttgtcaaaactaagaaaccaacattgattggcacatcactattacctaaactccaaattatattcatattccacagatttttttcactaatgcccttattctgttccacaatccccaccaatgataacatgctacatttagcatcattctctttttcagcctgacttggggtgatagaatctgatcccagtgctctggaatggctgtaacatacagacgaaccactgagttactgtatcttgtcctttagcttttttatgatgcctaatgtttagtcttaccatgtctcacccatactactgacatggtgataggaaacttaaactcttaaatccaaagcactcaccacctttcaatagtcattgaattggaaaccaacaaatattattgtaccatttggttatagtcatacattgtatttattagtagacaaattttgtgaaatacactttgatgtgtttttcctcttaatcatctagttgttacagtgtygtttttttcttcccttatagcttctctcatctttaggataaagtttttttgcaaaagcaaaatggacgatatgctcatggggtagggaaaaagaagaaatatgatgtaggagaagttcctaaaatataggaaaaggaagttgaagccattccagtggaggatatggaggtgggggagattcagagaggatgtaaggagaacaaaggtgttaaggacctaatacctccaactgttcagttttacggagatgggtaaatcgggaagataaaaaccctagagagggcagaggaggattaaagaacaaagaatttgctactcaatttgctgtctggaagtctagaaggagagcctctaaagatggactcccatgcccacagaaaaaagttgtaatttaacagaaatggggatgtggcatatccagggtccctgaactcctgatatgggaagaaagggatccagagtttcccatccccaccatgagaagcttactgagtatccagctgctgaggtcaccagggaagagtcacagggtgagatacagatgatttcaaggtggaccgcccaggcaggtgagcaaatggaagctgaaattaggtcctggagaatcagtagccccagtgacagcagaggtgggagcatagtggttaagatagaaaggcttcctggcagcactcatcatgcatggaaacccatgctaggctacagcaagaacaragactatcacccaaagactgggtaagaggaattacatcagtcactccagtcctctgacagaacatgcaagtactatcttgagcataagggaaagaggaggtctccaaaagctgtgaggaagctttmaactttgaataagctgaatacttagcttacctaaatgagctgagtccatccaaacaacagttttaagttaagtgagatccaaggacctataatcacacaggtcctccttttattaagaacagggaatgagaatgagatcatactgaagaaaataaattcttatacattaaatggcagggtaataatttcaaccctgatacctgaagactaatacattaagtaaaaataaacccctgtagaatgagcacaaaatgtttctcttcttttgtcctttaatccaaatctcgttcattcttcagcccttgccttcttcatgaaacttccatctagttcagtgcccagtgacctaacttttctctgaattcctccctaacttaaattcygtagcattccagtgagccagattagctctaaggaggtgatttacagaagatagagatcatgtcttactcttttttgatatcccacactgcccagcatgaaacagagcagcacataaatatgtgttgattgacttattgattgatacacaataaggcaaagaaagctggttgaagggaaataacaaaggggaagaactgagttgagaactggagccactcttctcttctgggatgtagaaatgtgaagcaatttatagacgctgatttttttttttaatggagtctcgctctgctgctcaggctggagtgcagtggtgcgatctctgctcactgtaacctccgcttcctggggtcaagcaattctcctgcctcagcctccggagtggctgggattacaggcatgcgccaccacgtgcggctaattttttatatttttagtagagacggggtttcaccatgctggcaccatgctcaaactcctgacctcgtgatctgcccgcctcagcctcccaaagtgctgggattacaggtgtgagccaccgcgcccagccagaagctgatttttttattgcttcttctaactcttagttatttacagctactaaaattagttaactattaatcacaagaaaaggatgagcaaagttaattcctctggacaagtcacacacactatacctaatgtgatcaattttctctgcagcaattaggagtaaaaaaaaaaccagaaaattaagtctgttagatatctgcctccttttgaagcttgcaattctaaaacaaaataacatcatgyaggtgaggagtagaaagagaaaaaaagtttccaccagggtatctctcctgttgccacttgaagactgcaaggtgagggtggtggaaatatgaaaatggctaaaatccatgtctaacatgggctgttaaaacaagacctgattgtctcaaggtggaatttgttagaaacaataattatttatgacattttattgcaacagcctccaaagcatatggttaccttattagaaattaaaattcattttcatataaatctcagcaggatattacactaaaataactagagtaactccaggggacaacaaakaattctagtttagctcttctaaggcctggcacttgtaatataaaatgtaagtacaatggcatatttggaaaatgtaagcaatctatctactgcaagcatgaggataaatattatatattcaccactttggggacatatgtaatttacattttccctacaaatttccactccttggttttacattttccaacttaaaaaaactttttattcattagcaatttatttgttgttctttcttgtttttaattgtggatgtcaaagyatagcttttagctgattgactttctgctctttgaatcatagtaaacaatacatcagattataaaaattggcatgctattgtgagccagtagaagcactgatcactacagatatttctaactgttatgtctaacataagattcatcaaatttcttttaccgcagctttgactgctcagagaatcttcatgttttttcatgacaatactcagtgcttattttcaaaactggcctgctgagtttgtaccatgattgtttttgatagtgtgctgtatggggaggaaataggtgtatgtgttttcaaacctggcattcaaatcctaactaataatggcttaaaagctaatataaggccctgaacctgtttatgctatagaaatgcacaaaagtaaawtagatttcttaaaagttgtcctaattagctagaacattattttgtaagctagatagggattacatgattaccacagtttatctttgcatttctatctttgaaaatataaaggaatattagaatcatatttgtcatcaaatattattgaggatgcataaaatggtaatgcctgattcgtactgattttttttttttttggcaacaaagacaatgcagtcagctctctgtatccatgggtcccccatcccccsatccatggattcaaccaactgcaggtcaaaaatattggggaaaaaaatkgatgtttgtgtctgtattgaatatgtacagacatttttcttgtcattattcctgaaacaatgcagtataataactatttacaaagtatttacattttattaagtattatcagtaatctagagatgatttaaagtacacaggaggatatgcataggttatatgcaaatactatccattttatgtccaagacttgaacatccgtggactttggtgtccttgagggggtcctgaaaccaatcccccacagacactgagggatgaatgtacattttactrtattcattaagactctgttcactgaccaagctaatggacactagcccaaatcactccatggccatcatgtctaattaagaagtgatgggatgcttccaacaaaagccttaccatcaaatttaccacagcccatttctgtgtgttcatgtagtcaacaaacaagtattgagcaccagtgataaactagttatagtatcccctgcccacaaggaacccattgtggtgaatgatgtgtcactcagcaatcatgacatcatgattatgttaggtggaattataatgagtagatgatatmaaatgaaacttagtagagaaaatctaagtctgcctggggagtcaaggaaaatttcaaggagatagcttctaaatcgagccatgaatatcatgtaagagtttgccaggcatacaaagtaaggatggcattctagacaggtggaaactcacttcattaaaagaggaaagtatgacaaggcaatgattgccacaaaccgcctaacacaaagcttctagaaggtggtcaaaaatgccacttttgcactttgggaggccaaggcgggcggatcacgaggtcaagagattgagaccatcctggccaacrtggtgaaaccccgtctctacttaaaaatacaaaattagccaggtgtggtggcgcatgcctgtaatcccagctactcaggaggctgaggcaggagaatggtttgaacccaggaggtggaggttgcagtgagccaagatcgcrccattgcactccagcctcggtaacaggagagaaactctgtttcaaaaaaaaaaaaaaaaaaaaaatgccacttttgcctagggaagtagcagtcattccaatccaatggcaacagccctggacattggttagaagacaaagtttatgctccaggcagtaccaattactcttcacctgaccttgacccattcaagrccagagaagggaaaagactctcccaaggctacagacttataaatgacaaaaaactrtgaacagaactagaacccaccttcttaacttctctggatctcctttcctaatctacaaaacgagcaggtttgaaataatttccaaaggtccctacaggctaaatttccacaagctaaaattgaaaacagaaccaacaacaacaacaaaatacccaaaaacgttcaatcctctggcagactgcaaatcctagcatccagcatcctggacagcagtgaaatatgtaacgaattcattttgaaggactgcacagaaattaaaagcatggattaagcaagaaacttagaaacccagtcctctttgttaggtatgcattcagtaattgagatcacatttaaattgaaacagtctcctggcctggcctccccatcttagaagccctgtttacagagttgccccagaaattgttcttacttatgtattaagcagcctgtatctctgaattaataaccttgcatgtaaatatctttgtcttcctaaaaacattattgasttaaatacaaatattttcaactttttttttttttttttttrcatgctacactggctttgaaagaaccaaagaaggagaggggttgttatgccctttctgtacaatacctgtcaccttgggaatgtgattctcctcaagtacaacacttctgggagaatgcagaataagagatgagtttaatttccttctgccaaattaacttcctctgctgctgcaagtaacatgcataatgataagcctggagaatggaaagtcagtgtggactagcgagtatcgttcccagagcaggttccagttcaaaagcagccacacctaaaggcaggcaggatcagcgccaggaggcattgactgaggcatgtgccatttgatgcaaacaaacgaccaatccgaggcacgtcccaatgtgctggcctggccagacatgccttctccattgttgttttattgttatgtaggggaaagagcaatgaattttggaatcagaccaatctggattttaattctagcccaagatctagctgaactgagcatgtgacttgcctatggcagggcctccatttactcctccttaaaatgggaataaggtcacctattgcacataattggtacaaaaattaaataagagcatattattaattttagaaggcactcaataagggttgacatatgttgtctctccctttttgaaaatccaccttagaaatctcagtggcagtaaaacagtggacttctacaactctgcccagtccctgatctgctggaacaaagacaatgcattacaacaaaaatctyagtctccagaaatgttggtgtcagaggcaggaataatgagacagggaaatgcagtccagggcatgtgttcccttagtaggcaagactttgctccccttgtgatggcacatggctctaggctctcatcagatcatggtgtctgaatacttccttaggataatccccatcctaggaatcagaggccatctgaaaatgctggacytgttgggcaaacaccagagttggttttcaagatcaggactgggtcaggagaatagtgagctgtggaatccaggagtggaaaccaccagaagatacccacagagcatggctaaggaagcacctggggtcaagagccagagaagccagtgcaattggatgttgagcaggacttctccccagagccagaattagtatcaaagctgaggatgaaatgaagccaagtactcaaatcytaaagaaagttaaaaaaacaattaggtgccagacaccatctccaagtgttgctatctaaatcattacaactccatcccctcgcytatgcatagaagcaaaaatgacagctcagggagaaaggataatgtggtatgagtcactagctcagaaggaatgctttgaccttctaagagattggaggtgccagcaagaacaggctgagatgccattcctcagctgggtatctattatgcaatgaaactaccaatgtctgtgtctgagcatggagagaaaaatgctggagaaaaatggcagaaaaatgacaaaaagagttcaacagcagaataatctcttggtactggcatgtcctggtactgccatgtcaagaatgtatgttttctatggtcaagtgggcactgtgaaaggtaactagccttgagccactttgccaaggccacatccaaaatagttaccggttgggtgaggagacttcagcagtaagaggctacagaggcacgctattaagaaaaggatctaaaaaggaggagtgrttagatatgaggccaggccagaatgaatctccctgttagggacacgtgcaaagggatggtcatacaggacctgccacagaccttactgacccatgaaagggcaaatatttgcaggcccaaggcaaggcaaaactgaaaaaccaaactgtactccccccatattgcaagccctcaggccaaagcttggacagtgctaaaaggaggaaaaagaaagagctttaaattgggtatgaaactgaagtcgcaaactagactggaatttctttttttttttttttgagacggagtctcactctgtctcccaggctggagtgcagtggtgcgatctcggctcactgcaagctctgcctcccgggttcatgccattcttctgcctcagcctcctgagtagctgggactacaggmgcccgccaccacgcccagctaattttcttttaaatatttttagtagagacagggtttcaccgtgttagccaggatggtctccatctcctgacctcgtgttccacccacctcggcctcccaaagtgctgtgattacaggcgtgagccaccacacccggcctagactggaatttctataaacagaagtcactaaaaagctatggaatctgcctatgatgttgtcaagggaatagttgagggcagttattgaagaaaaataaaactgcttcatgctttataccccagctaatttcagactgttcaattaatcagttatgccaaattctgctgtcaagtatgaaatgaggtcaagacctgaaaagaaaatcaaagtcaagaagataaggtaatggaacagaaagggtaacaagagaatgggagaaggacctggagaagtcaaagcagtctcaataccctggccttttatgtaatgatcacccttttttgtattcataacctttctgcgtgaatagacaggcctgattttccagcccagaattgggaacatgctaatacccaagaatggagcccatctgccttacccactgcaaacaaactgctgggatagaagcccctattcagagaaccccaagcctcacgtgttccacaggggattaggaccagagatcacaaactcttcctcttcagaaactgaggaaaacagtgaagaaagagcattctgcatcacgaagacttggatttgtacccaactctgccacttattggctatatgagtataggcaagtggcttaaccttgctgtctttcaccaataccaccaagggacactattgttacagatgggaaaactgaggtcaagagaggttaagcaccttgcaagaattagcatcaaatagttagctagtggaggagtcaagaggagaactcagatatgtccaactctaaagctgtctttggtaccaaggtgagaaaatagcaaacctcggccgggcacggtggctcatacctataatctcagcactttgggaggctgaggcaaggcggatcacgaggtcaggagatcgagaccatcctggctaacatggtgaaaccccatctctactaaaaataaaaaaaaaataggtgtggtggcgggcgcctgtcgtctcagctactcaggaggctgaggcaggagaatggcgtgaacccgggaggcggagcttgcagtgagtcaagatcatgccactgcactccagcctgggtgacagcgtctcaaaaaaaaaaagaaaagaacaaacctctctaaagtgtcctgacaacccagtaagaagaaaatactttcaaatatatacatacatatatgtatatagatagatatgtatatatacacacatatatgtacatgtgtatatatagatatatatacacacatatatgtacatgtgtatatatagatatatatacacacatatgtacatgtgtatatatagatatgtatatatatacacatatatatgtacgtgtgtatatatagagatatgtatatttgtgccattatctacaagcagatggtaataggtcttgtggaattaaatttacacttattattcaccatgataggtcattcaattctgattcagatgatgaacttctacccagaagaagggctcttagtatatgaagtacagtccatccctatgtgrtaaaatagcagaaaaggcaaaggggaatttattgcattaaggaaacactatttccttaaatgatatgaaatttcaactaccaaatagcagattgaagataccacaacatatttaagttctgaagtaraagttgtaagtgtagcatgactcagaacgctgagcacagggatggtttagttgttgtaaacacaggaaaatcccaatgttttttgtgttagttttcttttctattaactaggaatcaatatatcacggttttaagaaccaacaaattattccacaaaatactctgcgagctgaagaaggtaagaatttcattataatattaaaatgtgttaaacattgtttcaatcctttatgtatattaatttgttctcagagcaatggtatgatgtaagtactattgttatcctcattatactgatagaaaaaaaatgaggtacaacgaaatttaagtttctgatatggtttggctatgtccccacccaaatctcatcttgaactgtagttcccataatttccaggtattctgggagggacccggtgggaggtaattgaatcatcggagtggttacctccatgctgttctcgtgatagtgagttctcacaaaatatgatggttttataaggggtttttgcctccatttcgctctgcacttctccttgctgccaccatgtgaagaaggacatgtttgcttccccttccatcatgattgtaagtttcctgaggcctccccagccgtgcagaactatgagtcaattaaaacctctttcctttataaattactcagtctcaggtatttcttcagagcagcatgaaaacagactaataaagttccccaacatccatagctagtaacttgtagagaagggattttaacctgagcaatatctctccagagcccatgatgtgtaggttttgattagataagaataagtacatccaaggttaagttagttaaggatggtttcaaagggggaataagaaataaaataggatcagtgtagagtaaaatctacccaagttaaaatggctttggcctttttcawtagaattaggcaatgtttcagccttatggggtttccttcttatctattaaaaaaagccattttgattattggctcccatatgccaggggtgtaccaggcaaaattgcattagatattctgaagtttttagttttcttctgaaataattctttaaaatatwtaattcttcaacccagttaaataataacaaatattatgactgttgaaatttatttacatagaaaatgctttcttacatattatgtaagtgaagattataaaattgacgtaggggagcgacctggtgataactgcattccctaattttcttaaagagtgytatattttcccatcattgtagttgaaagcatgtacaatgatacaaatattgacagtcacttgttttattcatgtgggcttaagaagggtaagaaaaaaaaaaggtgcccaaatgtctagaacagtgattctaaaagcatgttcctgacctcagaaataygggaaggatgctgtgtcttctgggaacttgttagaaatgccaaattatcaagccctacctgagacctaatgaatcagaaactctaagkgtggggcccaggcacctgggtccaagtgattttgatgcacatggaaatttgtgaaccaccagcatctggtaaaactgatcctctggggccttgtgcaggtgctaaagatttcagttgccaagggtgcacaaggaaaaggtcaataagacaagcrtctccaaattggaggtgaaggtgacaatggccagctgaaaaatgcaatctttcttaacaacgcctttcactccacatctggaacatgggcagatctgtcatgggagagaacgggacctggaatacaactgcaaatgtgaaaggagggtcctgaggctctgaaaagtcctgatctaacatattctcttttgagactaacttgaagtattgcctagtctgctctgctgaaggctccctggcttgtaaagagggctgggtgtatcacaaaagggagcggagggtagcatggcaaactggaggctgcagactctgccaacaggcatcaaattaaagtctccaaagtgcctgtgagccaaaaaaaaacaaacttcatatcaagtgtagctcatagcatgccaactttgggcttctaattctaacttcttcattgcgaagacagaaactggtcaatgaggtgaagtccattagtaaagcctcacaagacagtgacagcagtagcctagctctgaatccaaaagmctcyttcttcccaggaaatgtcataatttttgtgcatggataatgtgaatcttgcaactaaccaaggttcttcttctgctccataaaaaawgtacagcacaatttcactaattatataagacttgtggccaagaaattcagataaaaattctcccctgctttgacttttggccagtttatctaaactagcatgggtttattcttcagataaaggaaaagactctaatcttcttctaatcttcttccccccayttcccaaaatacaggaaactgaaaaattagagattcaaaagggcccaacattctctgagagatgccctcagtccctcatctgtgggttcttatggcaccatacccaactctgcacattgccctcatcacacagctttatgatttatttaattagctgtccatacgcccaagctgagagcagcagtcatagattttccataactgtatatcatttctaaaatctccctagttctacttaccactcagcaaagttgaatatagacagatattcaaaaataaaaatgatagctatattttattgagtactaactgtgggttagggtttgtgcagataaactaagaaaacatatataaagttttatctttctagctagccatgatttcactgactactggaattttaccttaaaattcatttctactgctttactgtacttgcatattcttgtaaatagagtaaaatagtagaaatgaattttctactattcaaagaatagtaaccacttcaaattctaggaaatgaggcgagatatatctaacaacaggtaaattaacttgacccagtttaatcattctgtaagttgaccaggtgaatcacatccaaaaaaattattttacatatttttcagcaaacaaagttgacccaatcaacctgaaacattttgggaatcaatgtaactgagaggaaaccactaacttggtcagaccaatgtggatttttaaaattcattgaaacttggtttaaatcaaagagggtccaagtagaaatgctatttggggactctaagaagaaatttaatcatctagtcttagcgaccaaagcgagttaatgtaccttcaaaataagccaattactcccttctctctgcaaatgacccatcatcrtaaatgttggtcattaaggtgccatatgattctgcagagaccaccaagaggacacaggatggtgatgactcatcactaatgaactgaacagcatccagtaggagtcatgcagatgcccggccaggttaaaggaggagatggccgtaaaggctaggaaaaatgtaaagaaagagcttcccaacatttgtgaaacataacctattctattctaagtggggattggaaggatgggaggaaagaagaaagggaatgaattacatcagacaagcccatactaggtagtgaactacattatctcatttgattccaacctatgcagtagaattactaaccctttttgcagatcagagaactgagaatccagacaattcaagtaactgactcaaagtcaggtagcaattaagaagtaaagccaagatacggactcagatctgtttggcttcagagatcttccattttcagtaaaataacagctgagattcaaatatttattacttacataatatatgtatcaaacagtttattaggtgctagagatacaatgttcatggggaaaatgtccagaatcattgagaaatcctacaaacaaatataaaattagcattgtgagggtacaaaaaaggagagatacatgatcctaggagaatgcatattggaaattacactggaactgggcagggaagttaactgagaaggtggtaactaacctgagatctgaaaaaaaagatagaygataactaagtgaagctagtaaggagtaggggaagaatgctgcaggaagagggactagaagatatgttactgagggatggctaatgtgaatggagacaaagaggsagcatggtgcaaaatragatcagaaggcagagagatcctgaaggttcctgtggtctgtgataaggatccatcttgttccttacagcaatgagaaactgtgcaccaaggccacgagggcaaaatgttcagttttgcattgtgaaagattactctgtgtrcaacatccaaaaccaattaaagagagctagaatgaaggaagtgaagaggccaccaccaacgttgagatgagaaacatgaaacgctgggtctaaaggatgtcaaaacatgtggaggggagttgatgatttgaaaagatactcagtagataaaaacaagtgagtctggtaatcgactggactttagggtgaaaaagaggaaagcattaagaatgtctcctaaatatgtgactatgtaatgggagggttggtgctatcactcacagatagaggaaacactgaaagaagagcaggtgttcagggcagagatcatacatctttaaaacatgaagtttagacaagtggtctgagctggggggtgtagtatataactgtgttagtaaaccacttatcagagttatggcactggtatagatgggttggggatgggggatggggagttagcagaggccaatgtctgggatcaagccttaaggcactccatcatctgttgtctgaggaaaggaaagcgagccaagaggtggcacaaattccagagtgacatatcacaataaagtgtgttttaagaaggtgcaaatggagtgtgaattaagtttagaatgctattgaggatactgatacagaactataaacagcgaatacttgcaggtccccagaggctcaatarcttgccacagtcacaaaacttaacaggagccaaaccaagattggaacccaagtcttactgatctgaaggtctctttccactgtattatgctgaaaacaatgaaaatcagatcttaaaataacgtaataaatagatctgaccacactctaataaaagagatayctgaaaaatatttaccaaaacaaaggtaaatttgttggaggttttccacaaagatcccaaatcattaaccatagaaatcattcaagtagtaagctctrcgcttttaagattctttaacaaaaattccctatacaaacaactttttagaaactgtaaatcacattggcataattcttaaactctcccagggcacttttacaactgctattaaaattctgtctttaatatgaggagagagagactttgcttacggttctacatttactgacaatatggccttggccaagtcacttgatcctcctcttctacaaaatgaaggggctaaataatactgaagacatcatatgaataacatcctatatctcactacaagcactgtggcatctcatagcggatgaacatcattactaccattgaacaggtgaggcaactaaggaacctggggttttgatcacatagccagatagcagcaaatagggacctaaattgggtctcctaaatctcagttcagtgtttgctccacataatcattctcaatcatatcawcattttacaggtccctcatctgcaaaactgaaagacgtcagagtaaaagatagctattggtttttcctacccataaactatcccctcacttctaatacaacaccctcagtttcatttgagcaggcatctctaccctactctcagtcacatggtytgagtgaacgtgaattctcatcctcactttccaggcatgggactgtgtttcaggactggctactcactatgttacagattcttggatacctgagttgtttggggccaagacttggacccccacagactcatcaattctctgacacttgctagatccactgggattacttagttaagaagacaagcttcaagatgatggtagcagttgaaccaatctgcctgtgaataaaatcaacaaaagtcagaaggagaaagagagagaaagagagagagagagagagagagagaaagagagagagccctggtgacattgtttgagccttggtgacattgtttgagccctgaatccagctttgcctgaaggctactcctgaaatttcagttacttgaagccatatattttctctgcttaagccatgttgaatttgattttctaccatttgcatatcaaagaatcctgatcagcacaattggcccttttatataccaacacgagttccttattttaatgaatcyaccacacatctacactttcttagcttattgatataagagaaatcagaaggtgacaaatagaaatagggccaaggcaaatgttttaggcttaactgcacttgtcaaagatctaatgatttttgcaaactattcacaaaattgagaaacagcccccagtatggctytgctctgctcagaagattaggagtgcatagtgggcactgttaataatcatagttaaagtaggaactttacatcacttcatatcctaccaytgtcctatatgtaatttatgttctagatatagtcaacttttcaaatgtattttgccatcatatcatctcctgctcagtctagaaactcttttctgtcatacccacatacctttgatggggcctgagataccaacagacttatgattcctactaaaattatttagccaacttctacaaactcttctaaaagcacttttaaaatgaaaaaaattaagaatttgataaataaagttgtcaaaatacatatgcctttccttctgtctggcatccttttttctccctatttgtctggcaaaatacttyaaaattcagttttaagtgccttgcatggtggattccacatacagctgtcacagtttagctgtgataacaaacaatcccaacatttcagtagtttaaaacaacaaagtccatttaactcatgttatatgactattacakgtcagcaagtgggctcagattactgaaagcctcaggaacctaggctgacaaaacagtccttttctcagattgctggctggaaggaattttggaggtattgctcactgactcactgctctggcttggaagcaacacacattgcttctgttcataactccttggccagaactacaagtcccatggcaaacacattagtgcccagaaggggatagaatcaaaaatatttggtgcactgcttaacagctgcacatcagaatcccagggccttggactccctgggttacccagtggtcagactatggggtagggcattagcaaagcaaagagagacagagagaggagatagayagaattttagagataaattgatatgcaatattgtcaagttactatcttaaaaaattcagaactgtatagaacttatttaggcttatttctacattttattttcaaaaatactgaattacttatgggctctcccaaaagtttgagatacaccacaaacctttcagtggttcaggtctctaaagattcaactctgactctaggtccagragaggtcttagagaagagtgaatttttgcagaattcatcaggaaactgcagctcaccacattcaagaaccacagggacaaaagaataggtataatgggccaatctaaattccaatcttagtcctaattcttctggaatctatatgttcatctttaaaaatgaagattgtgaaatctactgcatagtcccctatgaccattaaataaaataatatacgtaaacgcacccaacacaatgtctgctgtgtaagagggattcaggaaacgttaacctccttcctcctttgtagtcttagtacctagcacagtatctgagaacaagagatgctcgataaattcagacaataaaaggaaaagaggaaggaaagtcaacttttcaaacttttaaaaaactttagtgattcaaatatgtctactttaagtcattgagtatttagaaaaatgcatcctgaccaatgtaccatgtacaatactaagtgctagtattttactagcaacagtgaataagatctcatccctgaccttaagaaggtcctgttcttcctttgttgcatgtcacttcaaggaaaaaagccaaaatgataaatggggtacagaaataacctccaaaaccgtgccctggagcacacacaactacaggcaagaagcctcaacctggtcatgtaaatctaacattgtaaatgaagaggctcagaagcaatacctactgttagcctggtggccccatgagtattcctagtcaccaagaagaaattcaacaatgaacacggcctatcactctaagascagaaagaggattcaagaatttaaagatttcaacaacaaagggggaatttaagagttccaagattttctcctcagatactcaaaaattccaattagscagaatacgccattctctgagtacatcattaatcagtttgaacgtgttttccattatttccaactttacagtgctggtttaaagcaggtattatttcagagcaaagattatttcattgttttgggaacatcataaaacatgctatttacatggaagataacatgggggtaggcccagtagcatgatttattctaacataaaacacacacgtgtgcacacacaaacacacacacactgacatatcttccattcaagaaaagtttaatttatagttttttaaggttttagcagttcaggtttccttttatgatagcatggttaccaaatatgctttgttttttcatttctaaaaraaagtcacagatttattatgttcagctccttactaaatgagctgaagggagatttataaagcaaatraatggaaagatttacagtttcttcctcacagcagctaaaaattatggaaaagctcattgacctttcaagagaagaacttggttcagtcgaccaaaaactaagggcacttaagagctttccaattaatcctttaatttaaaccctttgtctttctccagtaaatatgctggggggcctgcaaaatcctatccactcattttcaagtgtaactacctgtggccactgcaaacagcatgtcccatcacactaagcagtaagcatcaataatgttgataataattagaaaaggagggaattgggagattagaaagagaggagacctagagcagtaacgtgggagaatctgattttgcagggtaacctaaaaagaaagaaaagaagctgagggagaggactcctgcatcttgaagggagaaggaaggggatgagaatccgaaggttgctaaggacaggtttattacagacagggccaggttaagtattctgctaaattctatcctgaagttctccataggggagaaatttggaaggggattgtggaagcatgcctgaatctatgggagactaattccttatctatgctgacctaaaattgtaaaataagagttgcccaaatgtcttctatctaagatacacaaattatgttccctcaggacccataaagmgagtaaatataaacaggcaaaatccctcatttagactctgatatttggtctttgttgtgtgtgtgtgctttttttttcatgaagacaaatataatattggattaggattgaaggyatgtcatttatttattaacagyataaacttgggtaaatcgttaattctcttggatcttkggttttatgggaataatagtaatacctagcttcgcggtgactatcatagagtacatgctgaggaaataytggctgtcgacaacagcagcaacattgtcatcttttgtcaaccacgactgaatcagaacaagasaaatgagatggtttgttacagaaacaactggattcagtataaaaagatacaagtttaagtatgtgtgagcctcaattccctcttacaaagatgaaaactaggattgtagaatcaaagctctaactctactacttaacttcctaggtaagcttagggtgagtctcaattctctcttacaaagatgagaaatagyattgcagaatcagagctctaaytccactacttaactagctagatgacctcaggcaagtctctcaactttccttagtctcagtttcctcacatgtagaatgagaataacaatattttactggagtataatagcaaaaaccatgtaaggtacttagaatataaacatagaagwtgtactgataaatattagcagcaacaacaactaggatttatttattcacttatgcactcaacaattatttaccaagtagctgctatgtgccaggcaaggctggttattagagagtcaacagtgaatgaagcagacaaaaatctctgacatcttggagcctgctctccatgctaataagagtgtcttatgcacttaagtatttatttaataatttgagtatgttttaagagaggacagcatgaaaaaagtcctaatctggactaagatttaatttgccagccgggtgcagtggctcacgcctgtaatcccagcattttgggaggcccaggagagtggatcatgaggtcaggagatcgagaccatcctggctaacatggtgaaaccctgtctctagtaaaatacaaaaaaattagcagggcgtggtggcagatgcctgtagtcccagctactcaggaggctgaggcaggagaatggtgtgaacccgagaggcggagcttgcagtgaggcgatatggcaccactgcactccagcctgggtgacagagcgagactctgtctcaaaaaaaaaaaaaaaaaatagatttaatttgcctgaatctyggacatgtcactttacctctctgggccmtagtttcctcaactataaaataccctaaggaaaaaaaatccctaaattatgagagtttataggatactaaggaaacaatatatattaaagcacttcataaattaaaatgccttatacaaatatttgttattgtcatatttattctagctatacacgggcttaatggccacatattcagaaacatcatacccaaactttacccaaagaggaaagcaaaatgacgaaccattctcttcttaattatgattcaaaaaaaaaaaatttgcacacaggttcagtaaattatggaagagaaacaacaggttttgtaggagtttgcgttaaagaaaacaaactttcataactcactacagttaccataaaaaaaatcctgccacttataatataaatatacagagatttttaggaattcccagatttgtaaatattactaaagcttataattatgtagtaaaagccattaaggagcatttttgaaaataygatccacagaattctggttttatggaatgatattaagtttcatgtgtgaattacaataattccatgtacaagtaagttaaacagatgctatgttaaacacagtttgcagtgagcttttcaaagccattatatgcaaatttgatatctggtatgtaaaatgttctaaacatatttgaacaaggaaacattttccctctcttcttaggaaaaatggaataaactttaagaaatgtaagtaaacacagctgaaacatttaagttacccctttgaattttcaacaagaggcattcaatactcagtgacagtggagaatcacaaagcccaaagttgggttgggatctagatatcaaatggtctgcttgtcactcagtagccagttacattctgattgtgttttggccaattactacacgtcatgggcattcattgtctatactgaaatttattacaaattatgttcaaaagtcaaagtaaaaaatcaacctgaacattacatgtatatatayacacacacatatctgtacatatatatgtacagatataaacatatatatgtacagatataatgtgtgtatatatatacatgtgtgtacatgtgtatacataatacatatatgtacagataygtgtatatataaatgtaatgtatataatacatatatgtacagatatatgtatatataaatgtaatgtatataatacatatatgtacagatataatgtatatataatacacatatatgtacagatataatatatataatgtatatataatgtacatatatgtacacatatatgtacatatatgtgtgtttatataatacacatatatgtatatataatacacatgtatgtgtatatataatacacatatatgtatatataatacacatatgtacatatataatacatatataatatgtatatcatataatacatatataatatgtatatcatataatacatatataatatgtatattatataatacatacattatataatacatatataatatgtatattatataatacatacattatataatacatatataatatgtatattatataatacatacattatataatacatatatgtattatatctacatatgtgtatatataatacattatatctacatatgtgtatataatacattatatctgtacatatatgtatatataatacataatatattgaatatatattaaataatatataatatattgaatatgtagctatatccatgaagaataagaaatatctattttgaagctataccagaactaatcatacaataaacagtggatttcaatggccttctcagtgaggggcaagctgttaccactggactggagaagaatggatgatatacatttagatgtgttaaagaacacaaaaaggaagccccagccgggtgcggtggttcatgcctgcaatcccagcactttgggagaccaaggagggtggatcaygtgaggtcaggagttcgagaccagcctgaccaacatggtgaaaccccatctctactaaaaaaaaaataaacaaaaattagccaggcatggtggcgggcacctatagtcccagctacttcggaagctgaggcaggagaatcgcttgaacctgggaggtggagtttgcagtgagctgagagcatgcactgcactcyagcatgagtgacagagcaagactccatctgaaaagagaagaaaaaaggcccggatttttatcacctatggaaataatgttaatgaataacagtgaataacctttcactaaaaatgagttgcaattkgtcgaagttgatttaggaaaaaaatccacttcctggaagtagattgaggcatcaggttgtagaaagtattaaaaccatttatcttttttaaatttaagcatttctaagtttacattaagcagattccctttgactgtctataccccagaccaatagagatactgaagccttcagtgtaagagaaatcacccagtctgctatagattyccagaagagcagcccagaagggagagctaactaaagatttttgacaatcctgagaaatgctattcatcatagcttatgagaagttgtgaaaggatgctctgtttaccctccgcaccaaaaaatgctgagttggtgtatcagaaaaacaaattcagagaaaatattatttctgtgaaagaaatctgcaaaagtctagaactggagaaaatggacaactaaccaaatgtatcctggggaaaaaaaaaaagataacaggaatcaattggagttatttttcctctggatcgtcttatagggccatgaattatttctgatgtcagacgggcctgagattaaatcctgactctgtcatatagtgtgtgacaagccttggtttatttattgaccaattacagacaggactgagcaagatgacaggtattaagacctgattagcacaatgcctgacacaaatgttasttttccttttttagcaagaaaaacttatcaaacacctcggagtgtcccacctcataccaccagctgttcatttattcaacgaatacttactgagcacccactctgttccaggaactgtccgaggtgctagggaaaaaacaatctgcaaaacaggcaacaatcccagtcttcataaggcttacattctggcacttgtaaagagaatgctcatttccattccttcctcccgagcctaaacaartaaacttattcctttttcagtcaaatgcaacacatgacttcacacaatgctggaagcatcaacacgtgaactataatctatctgacaaaccaagtttctttagctgggctcagaaagttcccattagagttttgaggagccaggtgtcagcatcaaaagacaaaattcagcattcggcagtagcaggaaaagtgataaagatccagaaatgaatgggaaaagtccctgaatctctatagcagctccttagaaactgttagctagcactgggctttctgtaaatcctttcaatcctaaaaggaggacacgaggtttcttataaagatgtgcaagctgtaactggaacacatttcaaggtggctttttccaacttaaaattggaaagaaattaacaagatmtatctatgagatgccaaatgtcagtgggaagaatccatagagcactaaagtttatccatggaatcacattcttctaccttcatttattcatcagttcattcagaaagtaactagtatattacaggtgctaggctgcggatataaagatgaatcagaaacagctctggcctttgaatagctcttaacctaaaaaatatgttaagaaaaagtaacgaagaggctggacgcagtggctcatgcctgtaatcccaacactttgggaggccgaggcaggtggatcacctgaggtcaggagtttgagaccagcctggccaacatggagaaaccccatctcttctaaaaatacaaaattagccaggggtggtggtgcatgcctataatcccagctactcaggaggctgaggccggagaatcatttgaacccaggaggtggaggttgcagtgagccgagattgtgccattgcactccagcctgggcaacaagaacaaaactctgtctcaaaaaaaaaaaaaaaaaaaaaaaagtaatgaagatcctgtttgataggcactctaataaggtttgacaaagtgctactagaacccagaggaggaagcctcaaagtcagccattagagtttgatttgataaagatgaaatagccagtgattctaaattcatttttcatacaatatccaatctactcctcacacccaatcaatggatcctatgggtttcacctcctgcccacattttccatgtccaccattgcatcttgtctggactgcagcagcagactaacaactgatgtccctgatttgctgctaccttctgtcccccactgaaaccagaaagatttttcagaaatacaaactggatcttatcacctcttttaaaaatctcatcaacatttcatttcctactgaatccaaatttcacaaggcctacaatgcctcccaattctttttctctctgcgctcaacactctcaatctcccacactgagctccaaacacactaaatgctcttttgctttttggtaactccaggttttcagtcacactgctccaaactcgtacatcaacctcctcccttctcagcctccctctagtttctaattctatctcatgctacggtctcagtgtgaatttcctataccaccccacacttctccatcagacatccagcattcatcatagtcactgtagtcctgatctttcaacccaccccctcttgactggtatctttcctgctaactccaagaattagccctccccttcctaactactcattgacacacaccctgaacaatatgttttaggacttacttatatcttattgaactttattatattcaaatttaactaacacctattgtgtgctggattctgccttaaatcttttcattccccttagttcttatagcaatttatttttattttaattttttattttactttaagttctgggatatatgtacaggtcgtgcaggttggttacataggtatacatatgccatggtggtttgctgcatttatcaacccatcgtctaggttttaagccctgcatgcattaggtatttgtcctaatgstctccctccccttgccccccaccccrctccccarcaggccccagtgtctgttgttcccctccctgtgctcatgtgttctcattgttcaactcccacttatgagtgagaacatgcggtgtttggttttctgttcctgtgttagtttgttgaggatgatggcttccagcttcatccatgtccctgcaaaggacatgctctcattcttttatgtggctgcatagtattccatgggctatatgtgctacattttctttatagcaattctttaaaaagactacttagataagtattagcacactaattttacaaagggaaaatgatgagagatgaagttccctgcttaagttcacaaaacaatgataaagccaggatttctaagccaggtaccccaaatctaaatctaaactttccactaaacctgtgttattcttctctaattgtttacccaggcaagcttcgccaggaagctgagtcacggcaggcagtaacataccagctgcaataacaagagtacaataaaaactgagtgagttcaattctcatttctgtctggatattaggtttcttagagatagttgaaaggtattatttttaaataaccaaaaaagtttaaagcgactacatttctatttccatttaaagctctaaaacttggacttgtccctgaaaagcagggacgtttttcccttctgtttttttcttcttctcttccttctttttgctacataaaaatgctaagcactayaaataacataatttatgcataaygtctttcaaggagatatgctaaagtcctaaaatattattaagtgagccaaaaaaatgtctcagcatgaytttttaaggtraaggtacatcactaaaaaataatgtaaggccatacacataggcttggcttctgggcaccatccagccacaagcagagcaagatagattcacctggaaaaatgccaggtatctgagttatcagagggaagacatgatcaagaatcagatgcagcctgactgcgagagtttggggacagacacaaagcaaggccatgcaagttcattcttatgacctcaacgatgctttatctccttcttacccatcatagccatgtttgaaaattcatcgagacaacaactatttcattgaggatgagatgaaaataagcataaataaaagttctaatttttttttccataacccaatggatccagttttgcacccactgtgataccagcatcctatatgtgtatatactggcccacaaaaaaaaaaatttagacttcttagcacattcaaaatgcttttccccatccaactatcaaccatatctttactctcatctcctaycaaaatcctttgstccagccatgtcaaacttctcactttgagcttttgtatctgctgatccccctactgagaatggccttcctgcatacctcttcttgcagaacatcttattcttaagaactcsgttcaaatgtcacttcctctgggcagcctgtgctgactcctattggcagaatgtattgctctcaccattgtattcctacaacactatttaaatcctaggatagaacaaatcctattgtaattttcttatctgatacaaggctcttttcccccttttaaactgttaagctccttgaggatacgatctatggcttaatcatctttagccaacacaagacccagccacaatagatggtcaattaattttcacttaaagaatgagacaagactctgggcctgaccctttcctttatgcctttcgtagggctgcagtgtacaaccttgcagactttatactgcataattccagcagctgccactcacctagacaactacataaatgatgccccatggagttgtacaacacagaagccccacttttataaagcccacaatgactctacacaaactatggctcaatatacatgttggtagatatatctctatgttcagagtacggatggatggatggatggatggatggatggatggatggatggacagagagatagattagatatttatatacgccatgaagatctaaagacctgtgttctagtgttctagaacaaatactgccaatgactaaaataatattgttggtataataatgcatgataatataattataaataatgttacaatacatagctatgctgctttagcctttgcaaaatgctttcacattcaatatcttatttagcttccacaaccaattggtaaagtaaggcctttattttggccttgttgaaaagtcctgtttagatcatgaaagaaaccaaaacacacaagaattgggtgwctctccaatgttacccggctgctaaatgatagagtcaggatccatcaaaatcttcttgtccctatttcaatgttttttgctttgttctttactacatcactcccctgagagttgtcaggggaaaaaaatggagggaagaaaaatgttagaaaacagaaatatttgaggatagctgaccaccaagaccaactcccaggcagagacaatctgcttagtcctctaagcagttctatcttccatgttcacattactttaatttttactttcttttgctatgttgcttggaatttaatggtttgaagactctcttaattataaagcatcctctttaaagaatacatttacctctggtagtgttagctggatatcaatcatttacaaatgtgtgtaagcttgttccatgaattgctttctttctagcacaaaactcagaactgcagcacaggggaaactgtgaattttgcttggagagaaaggagatgggtcaccttgagacataaggaatattgaggatagaataaatccaaatgagatgatacagtggggggcacagggaagcctggagatgatacaacaggaaagtgaaaagggcatggttaagtagtcaaatcctatctggtctccaagtgagcaagcttcagcacaatcaactgaagctagaactcatttatgggaaaaaggaaataaataaaaagtaaaacgcttataattaatgaggagatttttttcattaaataactggaaaagctggcaagatcaaaaagccactcaccaaaacagatttttctttcctcctgggaacacagctagaygaaatttaccaaccyctcttgcagttagatagagccaccatctgagttctggccagtgaaatgtgaacagccctggcccataaaaacctcccactggtaaccttccattcttttccccttccctggtgaccttgagaggcacatactgcccatgctaggaccacaagaggaaaggagccagggtccctgaatcatggttttgaggggagccacgtgttaagctggaacatccatttgaaaatctatagaaaaccaattttctataaacagctgataaaatgattttttgaaaaaccattatctttttatcaaaatgaagggacagctaccctcttgtcatgtagtgaaggaaaggcattccgtagcaaataaaggcagtgacgttcatatgaaataaagttaacacacagcgtttcaccattacatgaactgagtattagcaaaagtgggcagaagcagcccctgacctacagactctgcactttaaaaagcagcccttgagcaatgctagtaaaatgaacttgacataagaaaacagtgtcagatacagaaaagcactgtcttccttccttccttccttcytttctttctttaagcaaatgtttgtgtgtctataatgtaccatgcactattttaggtgctagagatagtgaataaaataaaattgctgccctcatgcagtttatattccaaagggtcagataataaamctttaaacagaaaaacacacataagaaaacaacacaatttcaaagaataagtgctacaaagaaaatacattaaatcaaattcaaatggtatagggggtaactgatgatagcagcagagctaatttagccagcgtggttaggagagatctttctaaagaagtggcatttgaactacatattgaacaaggcctggaaagcagatttggaaagatctgagtgaagggcctcccaggttgaggaaagaactactgcacaggcctattggagggatgcaaagaattccagtgtgatgggaaaagagtaaacactggagagagtgaaacaagatgaatttggagaagtaggcaggttccagttcacatagggcctgacacaggaccaaatttgggtattattctaagaggcatgggagctatgagacaaatttcaacaggagagtagcataatctgcttacacttaaaaagctcactttaaatatgtttgaagatggactatggtgggcaagagtggatgctactgggatcactagccaaaagataaaggaagcttggtctagggtggtagtggtgaagacagcaagacatgagtgaatttgtgattaattttggaggtaaagctaacaggactttctgatgtagcagatgttggggataaagaaaagagtggaatcaaggatgatgtctatgtcttatgacctgagcaactaagtggatgtacccttacccgaaattgggagaaaagtacctgattctctgttttcaacaccctggaactcaggatatctttgtagtacaatacttcagctacatgaagatcgtggtgctacatagatcatgatgttcacacattttataaaatgcaaaatatttaaatgtaaaaaatgtaaaaaaaaaaagttacctaagtattggaataattagaagcataattaagcaaactagcccatttctcctatacaatctcttaactaagaatttgcagggtcttgtttccacagaagttcattcacacgagtctctgtgtctagtaaatacctatgccctgggcttctatgaactggcctgaaaacctaatcaatgcctacaccacttctgtcacaaagaaataactaaaatttctgcatatatcttgcaaataaatttttgaagcatgaagcgtggtaaaaaataaataaaataaaacaaaacaaaaacaaaacagtgctatttgaagttccatcctgaccattgccccggttagtttgactggggttcattcctaagggcagagcttaggaatttaccccttcttttaaccctaggtgaaataaccaggatttgaatttgaactttatttttctttgtgttatactttcaagaagaaaatcgtgtgtgtgtcggggcagggggcggcagggggtggggaggtgatggttaagaagatttcaagtgggtaggagagcaggaatagatgcactttggctaagtagcctaggaaataacaaagcagaggcagagaaaagccaggcccaggaacaaggctcagctgcatctcctgctgggaggaagatgacatgttagttatccagaacaaagcaaaggctaggaatctctgtgccttggaaaggggaggtggggattgacagatacctgggtactggaagatctctccattagtgaggcaggctaatgagaaaacagaaaagaaagataccccaaggtattcttatctcaagsattctgaatatctggaaataaatgggagcaggarctaagaattaaggttttgctgacaatgaccaatcagaagaggcttttgatctctactatggtttgaatgtttgtcccctccaaaattcatgttgaaatttagtcaccattgtaacaatattaagaagtggaacttttaagaggtgattaggacatgatggctctgccctcatataaaaaggccagttctgccccctcttgcccacttcttgctcttctgccttycacctgtgatgatgaatcaaaagggccctcaccagatgctggcaccttcattttggacttcttagcctccagcaccatgagaaaataaatttccattctttgtaaattacccagcctcaggtgttctgttacagcggcatgaacgaactaaagcaatgctttsctgtctaaagtagakctttaggagactgaagcccacacttgagaagaaactgggctatgtagatcatgatgttcacacattttataaaatgcaaaatatttaaatgtaaaagaagttacctaaatattggataattagaagtgtaattaagtaaactagcccatttcctctacacaatctcttaattaagaatttgyaggatcttgtttctatagaagtgcatttacattagtctccatgtctagtaagtatctacccacttaggtattctgtgggctgcgttctgtttgaactctgatctctctaccactttcccagcctcttaccattctaagggtcagacccttcaccaccacctctagtcatatgaaagaagttataaatcaccttgctaatcagctgctctgtttcagacatgtcagttttgttacatgaaattactaaattcataccaattcaggtcatttttttccaaaatatttccttgaatacaattccacttgtgtttttccaaggaaggaatgagttcacctatacattattasgcttagtgccccactgctaacaatatgcacctggaagaattgatgaaccctagtccttccatctaaatgtattctcccctgctacctgccaatttggtctctttctctttctcaaagtattggtctcaatgagcacacactcctgcaaattccaagaaagatcctcataaacattaatgatttaagtaaataataatggtaataataactgtgatctattcaatatttagtgaataccagacaatttgctaaatttctgacatgcactgtttcattatcatcttaattgggaaatccatttaccatgttgaatttggcatgacaaaacattgctttataacttgtggtctgtaaaaaatctgttgcttggcagcagtgccagagcaaactcctgatgactcaacaatttgtaccttggtaactctcaatgcttgctctattaaaaactgctttcagttgttagctctgaattttggtatccttctgaacccacaagagttggatccattaattcagggagacatatcgtaggcttacgctattacgcacaaggtagcataactccccacccccaaatcctaccaatgtcagtggcatacaagattatttctcactcatgccacatacccatcacctgtcagttgtcacacggttccatgtcatcttcattctgggatgtcagctaaaggagaagccctgacctggaacattgccagtttttgtttcagagagaaaagagaacgatgtggaattctgcraaagctccttgaggttctactctgaaactacatgtcacgtccactcacatttcattagccaaaactgatgtcrgcaaaatcgggagggcaaccaacattttgaacactagcacagtattggaacagtgtgggtagtggaagaagagggagcatttaagtcaggcagaaagctctagagtagaaatgagttgaggatcatctttttacttcatttctctgaatcctcttgtctgtactcataaaatggagttaatgtggccaatgccgcaactttctcaaagattcattgtaacgttcaaaaagtgtaacatatataaaaggagtttgaaaaatttaaaacactctgcaagtaaaaggtattatcatttaatgttaattgtagtgctttccacacctgacagatggcatgatgtgtatgatattacattgttctttatgcttctaagtaactttttatcacagaaagaaaaagtttatgagactctayctaggtagactccaaattcaagaaytaagatcatgagtagggcccctattgctatactttcctcagacactactcctaatgcatcagaaactacttaagaccaacctgttgaaaatgtcattaaaaaaggaaaaagcctcagccgacaagattcctaaaacattaaaatccaactagagcagttttcaaaatggagaatgctcctcctggagtcagaaaaggcaaaatgaaacagcctcctgtgaattgtatcatagctgacaaaaggtcttattatcttctattgattggccaggagttcagctatcttctctacggcagtttctacgacaatctctacagagcaggagccaatatgccacctctctgcttctaccttaggaagttaagaaaattgaaagcctttggtgcttccttttccactgagagcctgaacaggcttttcaagatggcctggacaatgtgtgtaatattttgttttaatttgcaagccagtcttgttcactgtggtttttatcgtatgagtcattttcatcccatttactcagagtaaaaataacttgcttcaagcagctcataagtatttacttctttctaggctgtggagagacaacgaatgaagcctcagagagtctctgttcctaggagggcatttggccatctgtaagcttgtctacccgatcacttcaaagggcaattcttaggagagagctggggaaatggcctgcatgaccatttatctcatttaattcatctaaatgtaatcataaaagaatggttgctaaaaccctattttattgaatagggttaaaaccctattttgttgtaaccagcaaagctcttttggtttcaggaagacaaacctctcctccagctccagggaataaacacaattagcccaaagcagtgatggccatctcattctcctttctcaaacatcggtctagaagtgtgtgtgtggtgaggatagaagtggtgtaacctgggtctgaaaaataacacaggggaagtcttctgcatgtggttatggtggtaataggggtagagttggggaatgactttctacgaaggactttctttgagcataaaatgacagaacctcacacagacaaggtttttaagccctgccccttcctctcttccttgcttaggatgctgctgtgagggtaccattcttagagctatggaagtcatcatgcaatcacggaaacataggcccaaagatcaaagttcaaatgctgaagatggcagaaggaatgcgagaaaggcatctgctctaaatgttggcattcactctactgggttctctgtgcctcccagccggatgcccagtatttgacccctgctttaacccatgagctatgttcctacatgctaggaggggtccaatgtttagccatttctccttaggtgctatccttctctccaagaacacatcccctggagcttatggaaagtctccatacaacaaggaaatgactgaagcccagtcacattgccattacccaaccgcaatagcaccacaatgcatactggcctaaggccaggctcatacactgagctaaacaggagcatgcccaagaaaacagtgattcagacctaaaatccactcagcattataaaataaggcctcatagagaaagatcaggttgatactgcagatggctcctcatggagccagtcttttgtaataaaaaatgacatcaatgagaaatgaatcaaagaatcccaaacagcattagcaccagcagttttgtctcatattctgctggktctcaatagagaagtggggtcaggaatggtggctatgctgatttcaacaaacaactaaaaggtctgccagtggcgtaatcaggattcacattgtttttgaggtttcttctatcatttttataattgttcgacgtctatccctgcatataggaaaaggtaagaaggtaaatattttagaccattatgtggcttacaggatttttccatggtaaatagtgggaatactcacatttttaattcttaaaattacttaaattttctgatagaaaatagcataagggaagatctaaacataaatattaatatgaagtattgaaattgatactcccatcaccccaaattaacaaataactaagatgtattaaagggcagatgaaaaggttcataagcaaagggacagtttcattctcccaagtgacatgtctccttaaaacttcaaatccataaaacaagccaaaaaaacagtgaaaaataagaagacaaaattattatatattattagaatatattgttaataaaaattatggtagtaacaaagaaagtcttccagaagaaatgaaaaaaacagagggttcctacaaggtactggtctctagtagtaataagatatatcctcttgataactagaggtctttagtcaaagccaaaaagttaagcagggattaayaatatatagtcattcctgggtatatgcagggaattggttctaggcccctgtgtatacccaaatctacacacactcaaatcccaaagtaggctctgcagaatccactctataggaaaagatggctctcccatataggcaggttttgcatcccatgaattctgtatttttgacttgtgtctkgttgaaaaaaaatccatgtataagtcagcatgcaaagtttaaacccgtgttgttcgagggtcaactatgagatagagaatagaaagaatttaccattactatcatcagttaatactgtctttacctttagaatacctgacctatctgagagccagaccacttagaggaaagtgaccaggaatttgcagcattcattgaagacaactacccaaatcatcatggtgcaaggtattattaatgaagacagcargaataaktggaatcagaacaaacagaaaaatagcccagccatcactttgcttattaaagcttttgcaaactgatggaagggagccatgagcacgttggaaatggatgggctcagatattatggtactatacatacagaccaggtcgaactaactcccactcctctggcatgttaaggtaatagakatrtgcaatgctcaccactagcaggttgcagtactaagcctgaaaaaacggtgctctcttaagacggaggagttgctttctctagagcagaaatgtgggtcattgatgcttgaggccaccatcccactgtaatggcatcagcccatgtgccaaagttatgagtccctccattactgtgacttttagtagagattgggaattggcaatgcatgaaccagtcacgaagaaacccactaaaaagaataaaaacctgatcttgtcaggtcaaggagacagcagcctagtatgagttaatgtcaaagtatcatttgaaaacagaaaccaccctgtacatttaattaaatatgaagatggcaatctcatcaaataagaaaacagaatatgatgtgtctatggttgatctagtgattgttatgtgcacagcagcagaacatgggatttgatatgtccctgttgcctttgcttctttgccgtgcttcataacgaccttcaaaggtcttgctttctcatgctactgagcagcatggataaaccaggagaacagagaaccctcagcaattgatatgatttcttataggattgcataggaccacagccaagtgatagttttcactctttaaccacatctaccaggcatacacttctcagtcaacctctcacaagtgacttyattaaatagcttacttaccttcacagtaggcagagtctccctggacagagatgtaaccactcttgcactcacaagtagcttttgtattccagtttttgcactctgagttttcaccacatttaggtccttctgcacaaaagttatgacctagaaaaaacaaataaaaacgtacatcagaaaaggaggaaataaagtaactccccaaaataaagtatgtaacattttttattrtatgtcactatgcaggaaaatacactttggcagtatgcacggataaactggataggaaagtggcagaatagatataggaaactttgggctgtccaaggcgtaagaggctttcccccacccatactcaaatttgctgaggctgttcctacctgaatgcttttatccatgctgatcctgcatcctcttctcactacattcttacatgactactctttttataattttgttttcttgtaaaatttataatacaaagagtaataaaattaatatatatgaatatataaaataaaatgaatacaaccagattatcaaaactccttaattgtacctccccaatgaatctccctcccagccactagagataactatcctcaattttgagctaatcactcccttgcagctttttatagctttacttcatatttgtgtttatgcctaaacaatataccatttagctttgcccattttaaactccatatgagggaaatcttactgtatatatcttctatggtatgcttttttaaaaaatatttcatatccataggttttggggaacaggtggtgtcttgttacataagttctttagcggtgatttgtgagattttggtgcacatatcacccaagtagtatactctgcatccaatttgtagtcttttatctttcaaccccaggcacctttccccctaaattcctaaagtctatgatgtcattcttatgcctttgcatcctcatagcctaactcccacttatgaatgtgaacatatgagggttggttttctattcctgggttacttcactgagagtaatagtctccaatctcacccagcttgctgtgaatgccactaattcattcctttttattgctgagtagtattccatcatctatatcacagtttctttatccactctgattgatgggcatttgggttggttccatgtytttgcaattgtgaattgtgctgctatcaacatgcacgtgcaagtgtctttttcgtataatgagttcttttcctctaggtagatacccagtagtgggaatgctggatcaaattctacttttagttctacttttagttctttcaggaatctccacactgttttccatggtggtcgtgctagtttacattcccaccagcagtgaagaagtgctccctgttcaccacatccacgccaacatccattttatttttagtatactatggtgtgcttttctctattcatccatgtgaatgcctttagctatgggttcattcattcaacaaaggatttagaatattatataaacttagctgacaaagcaggaggatcagcaccaattttgaaagacattccagtgagtaaaatgccatcggactgtacttttaaacacaytgggaaacmaaaataatttgtgtgactcatttattgcaatattcgcttaatggccatagtctggaaccgaacccacaatatctccagggtatgcctatacyatggatggacatttgagctatttgcgggttttcactgagaaacaaagctgctaaaaaaccttcttaaacatgcttcctggggcatattctctagccacatgttcaacattttcttagcttaacagtctttcttgttccctgctacttcttccaagaaatttttcttcctaatatagcctttagaagttccttcagtatcttttgatagtgactgtgctcaatttcaatttgtctaaatgtgtctttagactatcttcatacttaaaaaatagttttactgggtatacggttattttatctcaacattttaaaaatgtcattccatgttttctggcttctattattgctgctgagtcacttattaatctaatagtcattcctttayatgtggcaacccctttctctgtggatgcttttaagatcttttttatttgtgtgttagsttgggttttgttgttattttgagacagagtctcactctgttgcccaggttggagtgcggtggcacaatcgttgctctttgcagcytcrgcctcatgggctaaagtgatcctcccacctcggcaactgagtagctgggactagaggtgcgtgccaccaggcccagctrattttttttttggagagatgaagtctcactatgttgcccaggcttgtctcaaactcctaggctcaagcgatttccccacctcggcctcccaaagtcctgagattacaggcatgagccaccacacccagccttgttggggtttgtttgttttgtatttttcagttttaatctaagataygtaggtataaatgtatttttatttaggatttggggagattcttgaatctgaaagatgatgaaatctttcatcattttggaaaattcttagatattctctcttcaaacattccctttccacgtttttctctattttgtctttgtggaattccaattagataaatgttctttcttctcaagctctcatctgtgttatttagacttgctttcatatcttctgtttcttttcctttatggtgaattctgcatcattttgagatgtatctttcagtttattaattctgtcttgaggtgtgttatattctctttcagtcacccacatcatttttaatttcacttactgtatttttatttttagaatcctatttgattctttttcagtctgcttagtcaaatttgatagtctcttattctttcatttttttaaatttcctttttaaaaaatgtctttaaacatgttacatataaatattttatattgataattctaatatcttcaggctttgcacatctaattttgccatttgttgtttatgctgaatagcatgcatgatagcttattctcttgtgttttgagttattcttttatctgtaagctcgtattttttggaatttaatgtgtgagatttgaggttttggtttttaaactgcatttcttcagagaggatttgtgtttccttctgtcaggggtctgagggaactatcaacccaagatgactttcaactacatttttgtcttagtgcttgaaggttgagccacacaggtggaataaagtctagccctaagcttttaggaatgcaagattttctcctctagacctccatctagagtcaagactgacaggcaagtctcyttgggcagagtggatttttcctagttcacccatggagggattcaccctttaaggttcttgatttatgtttctcatactagccccaggatgtctcctgtctgcttacacagtgtccactagaagccatattttaaaccaccagagactcgaaattgcactcagggcaaaygtcaactccactgtacttgcttatttcaatggaatcaccctctttctatattctggtctccagttgttytttttctcccccttactgccatctccaccaaatgttccagaaagttgtttctatattaggcagcattttagatgaactagaaggaataggtaacatctaccataaaatttgagaagttcaaatatgataaagtatataaagatgctttatcatctttaaatcagtacttttagtaaacaataattatgctatatcacatactgtgttctcacagaaaacaatggatctagaagtcaggagatcgaatttataatttaggatctgcagctaacaaacagtataaatcactttgcttttctaggtatgcatatggcgaacggatgagattagtaattttttttttttttttttgagatggagtctcgctctgttgcccaggctggagtgcagtggcgtgatctcagctcactgcaagctctgcctcccgggttcatgccattctcctgcctcagcttcccaagtagccgggactacgggcgcccgccaccatgcccggctaattttttgtatttttagtagagacggggtttcaccgtgatagccaggacagtctcaatctcctgacctcgtgatctacccgcctcggcctcccaaagtgctgggattagaggcgtgagccaccgcacccagcctgaaattagtaatttttaaactgtgttcctcagggccctaggcacagatgagttgttatacagggttcaagtcctctgcctctgattcaaatagaataatcttttatatttttgacatattgaccatggttgttttgttttgttttgagacgaagtctcactctgtcacccaagctggagtgcagtggcgtgatctcagctcactgcaaaccccacctcccgggttcaagcgattctcctgcctcagcctccagagtagctgggactacaggcgtgtaccaccatgccgggctaatttttgtatttttagtagagatggggtttcactatgttggccaggctggtctctaactcctgacctcatgatccagccacctcagcctcccaaagtgctgggattataagcatgagccatcgtgcctggcccatactgatcatgttaattacagttcctggcttaaaaatatggaaatcactccactagataaagtcaagttaattcctttcagtgataacattctagaattatttttgaaataaaattttaaaccaacaatatttggagaatttattytgaaagataataatattgttattaaataataatgataagtttcatgcacttataatatgcctggcatgctaggtgttttaaatgggaataataatatataccttttaatatgttgttgagaaacttaaatgggctaatccatgtaaggcacttgaaacagttccttatacctgttaaagaggtcagtcaatggtggccactaataatgatgatgatattttcaacaatcrtgactaaagttcaaaataacttaatgctgttatcctcaacttcaagataaaaagtacaaattcacaaatctctaggtagttagtggaaatgccagggttctaaataatgtctggctaactccaaagcccatgtgcttctcactatgtcatatatcctctcagatagcaaaacctggttatgaaaagtgaaagaggtagccactccttgggacattagagagtagatgcataggcctagatgagttacatccagcctcactacttatgacctgttaactggtgattgcctcagtcaaaaatcagagcaagagtctaactggctggaaatctgaaacctctgacagttgacaacacttctataagggcttgagaggcttacaataatcattaaaactagcagtgcttgatgttttttcctaccaaaggggtacttttaggcatcacgtgtctctcttccagaggaggagcctggacttcacttcccatgtctgaattgatcaataattagattaaatggtcacattttccttcattaggaagcttgactcaacggcacatgtgcatcctttatcacacrtattccttgtctgtgtttcttttctctttctttccagtagactttaactgtccttttctttccacatgcatctgacagcctggaacaaagcccttcaaacagtgttgattttccaatgcatatgtttctattaagcatgtaccatgtcaaatcatgatgcccggagttgagtaaattgtatttcaaggacagtgaagggccggtgagacaaactsaccttcaggtcaaatccactttgattatgcctaaccattcttctcaaaaatgtgttttttaaattaatggaggcctttattcaagcaatattcattccatgcccacttacctttctgcacaagtgagtgaatagtcattcactcaatatttatggggcctctactctgtgggctgcagcaccacataattatctggagacacttcaaaaatgtttaagatattctctgcccgcagggaaattataatccctaaggggcaataaaccacctatggcctcaatcaaggcaatctttgttaagtcagatgtgagcaggaaaaaatgtcatagtgtttcagagaaggataaatcatttcaagataacaaaaaactgtaataggtagaaacttgataggagcaggacacagatcctagtgggagaaatggaatgacaaccaaagaggaagaagaaagaacaaggagtaagtttggagaaccccaaataatctgctacagatgtaataacagcaataattaacatttattgaacacatactatgtgctaggcacttggctaagtgttttacatacattatcccataaaattacatacattatcccataaaattgttataagagtttataacaattatatgaagctgaattattatccccattttacagatgtggcaactgaagttagaggaaggcagtgaacttgtggaaggtacacagagccatagtccgactgaggctggaattcttaatcactgtcctcttccactgtcctcctaagaacagcaaattttaagcacctagcacatgtgcaggcattataccagacaataggaatacagcaaaaaataccataaacatgtccgcattcatcctacattctagcaggggtgactgtctttgagcattgggttacaaggggatatcatgatggagaggggcaaggtgctctaggaatgtatgcagagaagaaacctaacacaatgttttaaagaagagatttgaaggatgaatgaggttggctggacaaagaataagagttccaaatgcttacagcagcatgggcccgtgatatgtacaaagaaattaatgaaagaaaatgtaaatgttggggtcacactttctcctctggttggaagcagcctaaaatttggatgcagtggtggtcctgtatcgagctctgttgccatgaatgaccagtaacactagtaaaatgatttactttcattaaattcattagcctaatctgcatataataagctctgcctattacactgaggcccccccacactgccactctccaaatcccactttatgttgtttatagttatcaaggaatcatcactgattctgcttaatctcttgcttttgcagccaatgatagacatacatcgttatgattcactcccgtaacttcttccacagcaaggaatacatgggtcactaatagttcctcaatctcctgcccctaaagtataccccagcaggtcaggcaggttacctttgaaattatatacctggacaatctcaaagtgcactccagagtcctctattctaaaatcttagaacgtcaatacctctcatattcactactgcttacccaaccttgaaattcacgtaaggagcaatggtatagtgagggcagcatattccatgtgcctcagatgtacagtcaggtccacccatggactggttaagaaggatatggccaaagggtcttttatgagaactggatgcctttatgtactccacaatcaatacacataacamaggagaagcctgggctcttgaaagtgagaataatccttaagcttttgtggacagaaggtagggccatcaggacaggcctaatagagactgaactcccgactctcacaggttctagcttagaaagcaattggtttcttccacagtagtcaacatttaagggtcttcccttaaggtctgaggcagcctagccttagtgtcaggttttctctctgggaaaatgtgcctccttttggaagcttcatagaccttgatccactgtagcacgtttaggaccatgaattcatttactcactaagactatcctctgttcccagccccaacagttgagcatatagccctgtctttccagtccactttagcccacagttgatggcattttgatcagatctcatctatcaatatgcagaggaactggtccatctgtgaactgccagttcctctatttaggcactagtttacactctcattaagtgcctttttctcaggtctcttttcttctcaaattccctgaaatcctttctctaaaaccatttcaattataaattcacccaaaacaatgaggaagactgggtgggaggaaaatcatttgatgccaagactcttagggagggtttaattgaaggacataaaatctttaacagtacaaataatctcaactaatttccgtccaggccagatgacaaggcaagtgagcckgaattaaaattacagataaacgcatttggaacagatgtcggaaagaactttttcccaacactagaagtcataaacatgcagcaaaatcctccaacgtcattggcaacattaaagatacaattagagctgattaccaggggaataaaaccctgaggagtatgtcaagaattccgggatgggtcaaatgatgggtctgttttcctggagtggtcctgagaatacatggtcaatattgttgacatttttttttttttcatcctttaactgagagcaccagaaattcacgagcagtctttttctgctgggtctatattgatgcttttattacttcttcccaggcaggagcccagatgttattccagtgcacactccccttctccacctaatggcctcacacttcaagtggtcaggctcctgctacatccattacctcaaggtaaagaggagggtaaatgaatttcatgttgccagcacaaactgtcctgaggtatcagagaaaagctgcagtggtgattaaggatgttctgggtggtgctgttgtgtgactgagaccatgagtcccacaaactacaaagtggcctctcccygccagtatccatcaccttgattccctttgcgtgtttcttccctaccaattctatagttcttctcctatgggtgtcccagctgctccaacagccctgtggattaaaccccctgtttacttggttatattcatttttccctaaaagacaagggaattagttacagcatttgacatgacacaaaatttgaagaggcaaggtatctgagcccctagcttggagaccagtttgttgatacagtgaacaccataagtcagtcagaacctgttcttactaactttaaagtcttaggtttaattcaaacaaagaaaaaaaatcaaatgtaaagatgtagcctgtatcttccatcttgattagtcaataattgtggggtgggggacagtaaccatatgagaaaatttggtaagactaagttaaaaaaaaattaacttcataatcaagctagcaagctataacttgaggaaataagttataactcagaaaaatgggttttaaccttatttcatatgtaaaatatataaagcctatcagctagtgctgaaaataatgtcattcattcattaacatgacaatgacagtgagcaaaatccactctctggaagttttctcaaattcccagtctaggcctccccaggtaaggtgactcatcagagtcctaaagaaaataaaccttggaaaacttcaaattctccaggcaggcatgagaaaggttttgacttagacttctgaggaatgataccgtcatagggtaatttctctcagactaatgaccggatggtcacagtaagagagagatgataaatatgctaattgaaaggccttcggtgcaggtgttgaaaggccacagccactttggtttttgtaatcaacaacatcagggtggcagaagcagtacagctatagcataccacagtgctcatttcctaaaatacacacttcagctcatctcagtcccacctctctgcttccttgctgccaaccagtctgtggacaatcagtccacaaagcaaacgatgctgctgcctttccatatgcaggatacaaattactttacatagaaattgagtgtttctcgacttttcattactttctgtttcagagaaggggagaaggggaggaggcaagaagaaccaaataatttgctttagaagtccactgggcttttcaggtcttgtcagaatagtaattgtccaacccccttctcctgtgagtccactcagaaatgcagaggaaaaggcaaaaataagaagaaaagtatttctcacaaaattgtgagagatgattatgttacttttaaagacggaattaagagatgtggagcaaaattcatggggggcttagttcaagatgacagacttttgaactcatctgtattgctctttgttaattgtcatttaaattgcagggtttcatgaaaaagagacatctcactaaatatgcctttcatttcctgattgcctgatgggaagagcaggccctagcatgtggacaagtgggctggatgttctgggattctctctgctgtgggtcagcaagaaggaagaaggttatgatagtagatgtttctgaaaagggcctcagtgaacaatgctgcctcctttacttcagagtctgactctgagatgggagtaatatagaagaaatccaaatggttaattcacctacctcccgggaaaacaccctcccaccacctcttttctgaagacatgctctagttcctgtccaaatgtagagcagtcaaagagcataaaataactttctcacacacacatacctccaaagaaaactattagcttccaagtaaaagagctggctgtttcctggctgagaaggaactggtatgaaaaagaaagcccttgatttcatagacgggccctgcctaagatcaaatctatgaagtcttcctcctgcctcccactcttccctcaaagttgagtcaggtttggtaaatgccactgcttgctagcaacgggaaccttgtatgtctgcttcttgtcaatgagatgtcacatctctcagcatcttcattggtaatggacacattccagacaagtgctaacagaagcagtggcacctgttctattgtaaattgggtcagggcaatgaaatccctcctgaatttctgtggcctaattaatgattctgctctaatgaaaccataaatcagaaaggatttacataaactgagtctcacttggcaccccaacaaatagcaagtgatgaattttgcattaaattataagacctacctaaccattctatctaaccaataaatgcatcactctgaaaattccactcaatctttaggtatttccaaaacataccagctgcagataatatagccatgaaagcagataaatcaaggaagatattctgatgtcatagttagcctatcactaattctaggggccatttctggctatcaacacactaaattttcctaagaattttaccaaagcccagagctctcatgaccaaacacaraaagcctaagctgaaaacatgcaatggtgaaacatacaacattttcatacaccagaaggtgctaagggaggggtcaacagttacaggctgccacctgtttttgtaaataaagtttcattggaacatggtcacacccatttatatacctatgatctatgttgctttcttgctaactttcttctgttagttgtaacagaaacctcttgtcggcaaagtcaaaaatatttattttgtaaccctttataaagaatttttgccacccctctgctacagaaaagataggaaaaaaaaagcaaaatatgaggttacctgagctaaattgctatgctgcagggacctccttaactctggaagcttcaaagctcagattaaaaggatatcacttactgggtatttgagaatctgaagtatttatggtagatatagttttaaaataatacctatgagtttaactgttttttttttttttttttttttaagattttgaacaaatcctaggatctcctaattcatctaattctgcttgggtgagaagctgcagagaggaagtgatacttgagctgggttttaagacataggaatcaatttaagaggccgtgaagggaaagggggagggaatatgaagagaatttggttaatgggtacaaaaatacagttagataaaaggaatttattggatagtacagtaaggtaattatacttaacaataaactattgtctttttcaaaatagatagaagaattgtaatgttcccaacacaaagatcaattttgaggtgatggatatctcaattaccctgatttgattacacattgtatacatgtatcaaaagatcacatgtacacccaaaatatgcacaactattatataacaattgaaaaataaaaataggctgggcatggtggctcatgcctgtactcccaacaccttgggaggccaagacaggagaattgcttgaggccaagagttcaaggacaacctgggcaacatagcaagacccagtctctaaaaaaaaaataaataaataaaaattagttgggtgtgatggtgtatgcctgtgaagtcccagctacttgggaggcttaggcaggaggattgcttgggcccaggagttcaaggttacagtgagctatgatcrtaccactgctctccagcctgagtgacagagcgagactctaactctaaactaataataataataaataaaaatttaaataaagaataaattttgggatgaaggcaattccaggaagatgaagcaaaaccatttctgcccaataattaattagcaaccaagtgttatttatctgatgcatttttccttgcagggagtaaaaatgttgcataacaatctaacctatgagtaaggattcaccatacatcattctctaccagagtatgggaactggcccaacaagacggagctgaaaagaatgcttcccaatctcactcatgagaaaaatgtaataatgatgataatggttattattataagaactaacattagcattattataggaactatcatttattgaacatttgtcacatgctaggcatgatggtaggtgcttatgcattatcccatttaatcttcacagcagtcttacaaagtagatactattattatcctcattttataattgaggagactatgactgagagaggtaaataggatatgcaactttttaaggagcagcgcacagagttttggacccatgttattatcatactattcattaaaatctcatgccccagaagaccagccccagcctcaccccacgcatggcccaccaccaagcccacttacctctacagacacggcagcactgattctcaggaagaatgtgatccttttctgagcagttcaaaggaggacacatttctgtaatttttactaaaactccaccctggaagccaaatattagggaaagaaaaasatgttcacatttttagtcaatggaacaaacttataatgttctttgttaatagcctgcagtgataacaacatacaataattaatactcccagggattccactaaaaacgataatgccacaaattaaattaatgagacccctggaatataaggtaaatttccctttctatatcctaaaagyctcaaattcaacagttttgaagtatcttctatggagcagaaggattctaacagcaatgcactgataaaagtctaacaatcgactcttggtccggtggggcctaatttataacatttcctaatttctatgatgtaaatactccagtgatggctgattttgagctactaacatggtatcactgaaagcaatgttcagaagttatgtataattgagcttatgtgagctctggcatgcccctggataacaggctttgtgaacccagtgatagacagcawatcttccttgctcttaatgaattctcagtttggatggagggaggaataaagcctcataaactagaaaccacaaaacatacagcacagcataagcctaaaaatgggctctaataaaagtattataatgtgtcatagaataataattaactctgctcaggtggggagaaattatgaagacaccagctttgagggaacttgattagtggaataaaggaagaagggactttcctggcaaagagctgaaaagagccaaggcatgtaggcaggaatgaactgaaagaggatcagttagctgagcattagattttccctagatataaaatcacttacaataacgtgtgtaatattcagaaggtgaatctttatgaccttacttcatccaaggtctttttggttgacattactagcatctgtatttagtatgatgccaatttgtaaaaattattccattaattactatttttttaaaaatgctgagagttccttattttatctaaaacatttactttttctctcccatttttaaggggatgcttaagtcaaccaggaagcaagctcaagaagaggcatctcatttaaggccaaaaggtagttcccaacacaggtggaagaataggatgaaggtgtatagtcaagaagggtgcaggagagactgagttttccgtcttcatgagaccgtcatcccagtggttccacatttctctggtttggcaagaactcccactatatcaggaatacccattcttaaattggaacagtaacataattgtatatgtcaaatataaatttccaactgctcatcttttggattatttgcaccatggcttcctctcctttctcagaatttccagtccagacaggccagcctctggcattcttagtcttgtcttttcttctccttttatctttattcccaatctttcccaaggtaactcttaactttctcctgactatcttacaattgtccctaagacctgagaatcgatcctgctactcactctgccccactttgcaactgcacttcatttttaatcctcaatccagaccatgatgggtggtatctaacctcaaaaattagctccagtcctaaggcaagtgtccctacctgatgtgccttactttctacaacagggaatcaaaccagttattaccaatcaatggaagttagtaaccttactatcagcagctaaatgtagaggaaatcacaatgctgaattacttaccattattgcctctaagtctatccttcaatattaatatatttattcatgatctgctgcctcctggcataaataagagtggctgacactgttgaatccttttgtcagctctatgtgcgcacctctaggtttatcaatgctttgctgcaactggctcacctctgtcactctcagagcactgcccttgggcaatggagccattttgcccatgcagagagccggaagttacatgcaagttctacaactcccatgcgtatgacccaaagccagtgaatgaatggtatgggatattctttacctcgaagagagacaatctctagggtaaaatgtatgctccagagcccatggtgggattacggtatgtttgacctttcatctaaaattgtacctcttctcagtttcttccccttctccatctggcatcccccacaccctcactggtttctcctgggggcactaccttaataaatcacttgtactgaaatccttagctcagggttcgcttctgggagaacccaaactaagacaattaaaataaatttcactcttgctgtcaaaaatcaaactgttaaaagattatctctaggtggtgagattcgggagtgattcccattttcttccttacattttcccctctatattccaaattgtataagtatatatttttgtaaaaacaaaatattaaaaatgctacagaagattttttaaaaataatcattcacaaatcttctatttttataaaaagggtttgcttcactgattaaatcagtcaccagttctaatcaacctttaacatatttaatgagtaagatcataatcccaaatatttaaatggagacaaacctttttgcatgaatttgaaaaataatatgaactgtgattaccattgcataagtgccaccaaatccatttaatccagctacataattaggcacaaacctttyatagctttattttcaaacctatctctagtaagaagtacctgataattaacattttaagtctttctgattatagtatgttattttatgacccctggagttctgcgctggtggaaaaatacaattccttttttctttctcatttagagtggctttctccatgtcattggtcaaatacatacactttcaagttctgtactaaccattgtgcactaacctgaatttctaacaacatataaaacttacaacttcaagtaaaaaattgttgctaggataaagaaattctgcagaaaagcaataattgggcaaaattaataagactgctaggagagtttattcatgttgatttttttwwaaaaattatgttaattcctggaaacacttggtgaaaatatttgaaacaagagtttgttttttgactaattggtgttgctgaagctttaaaatgatcccaggaaaatgaaaatgggtggatctccaggcatccttttgtcaactgaatgacagaatatcaaaaattattttagcaattatttccttagtcctcccaaggataatacttcataataccattttagatgcctaagaggaagtttaatttattgcatacaacagattccatagggcattagtgcttacatcttgagaaaagctgcctgggagaaataagaggccctttgatcctatacccattaccctcactctctgctgacaatatccattaactatgtcccaaagctcttccatggccttttataaatgctacctttatcaagggaatcaatgggccatagcctgaccaatctgatattctcagatagactgaaaaatgatcaawcaatccttctcaatctacccctctaaaattcagaattgagaattatttccaagtcagtctaacaataacaggagtggcagtagacaggctaagagaggagactgtggggccaaaccacacaggttctgatcccagctggctcactcactacctatgtggccttgttcttctgtgcctcgattttcacatctgggtattaccttctgcacagaattattatgaggtttcagtgagataaatatggttttttgttttgttgggttttttttttgaaatggggtcttgtactgtcactaggctggagtgcagtggcgcaatctcagctcactgccacctccgcctcctgggttcaagcgattcccctgcctcagcctcccaagtagctgggattacaggcatgtgccaccatgcccggctaattttttgtattttagtagagacagggttttaccatgttggccaagatggtctcaatctcctgacctcgtgatccacccacctcagcctcccaaagtgctgacccgcatgcccggccgagataaatatgttttagatgctttaaattgtgcctggaagataataagtgctcaagaaatattaaaaattattgtcaataactctttcttgtatacaaagtaattagtaaataactatagaaagacaataaatggaaaaataacttttttgcacagaataaaattattcacatgcactcacacatgcacacacacactacctgtgcaagagaataatctgtctgccccaacttctttctaaattattaaaaaaaaaaaaaacagtaaaagatgaacccaagtgtgtagagcaactgcaatgtgccagtaatagtagtaagtgatatttaaataagctggcattcaaatccatgcccatatcttctaaaggtctcaaatggtgtctgcctggctcctctttgataatagacattgaatcataatagtgacccttgctagagtcacccacagcttccattcaaaatggaaaaggatttgctaattttaagtgttatggctgattctgggaccatcaccacagtgagcaaaattgcctttaatcatcccagctttccctgaagtcaaagacaaaagcaacaattttagaatccaactgttttcccttcctagaagtaaaacaatgttcagagagaatggtatctgtcttaaattcaagaaggacatgtatggtcatatggaataacaaaaatagctcacatttattgaggatggtctttgtggtaagcactctactaagttctccatgtgttttatctcatttaatctacacaacatccttgtgtgataatgtgccagctataggttattgaccaccccacctgctcccctactcccctactcccctactcccaaccctgggagcctccttgtcagtcaagagatcattaaagcccttgttgtcacaccatccttgcccctgccacagagtggagagcccctacacccagtacccactgatgcagagagaccaccacacctgcatgcccaccagaccacctggactcatggaatctctggcattcccagcagcagccaagagggcaagaatgggaatcaaaatagggaggttcaaggaagctaacctttagggtacagtctggccaatgagagacagaatatagggaatgtctttccttcccagctctccataaagaacaaaattcaagctcttcttgtattagtatctccttgagtgcttctgcaaagtctctaaatgcctcattcttttcaatctttaaaacacattcctgtcttttttccaagaggtgtgwtgaaaagaaaatgaaacaatrtaagtaagagcacttgcgaggayggtcttttctgagacacagtgatttctgtcaccttctcaggagatgcctcacaaagccagctgtgctttgttgtggggttctgacttttctgtgatgcaccatcttgtacttgctctcctgcctttccttccatacttccttctgtctgtgcctcactcttgcattcctaggactatacccttccccttcctctatccacgcccatgaccaccaaagaataaataaataaagcatcaacacaaatacctaggcctcgcgttctattttctagaaatcaggatcagataggtaagaagtgttgctattctgactagtgtgtcccagctaatgttaggcagaaaaggaataggtttgacagttcggcacaaggcactaggcaaaatgttccacattcctccagggctggtgattatgcctataattgtcttccgttatgttgcagtgggaatggtgaggagaaaaaaaaatatcatgtaggaggaagtaataatctcaagttatgttctccaacccagctcttactggaacccaatgggggaaaagaacgcaaggaactctgaacttcactaacagctaggtaaaatttcaggatttaaacccagatccacctgactgcagattttgacctttcaaccacaatgctatattgtaagagtaattagactcaccctcttatcctccagagggaagaagtaaagccactggacagaagttacaggggggtagattttcacccaattaaaggaattctctgattcctaatgttttccagccatggaaatccactaacctattagtttagtaacttcccattatgatatgttggaggtgggttttgttttgttttgttttacttttttttgagatggcgtctcactctgtcgcccaggctgtagtgcagtggcacaatctcagctcactgcaacctccgcctcccgggttcaagcaattctcctgcctctgcctcccgagtagctgggattacaggcatgcaccatcatgcccagctaatttttgtatttttgggagagacagagtttcaccatgttgtccagactggtcttgaactcctgacctcagatgatctgcccacctcagcctctcaaaagtgctgggattacaggcataagccaccacgcctggctggaggtgggtatttttaagtagaaaattatatcacaaagtcttattatgacagctggtctccaaagatgcctgtctacctaatgaatcatgcctcctggtattcatgcccttgtattgtctgcctctacaataaatctggcctgggcctctatagcctttagaatgcagaatgatgttcccgtttcggagaccagtttataagaaatactggcgctttcaccttggtctttggaaagcttattctgggagaagctggccagcatgtgagaaatccctgagaccaccatggtacaaagaagcccaaggggccaggtgcagtggctcacacctgtaatcccaccactttgggaggccgaggcaggtggatcatgagattaggagttcaagaccagcctggccaacaacccgtctctactaaaaatacaaaaattagctgggtgtggtggcgcagctcttaattccagctactcaggaggctaaggcagaagaattgcttgaacctgggaggcagaggttgcagtgagccgagattgtgctactgcactccagcctgggagacagagcgagacccggtctaaaaaaaaaaagaagcccaaggtagccatgtctaggggttgcagagaacaaggcacactcacacacatacagagagagagagagagggacggagggagggaggaagggagggagagagagagcgagcacaccagacagagacacagagagaagtctctttctattcatctttgttgaggtgctagacagaaaagtaaagaagccatctttgatagccagccatgtcaagccttcataggattctagctgcagcagccaccagattgcaattgcatgtgcgaacccaagtgagaatcattaagctgagcccattcaacccatgcaaccatgagaaataatcataaaatacagaaataatcctaaaatactaagttttagagagtttgtgtagatagccaaagtacaatcaaactcaacatgcctaaacctggccccatttgctcttcactccctcctcacccacaaaacatgttcctcctcgtgaatgttcctcttcctgcaccagtatctcatcatcacctaatgaagagagcatttatcacattttggcttcttctgatccagtctcccttcccatgagtaccacagtgttctcttggggaattttttctccattgcatgctgtcttaatggggtgataagtccaggtaactggctccttacacagaggataaaggggtcgaattcttccctatcctgaacaatcagagcttggacatatgatccaaactttgctaatcatatrtcctttctccaaactttaaatcttgtataagtgactccaggacagtagaaatgattgaaagtcactcatcacagsagcaatgtgcttgccgggatccccgctactaggtcattgctatggtttctgcttcctaacttctgggactctttggtctctatctagyatcaagcctggtmtggccttctgaggattctgtgagtcccccartatcatttcaataacattgtcatttttacctacgttagccaggggaggttttggctacttgggaaaacagaaactggtattccctgcaactctaccaggaacctggacatcatctgggtttctcctctccatcatattagccttccccaaacccaatcactcgagtcctttcaattccattttttaaatagctcttgaatctcttttcctgtacatcttcactatcactgccttcaatcataaccttaggtcatttcttacaattattcaaattaatctggtgctcctccaatcactcctcccattgcaatcacagtgacctttggaaatgcacagctgctcgtgacatacacacgtgcatgcacacacacacacacacacacacagagagagagagagagagagagagagagagagacagagagagaagagagagcttcaatgaattctcatctccattaagatcaagtccaaactaggtccattgtcacctgttctgtctaactgtccaggttcatctctcatcactctcccacatgagctctagaacttcacccaagtcaaattatttgcaggtccctaagtaaaacctgctccctttattgctttaggcatttataagtgcaattccttctgtttggaacgtgccttctccctcatctacctaggaagcaattattggttaagtaatcactcacccaaatacctgcatggctggctcccacaccttacccaaaatgtaattttggaacaaaattacatctcagagagatcttctcagtccacccatccccaactcagacctctctattccttcagcctacttcatacttttatagaatttggcattatattatacgtttgtttaattcttactgtctctctccctcactagactgcaagttctataaagacagtgactttgttttgttcactgttgtatatccagaacctactataatgctgtcatacagcatttgcttaatgcatttttgtcgaatgattattgaatgagatctatgatcttatacatcttatttcaagtaatgcatgggaggggcaggcaggaggaaraggcatttttaacagtatatcagccctctgggagtagagttagtattatcataactagcattacagactgattcccctaataccaactcaaaaccctttcgcagggccacccaccagcctccctaactaataayagctgttagttctttctcctctcacatccttgccttaatagcttcttccaaggctacctgatccacagctgaccacaagctaaccacataaatggcctggctggatcctcgccatcatgtaatccaacccaycgcagagagttccacccctcggggccctatccaggccaatatgccccactsaagaacctcatctaaakcccacacatctatctattcattttccagaagtgatrgggaccataaaattaacacttactcggcattcccgacagctcttggttaaaatccgctggccttctgcaagaacttttcctccatagatacattttgctgtaataaaacataaaaatgggtcagacagtcctgctgtgccacaaaatgacctcagaggtaccttctaactccaatagattccacagaaacctagattctctgcttctgagcaatacaaatctctttgtctaaagtgaaaggaawtgtgtggaggataacccttaaatctcccargcagacctcatcatgattgtgtttgcctggcctttacagccaggatatacaattatttcaatgttacagttgccaaaggaactagagaatgaactgatgtagtaagaagctaaaacaagaaagaactggtggcaatcgctgtggagtacagttagcagtagctttgattcagacactccagctaaaatgaactgggtgaaaggggactcacatatattccattcctcagaacctcagccacaatggagaaggacaccatttcttcttccttgtgatcatgggagtgggcgtgagaaatacacatgtgagacaagtgagaaatacaaggaaagcctgtaaagtgctagatcaatgcactagagagaatgcctttggaaaggtgagttcaaaaggctgccaggaagggcagcgggggtgaacttgtagaaaatttcaaagagaaacataaacggagctcctaccactcaatttagattgcactgaaactcatttcttgacttaactggctgactcacttttaagcaagtacagcatatgtcaatttgatatgatcctaatataacaccaccaaattctccatccacttcaacaggaaaaaaagaagcaagtatctggtcactccctctcctgccctgatgaggacccttctagccccagctctaggaggaacagaagcaataatacgcactctaagagatctcacccactaattcggtgttggtcttatagaaccacctcacctttcagagcctctatatctgtatctgctaaaaatgggctgattaaatctggtggtttactagttataaaaycctctgattctcacgggatgctcagttattcttcattcaaataatattctagtgttactaaagggcaggcaacatgctaactggtaatatagtgttgcaagaaccaaagctttcttctcatggagcttacaatcagggaaatagacagtaattacataataacatcagtgaatgtataattactaagtgaggcaagtgctgtgtttgcagataaagaacctagacccccttcgatgttgaggggcaagatctgaaaggcaaagaggatgaccaggtgagaaatggggctttcattcctcccttccaataaaacaaacagtagtcatctagtccattttagccacaggaagaagaaagtccagggacatgcctaagttaacgtcataccctgtagtggatgctgtggtacatggagatccacttccatgagcaaaggatacattcttacaactgctgtgacagttggcaactaacggctctcccctgaatggagatctaagacttgtatagggctgtagagagccaccttgcccaaggtgaagttctcttgatgggtgaacatggtacacagtcctggccccctttctccaactgaggacaactccgaagggccattccagctccaaagctccctgtaggaatgagttcggcatttgctgtaaccactgcagcttaacttctccttctgcccaattcttcttccttcaccacctcattcctatcccagaattgatcctgagagcacttcctaataaagtacatgtaaatctctatgtcaaagtctgtttcccctcagaacctgacctgcagcaacctcactccccacccaaatatgttccactcctgtattctcctctcagtgaatggcaatggcatgggtatccatcccagctcccacaccctagtgcctggcaaccttctaacctctccctcttacacaactccatgtccaatcagtgtccaaatcctatcaatgtccccttcttaagtttctcaagtcaacctcctcctctccattcctcaccctctgcccccagacactgtctttgttcaggctgtcgtcatccctcttcttcagtaccaccacaacttcctagctctctcatgttctagtctcaatcttcaccagtccttccccataaaacagtcagacacatattttttaagtgcaaacatgaggccctgcttgaaatcagggtccctaaagctctcagaataaagtccaaaatccttagttcagcaaacaaggccattcatgaggcttcttatctcccaaggttcacagcccaccatttcccgtgatttcattcaccctacaaaacatccacacctccacatatgttctagccatgctttatctctcacttccgggccttacatataccgttctctttctcagaaacacgtgcagagcaccccatccaccttccactggcagcctcccaccctatacacccatgagcttccgcttagggctgacttccctcagaacttgttcttaccctttaacactggttaatcgtcctcacttttttattctattgtactttgaacctaatcccaacagaatatatatcacatgacatcctaatttcccatttaattgtacaccccaccatgtccctgctgctaattgcaacccccatgagggtagggaaaatgtctataattttatctccagcccaaagccccatgccttaggatttattgagagtaataataattttccaattaatgagcctctagtaggtggcaaaaaacagtcaaatttcttgatccacagataagagttatttctggcattcaatacaacttcaaacattagaagtagagaccaaaaaaatggagaattaatataattgtctggataggtcctttcctcccttcagtaaacaaaaatctatccctgatgatcttttatgcctcaattttgtagataaatcagttgaccatgactcgttggtcctaatgagagctagatttcccagtgtacttgcatggagagaccacacctccaaggtctggaattcctgtctaataaattcccacactcccaaatgtgcctgctgccaacttggcaaggcagcttgttccaaagtgacagttctgctaagtgcactgttgtcaaatctgccatctgcttcttggcccaagctgtgaagcgaagaaatagacattttttcttcctttgccccttgccactcccacaatggtattaacacatttgatcacctgccttaaggcacttgtccaaatcctctcttcccctttgacaggctcatcccaaaactcctaatctggagataaaaatgcctcattgtttacattcacaccacacatggagacacatccacccctcgaatccaccagtctcttataaaaattaaatgtccactgaactttatgtmctcacatagcagggtgctttggtgctggtgaatgagatcaacatattactgcacgcctcaaccatctgcaatttggcactagtgcagaatgtatgtatctatgaaattatcttaggatgactttcaggatcaccactggaggtcacaagaatttctcctgctttctcatactcatcctcacttctctgacaacagccctccttccctgccactgcattcctatgcctaatatcagcccttattatccaacctcttgatctatagccaaaaggcttattttttatgtctgaggaaattcaagcataaggtgagtcaggctctggtgcgtttggctggggcatttgggactccattcgaacatctttcagggtgattagaaatgtaaatggatacctaaagctcttcatatcacactggtgacatgcaaactagaatatttcacagtgcccaaacacaaaattgaaacctagcaccaacacacacttctccattatgtcagaaacaaaatgtactgaggatataaagagttatgcagctgtatctttttgcaccgacagacacctggcccttcaattttgaccttgatttttctggtgcaatgattggacaattttgccatttgggtgcacactgaataaacaattgacaagtacagcttgacatccctgtcagatgtggatacaaggtttccctatctttatttaggtatttgtaccctgcacacactccagccatcccttggtactcagcrgcctagaatgtcaaaatcagcacactgttttacactttaaaggagagtggcagatcagagagactgaacacccaaagatccttcctccctcagtgagctaattcacagccttggcttcagataccacctctatgagcaagacacccacatcaaactagttgtacctcaggcatctctaactcaaacatgtcaaacggaatgtattgctccccatactgctttctccacctgtcttatttctgttaatcacaccgtgagtctcccacaggctcttgttcaaaacctggcaatttctcccttacagacgctctgtccctgatccatttgtctcatgcaaaacaatacctgtggagtatctctaatgtgccagctcctttggctgtcacccacatccttcccttcctttgcatcttcccaggctgtgcctgcctgccagcctcaacacctccacctggaatatgcccaagtcccatatcccccaccacctccagctctcttgatgcagtagcctttctaaaagcacatctttgattatgccacaactctgcattaaaaccttgattgcagtaccaaaaccaacactggtttatttccatgattttgtgtatgcaattccctctggcagttatgttcttacctactttgtacacttggaaaactcctcttcatttgtcaataccccgctcagctgttacctatgacgttttcctaacacacacatacatatgtacatttcagatggagttaatcactcccttctctgtgtgacttctgtgtcttccatagtgttcatgtgaaataatattctttattgtaacagagatctctctggagaacaatggttagagccaacaggtcaagagcatcccactgggttctgaagccagactgccagggctttattttggctcccccaaaactgggagaccttggacaagttacttctcctctctgtttcacctcctcatgtgtaaaatggggataatagcggaccctaccacttaaagttgttggaagaattaaatgaatacatataaaatggttaaacacagtgcctgtcagagtaaatgatccatacgtgtccactgttgcccccagaactgacaaagtgtttggcagaaggacctcggtagggattactgaatggcttcattgggatacaatcttcatcatccatccgcaactcacgtttgcagctctatttcaacctctcacctacataaatcctgtgttatcatcaaacacactattcccctttccctctttcactcttattccttcacacatactgttttgcatagaagaaatatttttttctccatcttcctccctccttcctatctctggtagatctcaaatctgtctaccaaaataatacagatttcaggatgttgatgcctggagattgtgattatgtaggtctaggtggagccctggaaacctccaagtttaagaagttcaccaaaggattttaatgtgcaaataggtatattaaatatgccttgaatagtgcagacacccaacaagtgtttgaggaatgaaactccctcactattttcggtaccrccatggatgcttagataaatttcttccctatttccaaacagacgccctcatctgtaagtgctgcagttcccaaggccaagagaagtccgtgaacactcagtgagtgagcagacaacacaatctgcttttacatattggctcattttgcctttgtcatagccctacctttacctggtgtccctagaatactaccccacctaaagtcagagagaagcttgggaatttttctttaaattcacatataagaaatttacttcaggcagctccacaaaaaaaatgaaaaaaaatcaaaataaggaaccaaaccaaggaaaaacatggtattcaggaaacagtagtttcacttatatccctcacaacattaaatgtgaatggattaaatgatccaatccaaacaatacaatccagactgtcagactggattaaaaaacaagatttgactataagttattcatacaagatacaattttttctttgtctttttttatattttattattattttttaactgacaaaaggtatgcatatttacggtctacagcatgatattttgaaatacgtaggcactgtggtatggctaagaactaactaacatatgcattacctcacatacttatatttaaaagggacaaccaaagtaaatatactctaccatgtttctgatgtgaagacattggaaacatctagaaattccactgattagtgttagaactctgctctagcaatcctcattctcttcttctccaccccactgcttaacccacaaaagtcaacttctagaaggttcaaaatatttaacttggctccatgtcctccgggaagcatcccaggccttcccccggtattctccccctccctcccaggccattcttctgtactccaacacatgcctaatgttagtgcacttacagttccagacactgtaaaccacgtctctaccttgaaagtgagctcctctaaagcagggaaggatccctcatcattattccaggcatcagtactcagtaatcacctaatgcatatttctattaaaaactagtgagaaatgaaagccctccagcccagaagttctcaaccttttaattaccagaggtgccttgtatcatttctttttaagtttgtctagaatagtgttttaataatttatttgtattcccactttattaaactctgaacacatcaaactaccaatcagagctgtgagaaaattagtgctacctaactaaattgctatgaattccatgcaaagggaaaaaaaaaaaaaaaactgatgttttagttagtgtgtgtatcaacattttaataaaattgagttattttctgaaataattttaaaaacctaaaactatcaaacaaattagcacaaagaaaaatgaccgtyccacacacgtctagtgagagggcaatttaactgtatgtatccagggccttgaaaatgttcatctttggcccagtaattctggcctgaaraattctattttcaggaaatataaaatacaaaaatatacaaaaatgtgttttctatacaaaacatgttatttaagcgtgctttataatagtgaaaagtgggaaacaatctagatatcaatgacttgggactggttaaaaaaaagttatgcaacagccaaacaatgggaaacaatgaagctcatgaaaatgacatttatgcagaagtttttaaaacataataatatatttaagtgacaatggcaagttaacagactagaataaaaaattgcccacacaatacaacctcaactgcacacaaaatgtaatttttcttaaaaaaaggacacatccactaaaatttcaagagtgtttctaagtggagctattatgggtgaactttccatcttgatctttatgattctctgtgttttcaaaatgttaagccaaaagcacagtgcttttataattttaaaaaaacgtcaaaaagttaagacacaaacctgccgaaggactcattacttccatgtccaaacaacaactttcaagagatggcattcagagatctatgcaggaactctaaataatagactaaaacatctcacattttttaatacatccctaatagcctttttttttttttcttttctttttttgagacagactcactctgttgcccaggctggagtgcagtggcgcgatctcagctcactgcaacctctgcctcccgggttcaagcaattctcctgcctcagcctccagaatagctggaattacaggtgcccaccaccacacccagctaatttttgtatttttagtagagacgggatttcgccatgttggccaggctggtctcaaactcctgacctcaggtgatccgacggcctcggcctcccaaagtgctgggattagaagcgtgagccactgtgcttggcccctaatagtttttcaacttcttctgctgaagaatgtcaagaataaaaacaaataatctgtacctactaacaactctctccatcatgggatcaaactataattcaatatccagacacttgagctgcctatattgccagacatgacttccaaaagttcttgaaacagaaataagaaagttcttctctttagagcaactccaagtacatcccccagagcaatgggtgcagtgtgccaaccataaaaaaaaaaaaaaggaagattacaaagttcctttttgaaaagttcaacaattatttgggctgctgcaacccactttcactgctattcccactttcagtgtcataataggtgacatgctgttcctggcagaatgatagaccactgtgctttgaaggctactgacattggtgtgtttcttttggtaaataaatgaccttgaaaattatccatagcacacatttctgaccagaactctccttttctgtagaggaccatatggactgataaaaaggctatgggctttgtagtcaacagaactagttttctgtctcacctctgccactcaccagcctcatgattttcgtaagctaatatccctaagcctcagcttcctgtaaaatagggataataataatacctccctaaagagttgctgtgagaattcactaagctagtagatttaaagcatccagcacagtatatggaacataccacatgttctaaacgacagcttcagtattttaactgaatttcatccggaagttcctaacaaaggcctcttaataagaggagaatctagccaaaacctcagaaagccaaaatacagaatttggcctttaacttgatcatttagaatgaggggactaaagcctatggagctttggagttgtaaattcacagatcagcctcacccacttgttggacaagtgacttaatccctgtgaacacacgttccttccacatagaatgaaagaagaatagtaattacaggtgatgtgaggatttaaaaaaaaaaatagcccatgttaagtgtctgccacattgcaagtgattaaaatattgtggctcttcttaccatatatttaatgttacatcaactgccaatgtttcatttcatcaatgtcaatcagttgagtccagaaaaacagggaaaataaataaataaatctcaaaacacagacagccagtctgaccctcagtcagtacttacgtcggcagaccttacagcactggccagcaatgtgcactgggagggagtctggggagcaattgagagggggacargacatccttcggcattccacggcaccactctgaggaaggaaggacatggaacataatctcagaagtatcctttgatagctcctgttgtggagatcattgaaatctcatcccagaaacctcatcagggaaacagaagcagtattcgaattcccagtccactccaggaccacagatgaagtgttttctccrgcccgaatgacctgtaccacctcaattacttttctgaaatacatcactggtttcatcctacctgcccatgtgtgctaactagattatgcagaaaacaaaaagtctatttttataagaacataaataacacatttgcagactctgtcaatcatttctgaggctctaacaatctgttttgtattttcctagacaaacaatggcattcttcagatatttatcaagtaatttcaactggacagggtttccatactaatttttggagggggatgttgtaattcactgaaacagatgaagggatatacaaataatggatatcctcacactgacagtgagtcagggaggaaatgccttgcaattatttgaaacaggtgatggatacactttgyaaaagacaataaaaacatgtagaaaataattaaactccccttttaaagttattctggttgtgaataaggataaccattaggttgtttgaaaatcaaaggagtcccttctttccactatatcccaaccttcaaactccaaacattgcctattaaatcaaattagggtgtgttggcaagggaaagcagattttaatttccaagtattcatataagacatgacactcttccagcattgcttcacaattgctcgtatggctagtgrgtgctaggtaaaaacctaacaattctcagagttaatattatttattaaagaaccaggttacactctaattatcaaacctctccycttaaaactgtttttactgtatttatttacaaagaggcttactttgcaagtgcagttcctgcaatggtcaccatctayccaagagtcttgatctcgatagagcagtccactcacttgacaagtcttstcacaatgacagttttccaattgactaagtcttgtctctgcataatttagctgcaaacaagagttactgaatgtaatttctgtaattcaattgcatcatcctaacaaagctaatagcaacaagaaaaaaaatccttctgagaagagaaaaaaatgctcagagcagttcactgattcttagcattatctgttttttgttttttttattttttttacacaaggtggaatcactctaaattgaagaaatattggctgtcatggtctaatgaataccaaatgagacattaaactgtaactcaggaacctcatgggtgttcataaatgtgtgtgctttccattcaagcccacacaaaaacactcataatgaatgtgttctcaaggactcattatgatgtttacaggcgatctaatcaggaactccgaggcacttacatttatctcccactatcctctctatgttcttcacacactaactagaatgtcgtggtttacaaactaggaagtcactgccttctgtctgatgaaaaattctggagagctggggtcagaaaaaaagaaaagtcgtaagcggatcccccaaacagaatgccccaggaattcacttttgtgcttagaagaaggacaggaaaagtaaccaaaaccccaggtaagatcagaattttgtaaaataaccttttttatttttctaggccacccagtcattgccaataatcacagagtcttagactctcctgctggaaagggattataaagcttgaatatcctcacaagaaacctcaagtgattatctagcctttgtacatctccagtggaggaacatgtattatcttccaaggaaagccacttttctcagttagctctcttgtttgaaacatttttcatggttttggctgtgaaatctttctttttttcctgccatacctaggttttcattgtaatccatcctgagcaaacctaatcttcaagcatttgaggttatcctgtcgtcttgaccacacttggcaccaccaggttcccttaacagctcctcatgatatgattccaagcctctcttctgatcacttttcatacagcctactccagtttaccttcaaaaatatggtgcaaaaaaaccctaaatacagcactttgatatgatctgtctactgtcacatccacacgaaagagtaactcaacctagtagtgatattactcttcctttcctttcccttacatagagaccaccatgattgaaaaacaagtatcgtttcctagaaaattatctgagtttctcttttccttctcaatcatgtttatcctttcatgtcttaagtactttccccatacaggagatcaattcaacctttgatctaactaagattattttgagccactattttagacataatagataaacctagggaatgacttccaccatctttctacattaactatggttccatttcatacaccttcctctgacttactcataccagaactactctctggaaatggaatccacatgtaattctaacctttgtttttgtcatttatttcatcctcttcctccaagcttttggaatttctcaagaaaatttaccccttgtctgccttttgtgggtggtagcaaagggtagaaaaaacaaaaaataggatcttagaccaaccaccatgcaccatgagcagcccctaaagaactaagagttgacgctgcctgaaatattagcttcctatcactccttctaatatgcatgatcttctaaaaatccatgtttcatttaaaactccagcctaggtcaagtgcagtgactcacacctataatcccagcactttgggaggccaagacgagcagatgacccaaggtcaggagtttgagaccarcccagccaacatggcgaaaccctgtctccactacaaatacaaaaaaaaaaaaaaaaagccgggtgtggtagcgggtaccaccagctactctggaggctgagacatgagaatctcttgaacctgggaggcagaggttgcagcaggccaagatcatgccagtgcactccagcctgggcaacagagcgatactccatctcaataaataaataaattaatacaacaaaactccagcctaatcatagagtttatagaatctatgataattaagttatttggcaatgctttaggaaacggataaaatacactgctgagtttggtgatactcttggacactgagggatgatggcatatggtttggccacttgcagatacsaaaatctgaaaatcttcaagtcctttatataaaatagtatagtttgcatataacgtatgcacatcctcctatacactttaagtcatctctagataacttataataagtaatacaatgtctaaacatcaattcattcacatggattcaatgcagtactcggtacatggaaaattcaagttttactctctgtaactttttggaatttttttctgagtattgttggtccatggttggttgaatccacagatgtggaacctcaatagaaagaaagtaacaacttatcacttatctttacttcrtttccatagccccagtagttcctacacaaggcagtaacagatatatgaccttggattgaacaacagagttgaaccagatctgcattcctcctaaaagggtctcagaattgtgtacctttgtgagaggacccatacgtgccttactctgaaaatctggaacaattctggtgtctatatcactccaagaagggaacttcttaaggactaaatggcccaaaaggcaactctatatctatctgagctttcttaaaatccaggagcttgcctaagggaaatagtggcaatttctagcactgtcccacaaagctgagctgtgctcacctacaaaactcaattccaaagaaaatgtcagttttaatataatgaatgctattctcaaggctgattttgtttcccttctgaatgtggtttttatttttaatatttgtagccttttctgacaacattgagaagtcctattgtctgtaataataagagcacaccaaatagacacaaaggcaaagggatgttaaggcaaaaagctaatttttcaaagaacttcatgtaacctcttgccttcccttttactcctgctaaatcctaaaacggcaataaaggagacaaacaactgtgaatcaaaaaatgaattgcattttctgtcactggtattagcatgctgaatttatacacattcattttcaaaagctatttctatactacctgacactttctctaagattgtctgcagattcgaaatagatacggtatcacatctacatctctattctgtctacctcttgtttatgcatttatctaagcaaccatggaccaaatcatttattctgaactctacataatgaaagatagacagcagaggccttttttatcatcagaggtcaatgaacagatctaagtacattagttgtgtggtggattgcttcttttctttgaaataccatttacttggcatttgctatatgaaaggaaaaaagaagcttctattgttaaacatttaagcttaatcaaaaaatcattattgaattcctcaaaacaatgaaagtctcaaaattaaagatgtcacaagcttaaatgccactccaagtgtcgcttgatttgcatacatagatttgtcaaatatttaaacagaagtaatcaagaaagtcccagtcttcagtatctcttctttctgagattgaagtcagaatgggattacagtgcagttgggatctgatagcaggacagagtctgaccctatcacaatgttcccagcaggtaggtagttcccacaatgtcaaaaccacctgagagaaccttgagagtaagccaggggagtggctgatgcttgtagatcactaagggaaatgtaggaggacaaaaaaggtttattacttgaggtagcagccccatctcttctctgccttaaaaaaagtatagttttgccaaaatgccagaattcctcaagagagctcttatctaccctgacctctgtcacctgaatgtgagtgcaggctgctcccatgatcaagcaagggcacagtcacttgccagcatgcctaaccmtaaaaggagaaaaggatcaatgagctctcctacacagacccctgggctgatctggtatctacatctgtttggttctgactttgactaccaattcctctctagcttatacacggagcttcttctctggaagggctccagggtttccacctcgacccaagaggaaggacttcctgctgttttccaggactcctagactagggtcttgacagcaatgcacaggctctaccagactttgtgatttcaagtcactggggaagatgtgcattttcttaaggaccattttctctaaggaaccatcatcccaccatggttgtctatattttctaggtttaagagtataaacagcagcagccaccacctattgaatgacatttgtgtgccgtgcaacaaacctcatttgcctgggctcacggaatctttacaagagcaggaataattgtcaccattttacatatggggaaacagatgctgaaacaagtcgaataacttactcaaagctataaatatccaaggaaattataaaatagtgactcagaatcatatcagcctgactttaaagcccattctctatctccactatgacctatatgactgtctacccatcttaatcggaactgctggacaactcaaatcaaaactccaaaaattacctccagccctattaactgaattctgccacaatcggcctatttaattaaaaataaagactgggcccagataaatttagtgccatagaattctttttgcatctgcgaaccatattcaacttcaagtttgcctgacatttccagactccatctccttccacctgccaaaaaagtgagttacattttcgcctccaccaagacggcagactacatamcctgaaggacttcaccaactgaaccaactaaactgctgtattcaatatataaataaaaacttttgaaaattgtcacagagctaatacaaaaggaagaaacaaagtcacagaggccaaaacaaagtgactgcagggatcccaggaaataagtgagcaccaaagacaacaacatcctgaagatttttgatgcaatgtagagcccctgagcttccaccctgatggttgcacagggtatagggggacagagttggggaaaagtatcttcccaagatgggtaccttaaagcaaacccctatataaagatttggcctaacatgagataccctcagtgttagagtgaacaaaaagaaggaggcttgctcaaggcacagaaagaaaactttcatgttcagaccttggcaccagctagaaggaaaaaaaaatcttccttgaaaatccttaaagaatyctttcctgagacttcacctggcctttcctaggtgtagcagtctgattctgagcaatmtggtttgaaaatacttaagtaaataatgtcaaataattttcactatttccaaggaaaacaagcagctcatagccaaaagcgtgcattaagagacactgttcttaaaaaaaaaaaaaaaaaaacacacaataaaaaagagaccttgctcttgccataaccttcttctttgaaaagttactacaagttctatgttcacacatttcattccaaacaggtatgatctgaaaactttagttcagctcaataaaatgatcaaacattcatttctcttttcctttcttttttatttgctctttcttggtaatatctccatcctcctgccastggatggtgagggttagaaagagtaatattactccctatttatagcttttatctctcttcttaaccctttcttgtcaaaccatgaactttctcagccatgattcaactttcaggatctaactacctgagtttaggtcccagctctgccatctactctcttaggaaaagttatcagaccttcctggacctcagtcatctcatctgtaaagcagactaatgaattaaagcaagctcaaaggattgtggtaaagattaaagtgacaggggatataaaagcttaagcattttaactaatacatagtaaatgcttgtattactgacttttccatttcttttagatcaatggttgacaaactaaggccagtggaccaaatctggccctctacttacttttgtatgtcctataagctaagaatggttcttatagttttcaatagttataatttaaattattatacttaaatgaactaagtctacacataatatccttgattttgcctcttggcttgcaaggcccaaaatttactagctggtcctttacagaaaaagtttgccaatgcttattctagatgatcatagatttcaaattacacagcaaagatggaagtactcagttttcaaattgtaattctayatactgtttggaaggaacagacctaaaaatctgccaaagtgccaaagggaggtttagaagatggattaaaaaatttgctgtttgcaactgcccacaattaaatacctacctcacaaaggcccattttacacaataaygttttgagaakagagctctctgtggctcctagatgatgtgtggctaaaaagagaaaaatracattctctgcaatgggaaagaatgagaaagcaaacgacgccctcgaagctggagaatgaagaaccacaatcacctgagacagagtggcatgtttcttgttccaaaactttggtagcatgctaaaatataattaacagtattgagatcaagctgctccagacaatatgaaataaaagcctctctataacacaagctgggaaggtaaataatcacctgcgtttcacattcccactatactctgaagcgaaaagctaatgcttcagatctgggcctcagtctcaattgttttcttacaaaagttttccatctctcctttccagacaaaaaggggtttgccttagccaaaaacccagtttgaaatagaaacattgtcttcagcagcacaatccatgggtccaaactatagccttatcttgcaaacacttatctacccaccaatttttttgcacatgccatggctgatggtagggagcagtcttagctgcaggtacaataggattaatgtatcattttcattgttattaaaattcttctttttgcagagtataatgtctcttaggcccaacctaattctttcttcgccctaggctggaactcatgtccacaactgattggtatcataacaacagcattagccatattttctatattttcagtgtctttttcaacaaggctcagggcttttcattatgaatatacactttatgaatatatattaaagcccttagttgtttacacatttggctccgccactcagtatgaacatatctagggtagaaagcgtgtctttttcactattgcctctttgtgcctaacacagtgcccagcaaacggcaggtcctcaaaagatgcttgttaagtggatgatggaatggagaggaggaaaaggtgcggaattataaaaccgaaggtgttgaaaggcaaactttgcctcctttgctatttaactcaggaccagccttgaaataaattatacattaaaaatgtaatataatgccttcttttgacagtaatctgttcctaacaatagctattttgccccttccgattactggcaattattcttacatccaaaatgcattagcttataagagcagtggctctgaccatagatcatcttacagtgttactactttaatagccaataggaaaattccttttccactcccatggaatctacagtgatacatattgcctcttgcttccaagcatttttcaagtaaacattatgatacagcttaatagcatcaaagacaggaatggttatgtttactattggtagtcctattttgagtaagaataaaacatttttgtagtaacatatagcagatgccgaggctaaaaatgtttccattataacatatcactccaaattccagataggacagaaaaagaaatgaaacatcacaaatgaaatttagatacctacttttgcagtcatcttggccaaaagctcttgtaaatccattattccttgcacsaggcttaagaaatcactgcaggttgggcaagctcaataaagaaaatataaaacrtatatatttatattgtgctaatataagaaataaaattttaaaacagtagatacgtgactatgtagaagagtttttggggtttttttggttgacattgctttgaaatttgagtgaaatcacagaggatttcaggtctggatcttttcctactttaataagcaaaaagaaaggaacaggaaaaaggyattgttaactaaaaagaaaggcaacatgacattttaaagttaaaattaaactctcatttttatagggaggtaacttaaaaaatgtgaagtatcatagaagaagaaaaagtaaactctcatccaggtcaagaatcttaaggaatagtttttaaaaatatatattaaacatatctttctatatccacctatagaatctgctaatgtaaccctcttcttttcaaattttagttcaataaatgatatgggttggctgcatccccactcaaatctcatcttgaattgtagctcccataattcccacatgtgggagggacccagttggaaataattgaatcatgaaggcagttactcccatactattcttatggtagtgaataagtctcacaagatctgatggttttataaggggtttcacctttcacttggctctcattctctttggctgccaccatgtaagatgtgactttgctcctgttttgccttccactatgattgcgaggcctccccatccatgtggaactgtgagtcaattaaacctctttcctttataaattacccagtctagggtatgtctttatcagcagtgagaaaacggattaatacaataaatgatacatatttttttaaagacacagaattatataatgtagataataagttctctttcactatctccagcacctcagaagtcaacactgtaaacaatttgggtctatctttccagatgtgtttctctgatacaatcaacaagttatataatatatcacaatgctttaagttgctacttactgtgatttagatttggacactgtgttatatatccattcggcataamgatgatcttcccatcttggatgatccccttgataatagaagagacaggtggcaatcaagattacagtcaccagctcaaatgtcccctatgcaatcacatrctcttggcaggtcagattatttttcaacaaaattgattcattcaaagggtgagctggccttagtatatactgaactactctaaagcatcctactttaggaatctcaaattgtacatttatgtggagaaagctccaattagttaccactagttaatgccaattatagattataacaccaaagacacatcagtaaaaagcactgattcaataaaaattctccttaatgccctaatcatcctggaatattaaatattgctgatttacaggatttttttaaagtgggaagaaatataatagaaacatattacgctaaaatttttctactgattcatttagcgaaggaaataaaattagacattgggaaaattccataacaatccttgctcttcaactaattgagtaacatgagtctttgttgatgagtcttaagagtaaaaggtggtcttttaattctgtaattcagtctggaagaatagctcaaatttaagaaagtcatcagggctgtcatctctcaatgaaaatattgacttgacttttgaatttttcaagttgaatttcaagattctgttgttagggttttttctgatttgatggcagagatattacagaacagatggaagatgtagaagctggttcagaatactgagcttattctataaataaaatatagacttaagagagtgctgcaagtctttcagagggagtaacatttaacatatatgtgcttatcttctaaacagcagaaggcaatcagcaaatgcagtttttggcttattatttcaagaaaaaaatattaattggaaatattaatagaaataacaggatcacagcacctcttccacagaattatatgtttattaacctcttcctcttcaaggatgatgcagtgtttgcgattatgagagaagacagcctccccatggggaagaagtttctgccactgctcctcaatattaattcataatctcttgcagaggaataccagggagcaattaatggagcacaatctaaatgaattaacttctctctgggatgagattactcagtctttcaaagcaaattaactctttgagaggctatcacaccttcaagcacatgtggcaatttgagacaagcatggattagaagtcagggaacctggtttcaagttctggatctgtctccagctaactgcacagacttaggcaataagttagccaccttctatgagccccagttgcttcatctggaaaagaagtgctagatgaaaaacctaamgatccacccagcactcatgttctaggtcaatgaaacaggcctccaaactgaaattgtcacattttagacatctatgctttcattacttttcaaataataataataataataaaagaatgtaaacagacaaaactatagatttccatcttatggatttcctggaacatggaaaaattcagcgctaaaacagaggctcctaggcaaaccaggacagctggttaccccaggcgatgcagaattggtggaagtatatgtacagaaaaggataggatccatacctgttcatcagaagaccctagattatttttatttttatcatccatggaaaagggtacccagaatcctggagcacatgtgtcatggtgttaaatacctttccaaaaccaaactgaaaactcattttaaaataataccccatcccgctaatcctaaagcaagaaaatacagcacacagcagttttccttttccttttcaagtgatcttactcattttagtgacattatgatttacaaatcacctgctctcacacctttcctctatgkgcatctctccttacttccctgtctttccacttttaatctgtggtacctgcgtgtgtatgttacatagatcattaggtgaaggtcaatgatgttgacttgaacaaaaaacagaaataaaagctgacagcttcccaatgctcattaacacaaaaacccaaagcacttggtattttttataaggaaaggtcatagaggtgagcccacatactggcatgaaaatgtgttcttaccaaatgaatcaagatgggaatgttaatttatttgaatggttgtaagtcaatgctggattaaaagaaaagtggtgataccctacagataccacttataatctaaagatgtctgagtgcatgtgtgtgtatgcatgtgactacacacatttatgtatatcccagcaccttccccagaataagaatcagaaggtctggcattaaattgctatatggacaatttactgccaggacatttgctgataaaagaagcatttgctaagcatrtagtttccttcataaaactacaaaagggattttataatgcataaaactacaaaggagctcaatcagccttattcctctcaaaaaaaaaaaaaaatatatatatatatatatatatatatatatatatatatatatcatctatgaggatttccacagatgaaaatgtgcctttcagcactacaacttctcccaarggagataagggataaaaagacaaaatttttattatttctcctcatttaactctaaatgtatctacatttaactgaaaaatgcaactctatctgggcctgtattagctgacctcatttgatctccttttttcagacatatgctttatttcatattattcattttggcagtgtttctcaaacttcaagttcctgagaatcaccttgagtrtctgcttaacattcagattcttgtgtcaacccaaaggatcctgtttcagtaggattggagtgggcccaggaatattcattttttaaacaaaacctcttccagatgattctgatgaatggtaaaaggmcctcactttgaaaaattctgctttattgtcaaccatttgcttcttttggagcaagagcatttactcattaaaagttcacaatggttaaaattattgcatccaactcatatataaatagagtaaaatcttactgatttggaactgaataaaacccaacagaattactagactgtattataaacaccaaagataatagattttcatcttagtatcccctgaagttcctattgtagtagatttcacatagtaaacacaataaatattctaaagcatcaaattattgaaaactatgaattatacaatactgaaccacataattttgagcacagttaggatctgtgaagatcaygtggggcaatagtttttaatttagggtatatatcagaattttggaagaggttgaaagaacagtcatgactattttgaaaactgtctgaggtcattttgatactttccataagaactacttatctaggaccagattacctggtcatatgacctatgagaaatttaaggctttgatactctaagtagcttttctaaaggataccttaatcctaggctatatactacagggctactaactcttgaaaaccaaaaataaagttctaagcccccaaccatctgaatgaacccccttctctccgccaagggcattccagagttaacccggaaatctagttcagaccatgatggaaaaggagttgaacatgcttcattaaacctctccagcatttacatcaacacagaccttaagtctaatgatacacatttacaatatattctccctgaagcctgctatttagaggcttcatctgcatgataaaagcttcttctccacaaccccttatcagaacccagacattctttactactgataacgctttcaaccaatagccgatcagaaaaattttaaatctacctatgacctggaagctgccacccttctkgttgtcctacccttccagatcaaaccaatgtaaatcttacatgtactgatggaggtattatgtctccctaagatgtataaagcaaggtatacatgaggaccaccttgggcacatgtcctcaggacctcytgaagttgtgtcatgggtgcatccttaaccttggcaaaataaacttttytaaattgattgagacttgtttatcattagctagagacagatccagacacttttcgattaacactccaaaaccagtgctgggtcactacaatatgctgtaggtaaaaatatataatttaagggatccccttaacatgaaccaacaacwtgttgctacaaagaggtcttgttatcaaaatgagattttatcttgattgccttaatagatagataccaatcaaacatgcaaaactatttgtattagataataataatttgctaagacagtttttcagtgctagaaaacagaagtctttttaggtagcctaatattcttccccccatccccccgccccccgtaatcttatttacactattaatttgctaaacaatccattttcttattgttagtgtaatgatgaacctcagctgatctgaggccytaaataaatccctaaggtgcagagcccaaaattaataagcttactatttagtacggatggacggcagaaaaatggattttttttccttttgtttaatccacctgttgccaccctgtacctcctgctgtcagctcaccatgcactgaaaaataaatttgcaccasgtacattgtatattatggatttttaatgtttagggaactaatgcccattatttctattattcctagaacgtttctcattttgcrttaagaaatatagaaagatgcaattaaaaaattagaaaattatccaattaggtccctcttgtgtatggaataactaagattaagcaagctcttctaaacatgcagagctttctgatacaaacaaaagcagcttcaccaccaaacaaatgctaattcttttttaacgctcttatttccctgcagatctctgtttacattgaagaaaatggttctatttttttgtatgctaaaatactgaaacaaattgctttgaaagagagaggaaaaaggggtgggagagtttcctgctgggcatgtaaatatatggatgaagatgtgttctgtttataaactggcagggactcaagctttggaaacaggctaacaaaaagtaggacctgtaaactcacagggagggttttcaaaatgcaaccaatcatgtacttctgccctgaagacgttaataaaatattccagcatgcaaaaccgccaagaaagacacttgtcgactttcattatgatcaataaaaactgtcagctcattagcatatcattagctgtcctgctgtttccaaagtcttaatgcacagaaatattaatcttcaaatgtgtaagattccccagttctrtgactttgactttctgcatgaaaggaaaaataagaattaaagatgggaggcatccaatatagcttctttttcaatgtgcctataaacatatgtttaccatctgtggaattatgggaagcagctgaggtaaaaacgacagctgtggaatttttaaaaagttgtaatcaatttcacttcccagtgacacctcagctgttagaggagacagtgatgtccaggtaagggaaaggtttcagacccaagttcaccagacagacacagagacagagaaacaaagacaggagagccttggcctctgtgaaaggctttggaatgaagtctccctgaggcctcaactatttagaaactgtcagaacactcaacccctgaagcatccttataacttattttggttcacctcggctcatttttttatttttcaccctctgaaattgtaacagcataatcagctcagaatgcatcaaagggaaattgagtgggtartcaaccatcctgataatgaaaatctatgacaatcagaagattcagataagcctatcactactggccagcttttctcaaatggatgctgttttgaagtgaaaaaattcccagcttgtgttctgtgtctcagacaggaattacctaatgctagaggcttatgtaccaggcaccaagcaagtgattccatcctctgctatttaatcagcagcacttttttttgcactatccacaaggatccaccagggtccagaaattaggtttgacaagtgaggagcttttgcttttactttgcctataaaggcaacataataatatttaaaatagagaataatgttattttaacctgaaagcacatcacaagcatttttagttctggagcaattcagcagatgtggttgttgaatccatgaggcagcatgtacaagataaatattaaaagcctggagctatgctgactctcacctgagaagtggctgcctctttttcagggagatttttgtagtgttgaattgatcaagaggtaatttctgtaatgagacactgacatatttcccctaccccagccatttcttctcataaaaggatggccagaagcactgcctggcatccaggattctaaggagaagatgagttttgaaagctgccccatggaaagtatctttgtaatgagccattccatgaggccactcctattaggaagcaagaagaaccgccttgctctctaggaagatggactgggtgaaattgccatcaccttttgatgtttccactgggatcacctattctttgaagctggaaacccagaaaaagacaaattctgtctcctgatggtacttggtgtaccacatgtaaatatcatgtctccttaatcaacacagtggtaactgtggaaacacagggtaagcccttaataaatatttgttgaatgaaggagcaaagactttgaaatcataaagacctgggtctaaatcccatttccatcacttctgggctatataaggttggcaacttacttaatctgagtccaattgcctgacctacacaatggggataaaaatcactaacttagtaggatttctctgaaggtgaaatgtaattaactgagatactatatgcagggccaaagtctgtaacataggaagtattcaataactgttggttctgtcctctacattcccataacccacctctgcagcaaaatgattgtccaagtctctgaatgttctttgtgttatctgtctgtaccaggtatttgagctcaagcacaaagttctttatatctacagagaatcatacactcatcaagctggaatagataataggaagaactgttctctctctcttaatcatatcctcataactaaaacagaaattcctaaaagacaggaagagtgccttcatttctacagtatacagttaaacatacagggagcattaaatgccaagaaatgcatttttatgtgcttaaatactaaaaagggatggagacatgtgttacaaatgtactatgtgcaagttgcttttaatacatattcttatataatctgcattaccttcaggaaagacatctctggaactttacaaataagaagataaattcataactggtacattcattcattaacagtatattgtctgccagttatgtacctggtacttctaagcacttgctgaatgagagctagttctgaccctggtgaagcctacaatctagaaagaccaatgatgaacaaataaacacccacataaactatacttagaacctgctacataatttgcagagtcccttgttcaaaatttactaaacaattgaagagggcaacagcagggcagtaatctaatcacaggacctttctaagcacggcccccctgggactgctcaggttgatggcccatgaagccagccctgcctacactctcaaactgtggtgagtgcggggccggaaatggagatgtttcagttggaaagtatgtgatagaatgattgcaaattgattccccatttgtactcacacattttgaacagtgactttgtacaccctcacttcaagagggggagtctgtttccccatcccttaagtctggggctagtcttgtgacttgctttgatcagtaaagcactgtggaagtgatggtgtgccagttcccagcctaggcctcaagggtcttgtgaacatctactctaccttgaaacattgccgagcaccacgggaacaagcccaggctggcctgttagataatgaaagacacatggtccagtcgtcaacattgccccagccaggagttaatcaccatggcactgagactatcccagttaagtcagcctttggccaactccaccagccagctacaggcatatgagtaaatctagaggggatcaaccaagaccgatccttatcaacacaatttttgagcagacctgtgagsttactgacataagcccctgagttttgggggtttgttgtgcagcaatagctaaccgatatatgcagtaatggtgacggacctgcaaagagagggtgctccaggaaaatatcctgcacatgtaccctagcacttaaaatacaaattataattaatttagaaaaataaagaagacaacatttcaaacaaccgaatgaaaactgtcctgggcacaagcaggtgaaaaggccctgttatgttcaaggaactgtaaaaagagtagtgtggctgaggcatggtgggcagaagagaaaatggcatgagagaaggttgcagaggacagcaaggaccagatcttacgctggtttgacatgcaatagagagtcactaaaagaatttaagcaagagagtaacttcattggcttcaaaaagcaaagcaacacaagttcaacagctataataaagaggtatgttcaggattcaaactcagatctccatcccttgaaaccaagattcttcttcccggccctggagttcttgttatgtttctgtctaaagcatgtcycagaaccagcagcatcrccatcacctggcagcttgttagaaatgaaaagatttgggtcccaacctaggtccactgaatcagactttggaaataggaccaagctacctgttttgttttgtttttttaaaattttccattataaacattttaagtgcacaattcagtggcattaaatacattcacagtgttatgcaaccatcaccactattaatcaaacttttctattgcctcaacaaaaactctgtrrssrttaagcaataactcccatgactcccgccaccatcccctgttaaccattaatttactttctgtctcaataaatttgcctatttttgatatttcatataagtggaattaaagaatagttgtccttttgtgcatggttccttcacatagcatagtttttagggcttatccacactgtagtacgtatcagaacttcattcctttcttatggatgaataatatcccactggatacatataccaagttttctttatccattcatacatgggtagacatttggcttcattccatcttttgtgtattttgaataaggctgcagtgaacactgacatacaagtgtctgtttgagtccctgttttcaattctyttacctataaacctaggagaggaattgctggattacatgtaattctgtgtttaaatttttgaggaaccaacaaactgttttccacagcagctgcgtgattttattttttaacttttttaatcaaaattttatttttactttaaattttatttttaaattttactttaagttccaggatacatgtgcagaatgtgcaggtttgttacataggtatacgtgtgccaygggggcttgatgtattattgacctgtcctctaaattccctcccctttcccccatcccgcaacaggccccagtgtgtgatgttcccctctctgtgcccatgtgttctcattgttcaactcccacttatgagtgagaacatgtggtgtttggttttctccttctgtgttagtttgctgaagatgatggcttccagcttcatccatgtccctgcaaagaacatgatcrtgtccctttttatggctgtgtagtactccctggtgtatatgtaccacattttctttatcaaatagtctatcattgttgagaatttgggttagttccatgtctttgctattgtgaatagtgctgtaataaacatacgtgtgcatgtgtcttttcagcagattgacttatattcctttggctatatacccagcaatgggattcctgggtcaaatggtatttctggttttatatctttgaagaattgccatactgtcttccacaatggttgaactaatttacattcccaccaatagcataaaaatgttcgtatttctccacagcctcaccaggatctattgtttcttgcctttttaataatcgccattctgactggcgtaagatggtatctcattatcattttgatttgcatttctctgatgatcagtgatgtttaactctttttcatacgttttttggccgtgtaaatgtcttcctttgagaagtgtctgttcatctcttttgcccactttgtgatgaagtttttctcataaatatgtttaagttccttgtaaattctggatattagacttttgtcagtaagtagactgcaaaaattttctcccactctgttggatgcctgttcactctgatgatagtttcttttgctgtgcagaagctctttagtttaattacatcccatttgtcaattttggattctgttccaattgcttttggtattttcatcaagctacatgattttatatttccaccagcaatatacaagagttccaaattttccacaacctcaccaacacttattttccccttattttctaataggatgggaattttatttaaaaattataactggtggggtatgaagtgatatattattggaggtttaatttgaattttcctaatgactaaagatgttgagtatcttttcatgtgcttattggccatttgtatatcttctttggagaaatgtgtattcagatcatttgcccatttttcagttgggttgtcattttgttcagttataggagtactttgtatactctggacattaaatttttataagatacataatttaaaaatactttcttcctttttttggttttgttttcacatccttaataatctcttttgatgaagaaattttttttttttttttttgagatggagtcacagaatccrttgtaaaatgcaagcccatagatatttacctctactttttattctaagatttagtggttgtagctattatatttagaatgttagttgattttgagatcatttttatatgtggtgtgaagtagggggtctaacttctatacatagaatcatggcatctgtgagtagagatagttttacttcttttccaatttgaatgcatttacttatttttcttgcccatttgcactggctagaaattccagtacagtgttaaatagcagtggtgatatctttgccttgttcctgattttaagaggaaaactttgagtctttcactattgagtataatgctagctctgagtttttcattaatgccctttattacgttaagaaagtttccatatgttgctcattttctgagtgtttttatcatgacaagatattggattttgtcagatgcgttttctgtgtcaattgagatgatcctgtagggctttttttcctttattctattaatgtggcatataatattgcttgacttttcttatgttaaaccattctcctgggataaatcccacttgggcatagtgcataatccttttaatacactgttggattcagttcatttgtattttgttgagaaatgttgcctctacattcataagagatactggtctgtaattttctttgcttatgatgtccttatctgctttggtattatagtaattctgacctcatagaatgagttaggaaatgtttctccacttcaattttttggaagagtttaagaaggattgatgttcattcttgtttgaatgtttgttgcaattcaccagtgaagccatctggtcccagactttacttgattgagagatttttgttaccagttcaaacactttacttattataagtctcttcagattttctaattcttcatgatccggtcttcttcatgatccagtcctggttggttatgtgtttctaggaatttgtccatttcatctaggttatctaatttgttttcatataattattcatagtcttctattttaatcyttttaatttctgtaaggtcagtagtaatgaccctactttaaatatgacaacccattgcyttctgktctccatggtttctgatgataaatttactgctaatctcatgaagaagtcyttgtatttgacagtcatgtcttgctttctgctctcaagattctctttgcgtttatcttttgatggttttatcataacgtgtctcagtgtggatacctttgagtttatcttacttacagtttgctaaacttcttggatacatagattcatatatttcatcaaatgttaaaagttttaaccattattgttccaaattttctttccagtactttctatcttctccatctgagacacccccggtgcatacattagtctatttgataatgtcctacagatagatccctcaggccttgttcatttttctttattcatttttctttttgctccacagccttgttaatttcaatgatcttatctttaagttccattactcattcttcagcctgctcaaatcttctcttgcatccctctagtaagtgttttattccagttgtacttctcagctgcagagtatctgtttggttcctttttataatttatatctcttcattgatattctcatttttttatacatcattttcstgacttatttctttatccatgttttcatctagctctttaagcacattagagacagttattttaaagtctgtacagtaagttcaacatctgtgcttcctcaggaatagtttctattcatttattttgttcctttgaatgacaatactttcctctttctttgtttgcctgtgactttatttgaacactgaacatttggatgttataatgtattaacactggagaacagatctgcccctttactggggtttgctgagttttgtttttctttgttttttattgttgaatactacagtagtccatttctttagtggcttaccaaactatttttgcagagactgtatttctagtcatgtgtagtaactgaaatctctgttcctaatcttatgttataaagtattttgggccaggcaaggtggctcacacctgtaatcccaacactctgataggctgtggaaagaggattgctggaggccaggagtttgagacctgcctgggcaacacagtgagactttgtctctgtgaaaaaaaaaaaaaaaaattaaaaattagccaggcatggtcacatgtgcctgtagtcctagcttcttaggaagctaaaatgggatgattacacgagcccaggaggtcaaggctgcagtgagccatgatcatatcattgtcctccagcttgggcaacagaatgagaccctgtctcaaaagaagaaaaaagaaagaaagaaaaaaaaacttaaaaaaaaattttgacagggatttccttgaatgtcagcaaccaaaaacaagaaagagagagagactcctccaacctttgcagattttctccgtgctgggacmctccttcaacacttagccaggcttacactgatcctagggatcagccaaagatgaaagctttgggtgttctcaagtcttttctgaccttacctcttgccctaggcatgcatatggctttctaaattccttgaacacacaggtgattttgaatgttctaattgtccaaagaaaccctttttccagcattttctctttgctttacatgatctactatatgtctcaaccatactctttggccccaggcagacacatggtgtttgttagatttgaaatgttttcttaaattaacacataataattgtacctatgtattgggtacatttgatatttggtacgtgcatacaatatataatgatcatatcaggataattgggataactgtcacttcaaacattagttatttattcgtgttgggaacattccaaatcttctcttgtagctattttgaaatatgcaataaatcaatgcctgccacttttttctttttttttttatttatttattatactttaagttttagggtacatgtgcacattgtgcaggttagttacatatgtatgcatgtgccatgctggtgcgctgcacccactaactcgttctgagttacaagtaccttttatcagttcttcacatagtcccagatagttagaatagatatgcaaaataatttgtgaataaggtctgctctgctcactccacaaccagagactgttgtcctacactaggaacatgggctgaaatctttcaggactgccactgggttataaatggtatggtacaaaaggcaagtaaacatgcctcacagctttcctactgttttaaggttgcctttttcttgattcagcattcactcggttgctataaacctctgactattttcctaagttccaacaaagttggttctgacaatttctgcttgtttttcagtgtttctgtcgagaaacagcagcttcaggttttctactctaacattttgttgacatccagctacttgtgttttaacaagccttccaggatatttgtatgcaatctaaagttagagaacaactaatctaaaaagtcactaattagaagctaattactgaccatatgttagatttgtgggctccttatagagataaggcaaaaccataatctaggccatcaacacatatttcctgtatgtcagtgcactcaaatttgagccttcaaactgaataaatcaaaaccaataagamggttgtgaaaaaaatgtgtcagttcttagaccctactgttcagattctcaatgaggaggtctaagtgtacacaataatttgatttttaaagtcttctaatatgattttaatgtcttttcaggactgagaaccagtcattgcccttcattacagatccaggacccacaagaaaaggagagcttcaccaggaagtaactagctacagaacaagacacaccattgcattgaatgtgagttcagttttaaactgagacacttggatgaatttctgttcattcttggaaacatggcaaaattatatacatatacatatatacacacacacatatatacatatattcacatatatatgtggattatcaccctgaaaaagtatgccattttaaacattttgaatatttatgatgtacaaaacaacatatagcaaacacttgagaaataaaatatcctcaatatagttgaagtcttctgggttcacaaccctaataaaactcccatttcctcctctcagaagtaaactattctaaatttagtgtttatcacttctatgcatttttctttgtatatatatggatgtatcaataagctgtatatggaattatcttgcattttgaaatatatacatgatttaatactgtaattttatccttctgctagctttttcatttaaaattactttagcaattcatcaatttttgttcaatttcactgatttttatgtttctatgtctctactacaacgtatttaaacattctcctattgatggacaattaggttttttccaagtttttgaaattaccaaaacaaaaaaaaaagtcctgtgatgatgcttatacatatatacctgggtatatgaccaagagtttcttcaacgtttataccaaagagttgggctcctatgtccaaatgtatgcacattacaaggatccccaaatttccctctctattggttccaccaattcaagtttccaacacaatgggtaagaatccattgctcaatgacttcccctacacatagcattgtcagatggtttttcacttttgccaggctaatgggtgaagaaatggtttttcataatggttttaatttgcatttccaagataactagtgaacttgaattactttcaatatgttcactggttatttatgttttctactttggaaaaccatccttctatatcttttgtctgacttcctattgagttaaaaaaaaaaggtttcttattgatttgcagcatttcttcaatgaatactttttttttgctaattgttgtcaagatcttccttgatgtattgtcacactttttagaattttatgcagtaaacccatcagtattttctttaaggacttgtgcatttttttatcttgtctaagaacttctctatcctgactgagatcgtgaagatatgttcttatgttgtcttctaaacctwtcaacattgagctttcagttaggtatttaattcaattgtacttgtaagtgatttttatgtatggggtccaggtatatatttgaagcttttccttatactgtacacaaaaatcaattacatcactcaatgtctgtgtctataatatatatataatgtttttaaataactgattttcctaaccatgtattgatgaatccatcctttcctcattggtcaggaatgccacatcagttatgtgtcaagtttccaagtttccacacatgacgaaagggtcatttctggcctctccattctgatctcttggttcatgtgctgattaatgcagtgatatcacactctgctgattgctataactttacaataagccttcacatctggatggctaagtcccttcctttttctccctcagaaaatgtcttagttattcttggcctctggtcttccctaaaaattttagcatcagcttgtcagagtccatcaggaaaaaaaaaaaaatcctcttgggaactgattacaagttcattgaccctagagagcaatgtggaagaagcagacgtttttattattttaagccttcttctccaagaacatagcgtacttctccccagttaggtcttcagtggtttttcataaaatttcataattttctttatargtgtcatgtatatattttatttgatttgttcctatttgattcaccttttgatattataaataaaatatttaattgcagtttttgttattgctgttgcagctgccactrtgctgcttttgctcagcaatgcaattgatcttatctttggctttacatctagyactctttctgaactctcttgctaattctaataatttggtgatcattttttatatataggcaatatataagttaataactactttttwaattataatccttaagatttttacttattttgctggtaagaacctccagtacaatgttgaatagaaacactgataatagtcattcttgtgtggttcctgattttaacaggaattctcttaatatttaaacygtaagtatgatatttgatgtatgtttacttcatgtacttttatcaatttaatgaagtttccttctatttctagtttgctaagaatttttaatgagtcagtattgaatttcttctagtgccttttctgcctcttgagaagaccattggatttttttctcctttaatgtagtcaatttcattaagaaattttctgaagataaaaacaaattttcactattgaaataatcaacttgttctctctcacacacccagacacacacgcatacatacactctgctaataaacaggttgctaataatattttgtttaaattttttaatctaatctgttcaaaagtaaattggcttaagcaattcccttctcatacggtccttrtctastctgcaaatcaaggtgacctatgctcataaaattagatgagtggtattctcatttattctcctctctggaagagtttatttaagattggaattatttccttggatgtgtgctacaactcccctgtaaaactgtgtgagcctcgtggttatttggtggagggacatggtagactgccagaatgatcccagtcctttgctcctcactgtgtccataccttgtgcaatgtgaatttgtagcatatcccatcaaaaggtcaaatctatttccagtacacttgaatctaagctgggcttgtaacttgctttggccaatataatgaagcaaagtaatctagtgcaagtttyaagcctaggcctcaaaaggccatgcacatttctgctctgactcttgaaactttattccatgawcatgtaaactagtttgggctagacttctggaaatcgagaggccacatgaagcagagatgagccataccagctaaggccattcaaggcctagtacaactaggccccagaaaccccagcagctgatcaaagatgcacaaatgaacccatggagaataaaatccagcaaagtaagcccagctcaaattgctaatgcacaaaattgtgaggtaaataaaggctgttgttttaagccattaagctttgttttgatttgctgtatatcaaaagctaactggtacaatagactttcaatcataaactcatcactttaatgaagctaagactaccatagttgtttatttgaagtccattttggcgattcatgtagctttagaaaactgtccatttttctctaattttccattttattggcataaagttgttaacaaatggttactactgttttaatttttgcagcatttattgttatatgctttttttatttctaatatatttatgccttctctcattttcttcttgctcaaacttcccrgtgtattttcaaatgatcaaattttggctttcttgatcttgcctattataccctactcattattttatgaatttctgttcttacgatttcatgcttactatttcattccttttactttctttgtatacattctgttgttctttttctaacttccctatttggatgtttaactcattaaatatctaccttttccaatacaagcatttaaagataaatactgctaagaattgctttagctgcatctcrcaaattgtgatatttattatctttctgagttagttattaacttatactattattttcccccagactgattagttactttaaatgatactgtttatattgccaaacatacaaaggtgggaggttagttatcttttcactatttatttctaacgtaactgcactgtcatcagagaatatggtctatgtatcattttttgtaatttgtggagatttcctttttatggacttttatgtagttaattttcacaaagattccatgtgctagatgtgttcattgttggtagagtgtgtatgtgtgtgtgtatatatatatagccattaaacttgttaagtatgtttaaatccatacgcttactaacttttctgctagcttgatctataagttattgcgagaagtatgttaaatatcactcagtatgatggcaaatgtatccattttccctctaattacctactatgcatatatgtttagtaaacatttttattaaagaataacatatatacagatagttacacaaatcataaaagtacatattgatgaattaacttgacataaacactgtgcaagtgccacctagatctgtaaataaaactaggagacttccctagttttatttatagatttgtgaaagcaaatattatttacttgtgaaagcaaaaatrtggaatcaccctaagtgttcatcaatgaatgaatgaataaagaaaatgtgatatatacaaatggtaaacaaacatatgaaaaaatactcacatcactaattatcagggaaatgcaaattaaaaccacagtgaaatagcatcttagtcctgcaagaatggtcataatttaaaaaaaaaaaaaatagatgttgacgtggatgtggtgaaaagagaacacttttttttttattatactttaagttttagggtacatgtgcacaatgtgcaggtttgttacatatatatatatgtgccatgttggtgtgctgtacccagtaactcatcatttaacattaggtatatctcctaatgctatccctcccccttccccccaccccatgacaggccctggtgtgtgatattccccttcctgtgtccatgtgttgtcattgttcaattcccccttatgagtgagaacatgcagtgtttggttttttgtcctcgcaatagtttactgagaatgatggtttccagcttcatccatgtccctacaaaggacatgaactcatccttttttatggctgcatggtattccacggtgtatatgtgccacgttttcttaatccagtctatcattgttggacatttgggktggttccaagtctttgctattgtgaatagtgctgcgataaacatatgtgtgcatgtgcctttataatagcatgatttataatcctttgggtatatacccagtaatgggatggctgggtcaaatggtatttctagttctagatccctgaggaatcaccacactgactttcacaatggctgaactagtttacggtcccaccaacagtgtaaaagtgttcccatttctacacatcctctccagcacctgtgttgtttcctgactttttaatgatcgccatactaactggtgtgagatggtatctcattgtggttttgatttgcatttctctgatggccagggatgatgagcattttttcatgtgtcttttggctgcataaatgtcttcttttaagaagtgtctatccatatactttgcccacttgttgatggggttgtttgtttttttcttgtaaatttgtttgagttcwttgtagattctggatattagccctttgtcagatgagtagattgcaaaaattttctcccattctgtaggtttcctgttcactctgatggtagtttcttttgctgtgcagaagctctttagtttaattagatcccatttgtcaattttggcttttgttgccattgcttttggtgttttagacatgaagtccttgcccatgcctatgtccttcctgaatggtattgcctaggttttcttctagggtttttatggttttaggtctaacatttaaatatttaatccatcttgaattaatttttgtataaggtgtaaggaagggatccagtttcagctttctacatatggctagccagttttcccagcaccatttattaaatagggaatcctttccccatttcttatttttgtcaggtttgtcaaaaatcagatagttgtagatatgtggcattatttctgagggctctgttctgttccattagtctatatctctgttttggtaacagtaccatgctgttttggttactgtagctttgtagtatagtttgaagtcaggtagcatgatgcctccagctttggtcttttggcttaggattgacttggcaatgcgggctcttttttagttccataggaactttaaagtagttttttccaattctgtgaagaaaggcattggtagcttgatggggatggcactgaatctataaattaccttgggcaatatggccattttcatgatattgattcttcctacccatgagcatggaatgttcttccatttgtttgtatcctcttttatttcattgagcagtggtttgtagttctccttgaagaggtccttcacatcccttgtaagttggattcctaggtattttattctctttgaagcaattgtgaatgggagttcactcatgatttggctctctgtttgtctgttattggtgtataagaatgcttgtgatttctgcacactgattttgtatcctgagactttgctgaagttgtttatcagcttaaggagattctgggctgagatgatggggttttctagatatacaatcatgtcgtctgcaaacagggacaatttgactaaaaagggaacacttttacactgctggtgtgaatgtaaactattaacccctatggaaaacagtatggagattctttaaagaaccaaaagtggaaataccatttgatccagcaatcccactactgggtatctaccaagaagaaaagaagtcattatatgaaaaagacatacacacggttatagcagcacaattctcaattgcaaagacacggaaccagcctaaatgtccatcaaccaatgaatggataaagaaattgtggcatgtatatataaatactactcagccataaaaggaaatgaaataatggcattcacagcaacctgaatgaaactggagaccattattctaagtgaagcaactcaggaatggaaaaccaaatattgtatgttctcacttataagtgggagctaagctatgagggcacaaaggtataagaatgacagaagggatcctggggacttaggtgaaagggtgagagagggtgagggataaaagactacatgttgggtactgtgtacaccactcgggtgatgagtgcaccaaaaatctcacaaatcaccactaaagaatttatctatgtaacaaaaaaccacctgtgccccaaaaactagtgaaattttttwaaaaatataaaaaataaacaccaaatcatagaatttaaaaaaaagaaaatgtggcctatatacacaatgaaatactattcagccaaaaaaagaaaatgaactcatgtcatttgcagcaacacggatggaactggaggtcattatcttaagtgaaataagccaggcataaaaaaggcaagtatctggccaggcgcagtggctcaggcctgtaatcccagcactttgggaggccgaggtgggtggatcacgaggtcaggagttcaagaccagcctggccaagacagtgaaaccccgtctctactaaaaatacaaaaaaattagccgggcatggtggcacacacctgtaatcccagctcctccagaggctgaggcagagaaatgcttaaacctggaggggcggaggttgcagtgagccaagatcgcgccactgcactccagcctgggcaacagagcgagactccgtctcaaaaaaaaaaaaaaaaaaaggcaaatatcacatgttctcacttatatgtgggagctaaaaaatttgaatacacagctagagagtggaaagatagagagcggaaagacagataacagagactgggaagggtgaatggggtacatggagcaaggatgaagagaagctggttaaagggtacatatacacagtaggacagaagctgtaaggggttctttacaatcccaataggggttttaccaattnnnnnnnnnnnnnnnnnnnnggttcgaaagggtttttaacgtacttccttctagttgttggaaagctgtcgttggtatctccaggtgccgtcgagtttgttggttgatttggttgggtggtgtgaggattttgaggatcttgttttttggtacctatacgcattggggttgcaggacttgtttgttttttttttttttttttttttttttttttttttttttttttttaagaggactctccctttgttcgtcagtgtgtatttcagttgttgtatttcgggtcattggaagtttcgcctccctggttcatgccattttcctgcctcagcctcccaagtagctgggactacaggcgcccgccactacgcccggctaatttttttgtatttttagtagagacggggtttcaccgttttagccgggatggtctcgatctcctgacctcgtgatccgcccgcctcggcctcccaaagtgctgggattacaggcgtgagccaccgcgcccggccagagggaataatttcaatgtttgatagcagagtaggttgactatacttaacaaaaatgtattatactcaggcaatggacaccctaaatacgttgacttgatcactatacgttatatacatataacaacatttacatgtaccccacaaatttatgcaaatcttaaaaattctgtgcatgccttttagtgtatacaaatgcatatctctattagacattaggtacctagagtattctttcttggtcataggacatatatatgtccattttattaaccatactaacaaacagctttccttagtacttaaatcaatttcattcccaccagcagtgaatgaaggctccagttgttccacatccttgcaaatacatggtatggtctgtgtttttaatttgacccattctgatggatattcagtagcatctcagtatggctttactttccctgatgactaatcatattgataccatcccctttgtttactggccttttggacattcccttttgtgaagtgcctggtagcatttttctcaaatgtttttattggatagacttttcattattgatgtaaaggggtcctttatacagcttggataaaaggcctttgtgggacacaactactttgaatagctcctcctattccttgacatgcctttttactctcttagtcatctattttgatgagaaaagttccaaattttaatatattccaatggatcagtcttttcctttatagttattatttcttacatcttatttaaaaagtatttttcctacatcgaggtcataaagtattctcctacattatcttttataagctttgtcagtttaactttttgatctatagcccacttggaattgattttgcattatcagttgtgtgaaacagggtcargattagtgctttccccatggggatattcagttgacccagcacactgtagtgagtaggccatccatgcctgctattctgccaggctacaacatacagtttgagattatgttattcagtacatacatctttaaaatagcttattattatgtggtgacctttttggccttgcagtttgaaatcagcagtttctccagccttctcatgtttagtttggcctatttttcttttttttttttttttaactacctcactatcaacatttatgagtccttattttttattgtttcactgtaagcaatatacaacaggctttgggttttatgaattcaatataatactcttatttttcattctaagtgtaaatcacttaaattgataataacaattgtgaaatggaattatatatggtatcttatattaaatatttctcttcttaccttattttgggttgatgaggcttaaaaaaaatccccttttctcttatacttaaatgtcagagtttgggagttaaacatgatttctattattttgatattgttttaattctaacatgtagacttaaagtctaaagttaatcagtttctccattctttttctgaccacttagaacacttgaaatcaggccttagaacactttaaatcagatcacctttactaacattttattgctgtcaatatttttttaattttaattttaattatttttttatttattaaaaaaaaaaacacgggatacatgtgcagagtgtgcaggtttgtgacataggacatgtgtcatggtggttcgctgcacccattgatccatcctctaaattccctcccctcacccctcaccccccaacaggccctggggtatgttgttcccctctctgtatccatgtgttcttaatgttaaactcccacttatgagtaagaacatgcagtgtttggttttctgttcctgtgttggtttgctgaggatgatggcttccagcttcacccatgtctctgcaaaggacatgatctcattccttttcatggctgtgtagtatgccatggtgtttatgtaccacattttctttagtctaacattgatgagcatttgggttagttccacgtctttgctattgtgaatagtgctgcaataaacatacatgtacatgtgtctgttttttttttttttttttgagacacagtctctctctgtcacccaggctggagtacaatggcacaatctcagctcactgcaacctccacctcatgggttcaagcgattctcctgtctcagcctcccaagtagctgagactactggcgcgtgccgccacacccggctaagttttgtatttttagtagagacagggtttcaccatgttggtcaggctggtcttgaactcctgacctcatgatccacccacctcggcctcccaaagtgctgggattacaggtgtgagccaccgtgtctggcctgagccactgcgcccggccgcatgtgtcttcacagtagaatgatttatattcctttgtgtatacactcagtaatggaactgctgggtcaratggtgtttccggtcatagatccttaaggaatcaccatactatcgtccacaatggttgaactaatttgcattcccaccaacagtgtaaaaggattcctatttctccacagcctcacataggatctattgtttcttgcctttttaataatcaccattccgactggtatgagatggtatctcattgtggttttggtttgcatttctctgataatcagttctggtacattgtctctttgttctcattggtttcaaagaacttcttgatttctgccttaatttcattatttactcaggagtaattcaggagcacattgttcagatttcatgaaattgtgcggttttgagcgagtttcttaatcctgagttctaatttgatcgcaccgtgatctgagagacggtttgttatgatttcagttcttttgcatttgctgaggagtgttttatgtccaattatgtggttgattttagaataagagtcatgtggcactgagaagaatgtatattctgttgatttggggtggagagttctgtagacatctactaggtccacttgatgcaaagcggagttcaagtcctgaatatccttgttaattttctgtctcgttgatctgtctaatattgacagtggggtrttaaagtctctcactattattatgtgggagtctaagtctctttgtaggtctctaagaacttgctttatgaatctgggtgctcctgtattgggtgcatatatgtatttaggatagttatctcttcttgttgaattgatccctttaccattatgtaatgcccttctttgtctttttttatctttgtcggtttaaagtctgttttgtcagagactaggattccaacccctgcctttttttgccttccatttgcttggtaaattttcctccatccctttattttgagcctgtgtgtgtctttgcatgtaagatggatctcctgaatacagcataccgattggtcttgactccttatccaatttgccagtctgtgtcttttaattggggcacttagcccatttacatttaaggttagtattgttatgtgtgaatttgatcctgtcatcatgatgttatttggttattttgcacactagttgatgcagtttctttgtagtgtcattggtctttatattttggtgtgtttttgcagtggctggtaccagtttttcctttccatatttattgtttctttcagcagctcttgcagggcaggcctggtggtaacaaaatccctcagcatttgcttgtctggaaagaattttatttctcattctcttatgaagtttactttggctggatatgaaattctgggttgaaaattcttttctttaagaatgttgaatattggcccccaatctcttctggcttacagagtttctgctaagaggtccactgttrgtctgatgggcttccctttgtaggtgacttggtctttctctctggctgcccttaacagtttttttccttcatttcaaccttcgtgaagctgatgatcatgtgtcttggggttgatcttctcgtagagtatcttaatggtgttctttgtatttcctgaatttgcatgttggcctgtcttgctaggatggggaggttctcctggataatatcctgaagtgtgttttccagctcgtttccattctccctgtctccttctggtactccagtcaatggtaggttcggtctttttatgaagtcccatatttcttggaggctttgttcattccttttcattctcttttctttattcttttctgcatcttttttcagtaaggtggtcttcaaactctaatgtccttttttctgcttggtcaattcagctattgatacttgtgtatgcttcacaaagttcttctgccatgtttttcagttccatcacgttgttcatattcctctctaagctggttattctggttagcaattcctttaacctcttatcaaggttcttagcttccttgcattgggttagaacatgctcctttaactcagaggagtttgttattacccaccttctgaagcctgcttctgtcaatttgtccatctgatcctccatccagttctgtgcccttgatggagagacattgaaatcatttggagaagaggcactctggccttttgggttttcagaattttttcattgattctttctcatcttcgtgagtttgtctagtttcagtctttgaggctgctgacttttggatggggtttttgtgggggccttttgttgtcattgatgatgctgttgctgttactttctgcttgtctttatttcaatagtcaggtctctcttctgtagggctgctgcagtttgctggggattcacttcaggccctgttcacctgcttcactcccatgcctggagatgtcacttaaggaggctggagaacagcagagttggattcctgctccttctgggacctctgacctcgaacgacaccaaactgatgccagtaggattgctcctgtatagggtgcttgacaacccctgttggagggtctcactcagttgggtggcacagggagcaggacctgtttaatgaggcattttggccattggtggagcggktgtgctttgctggggggaaacctactcrtctagactgcccggattcttcagaattaccaagacaagaggctaagtctgctggtccacacagactgtggccacctctcccsctaggggctcaggcccagggaaatccgaattctgtccctgagtctccrgctggagttactggaaatctgcctcccttggctgcagggagggggctcccctttcccgtgtggctctcagatgggccgtcgcaccgcactgttcctccytctctccatgagtcacgccagccttctagtcaattttgatgacagaacccggatattttggttgatggtgaaggattccattgtcaatatttttaatattatttttctaaaattaagcattattatattttaatcaaacaaggataatggcaatcattcagaataataatcactgagatttgtrcatactgtcaacatgcatttgctctccaattcttcttgcactgtatgtcttccttccaggaagttttttaaatgaagatctattggttataaactgagagtttcatttctctactaatgtctttatgtcacactcattctcaaatgacaattaagcttggtatatactactacatttgaaagttattttctctcaaaacttggaaaacactttttctactgtcttttgacttctgcttttactgtttaaaaaccagctgttcagtttgttatccttttgtgaaaaatttgtgttttgtcactggctatttttaagatcttctctgtgtctttggagttctgctattctgccagtatatctaagtgtggctgtctatttatcttgatttgtataataggttgctgatgtggccaaaaaaaattcttccctccttgcatccatatccttgcaatgtgatatcatggagcagcccttcragagatgaagtctatttatttacattttgactctggagttggccatatgacttgctttgggcaataaaacattagcaaatgtgatcaagcaaacaaagccttgaaaatattagtactttagggattgcactcttccgatacttggaatcccagggatgacatgtaaataagctgagctaggccattggagatgagagaccatgtgaggacaactgaggaacaagagtcaacagccagccaacccccagagaggtgaagaggctctcagatcatcctgccacctgctagcatgccaattaaccacagacatgggagacagcctaacaagtatcagcttagccaggtcaaagcagaaaaaaattggtttttgagctaaataaaatggctgttctgatgcctctatgttttctatgatttctatgtgaaatcaacaacatatacttttatttcattgttctttcagtaatgagaattaatgtcttttattaagtttagaaaattcttacccgttatacttataatagtgcccataacctttatctctgtttactatctggaattttcaaatatatatgcatatatagacataatatattctttattatcttccttaatttttaaatatatgtatattataataatatacatatctaagaagctatctatctcagctatctaagaagccacttagaaaacatagaggcatcagaacagccattttatatagatatgcatacatattcacacatattaaacagatacgtaaactttttttatatacatgtatctgttctatattttaacctccttcctattttcttctctttatctctgaagcactactattagtttaattattttaacaatattttccatttcacaaatgctcttcctacctgtgtctaatctgtttagcaggttcactgaggtttttggtttttgtttcttttttaacttcaacaactgtatctttcatttttggaagtgctttttagttcaactatctctgggcctatttattatctctagtcatcatacattctttattattttgattcttcaaacattttaaacagaagttttttaaaaaattaaaaaaaaattctttacctgctaatttcattttctgtagccctgtgaggactaactgagcatttttttgtttctttccactgtcattcgtgatggctttagagctcctattttatggacttaatctgtgggcatcctttgaggtctacatcaaaagtgactttctccaaagataatttgtattttcttcatcasgactcccaaggtacctaatccarggycactttaatatactttattgagcttcatgggtaaagtaaatctgggtgtcaagtctgcaacccttcaagtgctgtggkttactagttctctgggaagtattattttttctcatctggagatgagatgcagacaggatagtttctggattgcctccttctgctagatagtggrctggctttacyttaaaaatttccattccaacactcagtcacgcatgggatstaagtaatttctcccatcccacacagacggttgaaatttaaagctctaactgaaattttcatagattgctggtgggaatgcaaaaactggcacagctgctttgaaaaatggtttagcagttgcctgtgaatttaaacatacacttaatatacaacccagtaagcycacacctacacacttacctaagtgaaatcaaaaccgctgttcacacaaaaacctgtatgcaaatgtttatagtggttctattcataattgttccaaactggaaataacccagatgtccatcaactgaagaatggacaaacaaaatatgatacattcatacaacagaactggaatactactcagcaatagaaaacaatgaaccactgatacacacaacaacttggtgaatctcaacatagaaacttatgtaaatacacacacacacataaatgattccatttatataacattctggtaaagacaaaactacagggtcagaaaacagaccagtggttgctaaaggcttcgggtgaggagaagggtttaatacaaagggggatggaaatttttggagataaagaaatggttctttatctcaattacaatgatgattataatacagtgtagattttccaaaacttgtgacactgtacattaaatggaatgaattttcctgtatgtaaattacatcttacttttttttggtattattttattatactttaagttctagggtacatgtgcacaacgtgcaggtttgttaccttggtatacatgtgccatgttggtttgctgcacccatcaacccgtcatttacattagttatttctcctaatgctatctctctcccagccccagtgtatgatgttccccaccctgtgtccatgtgttctcattgttcaactcccacctgtgagtgagaacatgcggaattacaccttaattttttaaaaataaaaaagaaggaacctaaggctctaagttctggtactgatacccctctggctttctctcccctccatatatttggtccccaaggaattcctttcgtataagtacaatgctgaattttaaaatatttttgtggtattttatcgagcattatagtcattttgaagcagaaggatttttagaatatctagtctgccatattgccagaagcaaaagtgtgtcattctttcaaagaacaagactgtcttaaaatttcatggtatttttaagtttttaaatttattttatcactgtatccttatgtttctgtgaagtataataatgcagtttttttaaaaaaaattttggatgtagggggtacacacgcaggtttgttacatgggtatactgcatgatgttgaggtttaggctatggatggtccagtcactcaggtagtgagcatggtaccaaatagtttttcagcccatggctccctctctccctcccacctctagtagtccacagtgtctactgctcccatctttgtgtccatgtgtattcagtgtttagctcccacttataagtgagaatatgcagtatttggttttctgttcccagtaatgcaattaaaccaaagctcaaggaagcagagatgtatttttcatatctagacatctactctaaactgaattaacatataatctgagaagggaaaccagtttgaagattatcgtaaatccttcagaattgggaggtcaacattttgaggatcatttgccttctggatcatccatccctggcagcagagtgaactggataaccttgggcaagtcacttaactctctgcctggtttcaaagcacctacttcacaaattactgtgacaagtaaaccagtttattcatgtcaagcacataaaaaagcatgtgtcacaaagtaagtgttcaataaacattagtagctattatgccatgcccttcccactaatgtaattataaacacggctccaataaataacacagaaaactgagcatcgcctatatatatacttcaataaaaagaacgttagtgcttactttgaataagccatgcttttggttgcgctggccaagccataaattgattcctgggggaaggttggtatctggagggtctatcacacgctcataaatcctgtaaaggcaaagaacacagttactaatagagaggctcaaagcagaaccaaaaggtgcatatgctgtttgaagtatgcatgccattagctgctgtatgaagagaagccaatatgtggcacactttacatgacagataacatgaatgtagagatctaacacttggacacatcatctgggcccctcctgcttttgtctcccttttggcaggggagggaggaagaaggtgacatttttgagtgtccactctgagcaatgaactgcccacaaactctgtggggaaagtggtttgatacgcatgttataggtgcgaaagctcagatttaggaatcataaatgagttaaccaagtgaagacagcagtgagtagtagagttgggataagaactcttatctgcctggctctaaagccactgtactttcctttgcaccctgctattctccgacttcggtttctttaggtcctactcatttctgcagtaacctgagagaaccctttaaacaagtagattgcagctgcctagatgatcatgtttttagtctacagaactacacagcttaagtcatcgtccaaccaacaaatatttattgaacactttttatgctctaagctccacactaagcaacagaaaatagagcaagaaaccagacacacaaggtcccactctcatggaggaaaagtaagataaaaattctatatatgaagaaaatcctcatctgatccatacaggcacataactaatacagaagatgtcagagccctacctaggatctttgaagtttctagcagagcctaccgaacaattaatgtctcagttattccatcctaccaaggtccggttagttggtcccaaatctttttattcgtgccctctttagaaatagtccctgcaaccacccactgatcacgagcttccacctcaccccgggcaagtacctctcagcaytggatgctcagaagattctgggtgggatgaaacacagtgatctgtaaacgagaactatgtccatttcttgctttcctgagtcctcgctgaggactgagcaayggctgcggaatcattcctaggtgtgtccagaggtacggacagctcatcastcctccctgctgtgatggagctgactgcctcctgccagagggcgatgtattcctccggtggttctcacaaggaaagtgcagaagaactgaaagactgyccacttgtgtcaaggaaagtgagtgatggtgagcctgctgcagttgggagctgtcgcgctgcagtcttatatcttagctgcacagtccattactctactattccccactggaaacctgctgtttcctaatacatgcaaggttttcagctggcaaagctccaagcacatcaggtctttctctactaattatccttccattataagtggacactcaaaacataatcaggaaaaaataagttttcctaaaaagaagacagaatgtgttttctttacaggaatctaaccttttttgtatcttagaatgaacgattttagacgaaactatttgtcaaaactgccttaacacaggagcatgatacacacttcctttaaaaktttttctcctaacattagtggaaaaactagacacaaggcaaatttacaacttaagagatatgcataagttatagatcagcttgaaagaatttactacagtcattaagtgtgatgaatatgcaagttatgaaacaagggaaagtatatacaaaatatttttcactggaaaaaagggaatgcaaaattatttatgccctatagagataatgaggcacaaatgatgttcaatgttggtaaataccaaaagaggccagggagaaatggaaatcactgtatttgggtgacgaggcagaagcatgatttctataaggctattttactaataaattgaaaatgttgaaccatttaccttaagctcaattttaacaactttgcctctgtcacagttagacgagctttcgattcaaaagtttattttatgtattcaataggctagaagataagctccaatgagcagagtaggcccttaatcaatatttattaaatgcatgaattaatgaaggaaaaaacaatcaaagagattaacttcctatcctaccttatcttgcaaagcataatagctccgtgtgccttaraaatagttgaagaagcaaacatctgaggcccactatcaccagctaaagcagggtgacccagggcacatgtgtcaaagtggtgttctcatttcccatgtcatacagcccccacaaagacaccatcctgatgccaaggaagctctgccggatgctgccttcctggcagccctgccaatctgttccaagaggcagtctgcattagggaattctgtgcagcaggtggaatcaacaaactggatacagatgtatcaacatgaagagagtttaaaaacagtattttttttaaaaagaaaacttgctgaggagggaggaggaaatctaatcatgaagaaacatcagataaacctcaattgaaagacagtccacaaaataactgcttgtggtctttaaaatgtcaatgtcatgaaaaataaagaaaggctgaacaacagttggagattaaaagagagactttaaaaagacataaaagctatacgcaagatgggatcctggattagatgctagggcagggggaaataatcccataaaggacattattgggaaaattgggaaaatttgaataagatctgtaaattatgtaatagtattttattgatactcaatttcctgattttgctaactgggcagtatatacttaagtgaaagtcttgttcttaggaaataggcactgaagtatttaggggtagagggtcatgatgtttacaacttaactctcaaagggttcaaaataacaatactgtttgtatatataagtatacacatctatgaatacacgctttctcttccttccaaataatgcagaatctgggcaaatatgattgttccttgtatcactcctataagttttctgtgagcttaaagttatattaacattaacagtttaaaaaatagagaaaaaaccaacaaggtccataatgtatgtaaactaaaaattcacacatgcaaaacaatgttatcgattagctaaggatacgcacagaattttcctatcacaggcctggtgggaatggtgaggcaagaaaaaagtgaatgaatgaaacaagaaatgtgcacggcacagactaatgctgataacacaaactaagaaattgaattatcacattcctacacgtacccctatagaaggggagctatamatgccagccaaagtaaaatcagaatcttagcacaaaggctgctggtccctgagggacagtttgggtggactggatcatgtaaaaaggcaggtagggcacagtgatctgtcacttaaatctggcgtcacccaagtcaactaaaatgaaagtcacagctaatatagtgaactccttgctctccagtgtggtaaggaaactgagctttctgatatatagggtactctggttaaygaggtttccttcacatcagcaaatagctgattgcctgcaatgtgtatgacactgtgctgtgctgtgctggctatggggatacatacaggcaaatttagaatggccaatttcttgtctttagatctaatgcctgagacagacacatgcatggacacaccttataattcaatgcattaaattcaatgtttcctggaagcagaaagggaaaaaaaaaamaaaacagaattctgcctgccatagtcagagaaaactttccaaaggagacactacactgagttttgaatgaagaataaagtggagctgaaagagcagacataacagccagcacttatacaacacttaatgtgtgccgacattgtgtattgagggcttctatatgttaatttactaaatcctcataacaacaccctcaggtgggtgttcttggcttagcaaggtcaaataactcgtccttggttaagcagcttgtgagtgacaccgctgggatttgaaatcagatcctatagtctgtactattgaccaccttgccctactgcctctctagacaagcaatgaagggcagtttcagccacaaaagccccatccaagctactatttatcaaagagttaaaatacaggaaaacaaaaacagtaaataatttggtagaacttttaaatcaacactgaacaaaagaggacatgattaatatatcctgggatgtcctgctgtcacagacaggttctttatttcctaatagagcaacgtgaaaacctaactcattcaaataaagtaaaattcctaactaggcttacttatcagaaggaaaaggggaaacaagttcatgtatcaaagcttgaaggcaagactggtcagctctcctggaacccactttgttttcctcccagattcacagctctactacacttcccagcctcccttgaagttgagtgtggctatggaatggaagtggaaaggttgtgccccacttctaagcctgcccctccaccccaccgaaaaataatttaaaaactccctcaggtatcttccatgctgtctctttccctttatctcttttctctttctccctttcagctgcctggagaaaactctgagggctaaggggtggacagagctacaagaccgagaatcttgaatccctaaaggatgacatcaaaggccacttgtcagctagacacacccaactggactctatttaaatgagaaataaaattcagctattttaagccactgagatggagaggatattctgaagttgtgactagtataatttaccctaaaaaatataccgcactgaaaaacagaaaggttactgttgcctttttcacgcccacaaagccaagaagtatcttagatagtgtggtgtagcaaaaacaacataaatttgggattaaacatgtttgggttcgtatcgcagttccgcagtctactaaatgcatgactttaatcaagtaatttaatttctctgtatttcaatttcctcatttaaaamataaggatattactgttaactgtatggattgtcatgaggattaaacaaaatacattacatgcccttggcacttagtctgtgctgmcaytgtgtaagtctcatgggtacctaagaatgtggagctgcacaggtcatgtgacccagtccagcctacttgctgtagctctcaccaaatggacccactgagatgggaagtctcaatatcttagacgcttacttatgctttgaatttacagttaaaagaaatgacatcactgtcacagggaatttaagggtttgatatttcaatgttacaatgcaagaactcattgtctatttttgccatacatttcgacaattatcaaaatttaagtcttaggtttcttttttccctttataaactttaaagctagaacaagctaatatgtaacagaaaaaaaaattcatttctgttgctgtttaatctgatattatggagaaaactgatgatctatttagatactaaactttgcattaaaacagaatttttcgataaagtatactttctatgaatcctaaaacttcagtatttttattattgttgttttaaagtatcatttttttcagctttctttaactctttttggccataaatcgtaaacttttctatgtaaattactcaaaattctaagtaaatatcttatttcttttacattcttccaaaaatgtaattctttgacatttataaaagttttatttttgtggaaagttaatcataaactcacataagattggaaataggctcaggcaacaggaagagatggaagaaacattttataagattgtgtgcttaaacacactatcaccaaacccccgccccacctgacacccacacacacacctggccatcagttagcttttctgagtaaaatacggcagcacactactcttaacactttcacccagtccggtagtaagcattttccctagtcaatttgggacatttaattggatttagccaatttatgaagaatgtttctgggaaaatgaaaacagcagtaagcagaggccctatttttaagttctcatccaggactacccttacattatacattctttctttatatattatttttatacattctaaccaccctatatgttggttatttcctggtctctcagaacctccccatttggacgatccattcagacgcattcctcagctcttcagcatgtgacacggtagcttccatgacccacaggggtcttcaagactctggtagtggctgggcctgccttcctagatcacctggctaaggaaggaggaaatagctttcctagtacccttgggcccatcatatccatcctgaagttgtgtgtgtacttcctgactgctgctaccaccaattatcttccgggtctggaggaaatggaacactgaccacagcattcctgtacctgcttagatatctcctgcactagacaccctccctaagcaccctatataaagtaactcctaaccacctggtcagtctccatcacttagcttgttttacccagcacactgtaagcaccttaagataaggagcctcgtctgtctttttcaagtcagcatttctactatctggaagagaacctagccaaattcagatactgaatgaataaatgaatgaaagttccctgactgtattcagaacaggagaactacagtcagatagctataaaagtcctactatggcaaagctttatgatgagcaatttgcaaaaattaataatcctgactgagaaaaatagtcaaatgtgacactttacattatgctgataatcatgagatccatgaagtcaataaagatgagtgaaatgtaataacccttttcaagtgttctcctccaccatcaataccttttgagatttatacaagaagcmccaaagaaagaacaagataaactcctctcactgtctctcacccggaaaagagatagagatagaaaatttgaatctatcaggcagacaactcactaacagagaaatcagagagatgtatttcagaaagagcaggaaaagcagtcgacaacttgaaaattaattagatcaaatggcatcttttttttttttttttttttgagacggggtctctctctgtcccccaggctgaagtgcagtgccgcgatctcggctcactgcaagctccacctcacgggttcacaccatttcctgcctcagcctcccgagtagctgggaccacaggcacccgccaccatgcccagctaattttttgtatttttagtagagatgggktttcaccgtgttagccaggatggtctcgatctcctgacctcatgatccacccgcctcagcctcccaaagtgctgggattacaggtgtgagccaccgcgccccgcccaaatggcatgttttttgaaaagcacatgatttactgcttaatctgattatgttgtaatcagtctaaatgtatcacattcctataggctatcagatgcaaacaacgcatttactctccaaccatcaaaaatttaccctttctttgggctgaagaacacccacttcccattagacatgagtctcaggctttgtattcacttgagcctttacaaggtgctacctattaagctgtacggggagaattataggaattttgcatgccactagtatcgatcaatattttaaagtgtaagtatctcatttctaatataataccatgtaaaattaaacatctagtcaaatgtaaaacctgcttgagaggacaaggcaaagagtaactgccacactccttgtcaaagtcaatcattgaatcaagggctcacattaggaattttcttcccaaggtgtaacctctcttaattcgtgactttggtttaaaacactctccctaacaagtgtattgtctgcttaaaagactagtctatattctgtgaagaacttgattttctcattaatagataaaaccctcagagctaaacacaaagcagtgtggtggttcaacaacactacttatgaagaaatactggatttttatttacctggataaaggaaggtttttgaagagactccacagtacctttcctaattatataaaagaatgaatttccagtgtaaatcatgtgaattgacatgtattatgccactgttcaataagacaatatgaagcccaaatgagacagtaaatgaagagatttatcttgggctttgccaagaattgaagagaagctctcatgctcttgctgaagagaaaagttggaatgaccttccttagttatacagagcctcatctttactgccttttagctggcattagtgaatatcaaggtgctccttggagaaattttcctatacagaacataagttcattcccatccatttttccctgcccaatatggtaatgggtgaccttgcacatgaagctaagcccctcttttggccttatgctaaggggacataacagaccctttcccctcttagcctcataagaaaaatgtgagaattgtaactttcttgagccccactagaaaagcaaaagtcatgatgtcatcagcattatttctgacaccaacaaatattcagcattcagtccataggttgttatactcttcagagcaggtcctcaaagtttactgaccgtgacagggggttttgccaattgtgtacactgatgagctatctgggttttttgtttgtttgttttgttttgttttgtttttgagatggagtctccctctgtcccccaggctgtagtgcagtggcgcgatctcagctctgcaagctctgccttccaggttcacgccattctcctgcctcagcctcccgagtagctgggactacaggcacccgccactgcgcccagctaatttttttgtatttttagtagagaccgggtttcaccgtgttagccaggatggtctcaatctcctgacctcgagatccaccgcctcggcctcccaaagtgctgggattacaggcatgagccaccgtgcccggcgatgaactatctgttgaattccatatcaggctgcctggatgttgttaattaactgctcacatggaacacacagcacacagggctgaaaccaggacatgaaaggaatggcccaaagaggaactctgtagtctcctcctgccaatctgtttaacaaatccagatgacactcagaaaatgacaaaattgaaaaatgcacctcaggcattatatcagaaaacacagactgtaatgggaagagagactatggggatgaatacagtatgcccccaacaggtaaggattgaattccaagctaaatccacatagagcatgggaagaagggctataacaaggctcagcaggttccttaacaactgtctgtaaatacaaacgcaaacaaaaaagagaaggcacacagttgaagtctgcaaggagatgcctttgctgtgataaatgagaagtcagaagtgttcaaatgagatcagcaaacactgtgggagggggtttgagagcagggtgtcaacacccttcacagagaggagagaggtcttctcagagatcaakcctgcgtgtgacctgcttcatccccttaggaaacccttgtcacgttcatgctttttcttgcccagcaactgaatttcactgttttctttttctctcctcatctggatctctaatgataataagggtgctttttcttcttaaccatattttatgtccttaatatcactctttcactacttcttaccaacccttctctctgcttaaaattcacgatccagatatcattctgagatgattgtgattatgtaccagggtcaaataaccagatcatataagtctgtcctcactagtatttgtatctgtgatttgacaaaataatagaaagtatgcttcattgtttatttttaattttttaaaatttttgtgagtacttagtaggtgtatatatccacgggatacatgagatgttttgatataggcatgcaaagagacagggtctcaaactcttgggttcaagcaattctcccacctcagcctcccaagtagctgggactataggtgcatgctactatacctggctagaatataggcttcttaaacatgctggaaaatttgaagctggtgtgatggtttcaatcatgacagatttagcacaacactatcaggattaaaagagatattaataggcaggaattagggccaaatcagatgaaatttcacacggaaaaatgaaaagggtccaaagttagggtaaatatgctgcttaaaaacagaatgtgagatctaagggtaaacagaaatacatattaaaaaaattaaaataaaataaaataaacacctttttggtcaacagcgagctaagatcagctgtcaaaaaggatgttgtgatcttaaagtgtaccatgagacgaaagtaattatctcattttattctgagtcaatctgtccagagataatcgcatttagttctaggaacttctcagataataaacagacatacttcagaaggaatcagaaaagattgtgagggcattgtgagacaaatcaagtgatgaacagttgaaggaacagagatgttctgtctgaagaagtaaagattagggaggccataataaggtcttcaagtatttggaagaccatcgtgtagaagaggaattgaacttgctctgtgcagcaccaagagggaaaattgataccaacaggtggaagctataaggaggcactttgagctcaagatagagaaaattttctagcagtcagaactatagtatacagagggaaggggcactcctggaaggcagtgaacttccagtctctgaagggtgtttcagcagatgatgaaggacaattagcctcaaactcagagagatggagaggcactgtctcaaaatttataagagctgcctttgagttagcacctcctataggccaaaagtttacagactttataatcctttcaataaccctaaaagacaagcattgctatactcaattgacagatgttcacagagatgaagtgactcgactaaatactattcagtaaatggtgaattctaaattcaaatccaggtgtaaacttctgccatgccacactggctaaaaaccctcaattaattctgctattaaaaagtctaggccgggcgaggtggctcatacctgtaatcccaccactttgggaggctgaggtgggtggatcacctgaggtcaggagttcaagaccagcctgatcaatatgatgaaacctcgactctactaaaaatacaaaacttagccgggtgtgttggcatgtgcctataatcccagctactcgggagtctgaggcaggagaatcgcttaaacccaggaggcggaggttgcagtgagccgtgatcgtgccattgcactccagcctgggcaacaagagggaaactctgtctcaaaaaaaaagtctaaactcagaccgggttcaatggctcatgcctgcaatcccagcactttgggaggccaaggagggaggattgctcgaacccaggagttcaagaccagcctgggtaacataggaagacccacatctctacaaaaaataaaaaagttagctgggcatggtggtgtgtgcctgtagcccaagctactggggaggctgaaacaggaagatcccttgagcctggggggtcgaggctgcrgtgagctgtgactgcaccgatggactgcctgggcaacagagtgagaccctgtctcaaaaaaaaaaaaaaaaagtcaaatattcaaccagtgggttacacaaacagcatcagccagggaaagatcatcagactagagccagaaaattcccatttgtgtcttacctttacttttatgttttgtgacttgggacaagttactaaacctctctgagtcctttgtttcttcatccgtaaacctttaataacaacatctaccacacaggattttccgtgtaagcacaaaacagatcatctgctctgtaaaagtactttgtaaagtctaaaatgcttttcacaaacagaacattattaatgtttttaggtgagatcaatgcctttatcttcacagaawaatctaaaagacattttagtttgaaatattttcagacaaaataccaaaaacctcattgaagccacttggctcaactggttagaacatagtatctagtgttagcttcacaatttctataaaagaggtgcttaaaagccacaatcttataggaagagaggggagcattaacctgtgaaatcactccctagatggcgccattgaggttacatcaaggccacagtcgtcggtcccatcttttccagaggttcagagcaaaatgtgctgctcctagtgttcaattataccccaggctggctgcctccaaaacacttgctgatgctcacaaatgggtgataatttagtgcaaacccatattattattcacctagatgaagatttaggtgttagtttccagtgataataaatcaaaagcctgctgctcacataaaacagacattggtaaccaggactctcagggttggaaaggacattgaaggtcttctgatccaaccactatctgctacttgttatattaatatgtaagaatccaaaagccatctgtcattcagtgagcatgtgtgacatcctcatgtactggtttaaagcttcccagagcaaatgaatgtctctctaaaggcctgatgattgaccattcccaaacaacccatacaaaatatatcagggactagcagttatggtaaggaacacaggaattattttgctccctctccatgaagtctttgtacagcatagactacacmcacacacacacacacacacacacacacacacacacacacacctcaaacactggcatctccacattcaagcagggattagtattctttgactttctgactctttcaggactttggaaaccaccaaaggtctcttggcaattcccaaactttactaggcagtaggatagcctcataagcttttcaaaaatacaaattcataagcccctcacgaaatcagacttataggtgccagcctggccccatgtggctcatacctgtaatcccagcactttgggaagccaaggtgggcagatcacttgagcccaggaattctagaccagcctgagcaacatggcaaaacatcatctctacaagaaatataaaaattagctaggcacggtggcaggtacctgtggtcccagtaacccaggaggctgaggtgggagcgggagaatcacctgagcccagggaggctgaggccacagtgagcccagattgtgccactgcactccagcctaggcaacagagtgagaccatgtctccaaaaaaaaaaaaaaaaaaatctctgatagaggactcatttggtattatctgcccttgagcagcagagtcaggcttggctgggagctccttccccagccacaggatatagctccaagcaagcctatgatggaagtagttgggcctcttcttttttttttttttttttttttttttgagacggagtcttgctctgtcgcccaggctggaatgcagtggcacgatcttggctcactgcaagctccgcctcctgggttcatgccattctcccacctcagcctcctgcgttgctgggactacaggcacctgccaccacgcccggataacttcttgtatttttagtagagatggggtttcaccatgttagccaggatggttttgatctcctgacctcgtgatctgcccgcctcggcctcccaaagtgctgggattacaggtgtgagccaccacgcccagcagggcctcttcttaaagcatctccgaggcaaagtaagaggcatagggaggggattttcctctgcaggacagtttctagaggtttttctacatgaattaaaaaaaaaaatgagaaagtagtacaaataaaagaaaaattcctgcagtgtcccaccattttgcaaagcattataaagaaatgaaagagttctcctgactatgcccattaatgatagttgtttggatgatggatgaatagacagattagatagattagatagatagatacatagatagataatatataggcagacaccagtaaatttattttgaaaataatattatatccctgtcctcttagagactgcattatagggcagatgaacagcaaaacaaatgactttatttattataaaattaaggcgagctgaatattctccatgtgtcccagccagatacactctccacccctctttgcctggctttgggccacaggagactgacctgtatcaaaagttcctctccttttggttccacttggtttcggtcaaagggaagtactagcaggagggcaggaagggattcaggttggagtactaattaattaatatattaagggcatagcacagtattagctgaataatggtagctacttctattaagaacaaaaacaaaaagtgaagaaggtccctaactaccaagcggtgctttttttactctttctctcagctgctgtctacaatcttcccaatataaatgtgccaatacaaacttgattgttttttaataatgtttacagagaggataacttgtgtgccttgacttctgctttgtagcaagcacaccgaattattcatttagtttggggctctttcttttaaaaagcaatcatcatcttcttgaaagaaatttttattttttccagctatcagtcctgtcagactttagaagttcacaatcatggaagaagagcaaagcaatttagataaaatttcctgttctgaaggaaracttttgttattaaatgtgaggcattcaatagtaactgccagctgtttaatcaaaaagttattgttcattgtggaagaaaaattgaagtttggaaaacaatgggctacaagctcggaaagtgtctgatgaagttccaaatccttttcaaactccaactcatcatttaaactataatggcccatgtctggtaaggtacttcatggatgataataagaaaatcactgagatgactgagatctcccatcctctctttaattatctcctttcttggtggccccttcatgttcaggttacagaatataaattaaagatagttgccagagatgtctcaaataagcctattattaaggacacacaggcgactcctttaatttccaagaccaaatgaatgataaaataaaaattaaaaaggtgagagaattcgaagaaggaaaaaaactgcatagtagtgagacaaagttttgaagaaaactaatgggtaaagaataaacccaagagttagagaccgctattctaaattctggacttaaccactgaacttgggatgtagccttagacaaatcatttccttttcctggattatttccttacctcttacataaagaaaatgatgcctgccctacttacctatttatgttgaggctcaatgaggccatgaacagtaactgctttgaaaatgtcaccaatacaaacataaacaggcataagtgaagtgatactgagtcacctgaatgtttactgattttccacatctttccattgatccagctacatccttttccttatgtccattccatgagataatctggtaaccttttagtaacctcaccttctttgctcaaggtattcaagttgatttctgttacttacaactagagcatcctaactaacacaaaagtatgcaggaagatacgctataaggcaagcaattctaaactcagatgaagcactatgataagtcttggcatgaccactcagcagtacacataaagataacaattctgttcttctcaccatacctggtacttaccttacttacaccctgtgatgtaatcagcattttatagatttagggcaactgaaaagcagaaaccagctcttatttgccttggtatccccagtacctaaagcagctcatgtcacaaaatatatgctcaagaatagttctcatttcacctatttttgcacttatgcactcaaattgtatccatctgatcagttcctgtacacagccatctccctacaactgtacaatgttgatcaaatggatgaactggctcagttgtctctgcctcttacatagattaattgtccatcagcactttgaatactaggttgatgaaaaggttgaaatgcaaattttcatttgaaagaggatgtttggaatagctgaagaattactcaagtaaatgccatacatttccatgcataaatgaaaatttctatgcacattcccctagtctctttaacctctcctcctccctttatatagatatcataaacaatgctctctctctctcagtaacatataactgactgggcattactaggcacttaatactaacacactcaagaaacatcagttaagtaaacaaatgaataaatgaactacttgatgaaatctaaggccttatgagcctctccacttcactttacagaaactgaattgctaattatttgcaattcccaaaagtttcatatactcttttgcttccaaccgctggacccttggttccagacaccttcctagcacttcactggctatataatacaccaacacttaactcagctgtcaaacagggaactgcttcccactcaatctttcctcgagttttcttgaaaatgctacttttgccttgttttgtacattgctgtcaaaatgtctgatggcaacctgaatttttttcctttgtgaggtctttttgccttaagatcatgaaatttcttctcttttatataaaatttaatacttttatgaggatatatctcagagtttattttacagattgattttcccagatttataatggacctactcaatatgtatatttgggttttcttttatttccttgcattgcgatttttaatagctttattgaaatataattatttcatttactcattcatataattcatgtacaattcacccatttaagctatatatttcaatgtttttgatatataacattaattttttaaattgtgatgtttataacaaaaaattaccatttaaccatttttaattgtacaattcagtaacattaattacattcacaatgttatgcaattatcaccactatctatttccttaactttttatcatcccaaacagaaaccctataaccattaagcaataactttccattcaccctccccccagcacttgaaaacctctaatttactttctgtctctatgaatgctcctattctagatatttcatatagatgaaatcttataatatttgtccttttgtgactggcttatttcacttagcacgtgagaatatgatggcttgggagtcatggaggtctgggtttcaatcccacctctaacatgcctcctgcttctaggaccttaaacaggttaaacctccctgatcctactgtctcaaagtcaaaatggaaatgaagatgccttaaaaacatctgctctcacatcacacaggattgttctgaaggtcaaatgagatgctatatgtaaacccctgacacactgtaaacaactgataaatattattcggtccttttcgacatcctctttcttctcttccaccctccctctatttctctgtgtttacctaagtatatatgagtgagggtaaaataaataaatgtctcattcacaatttagaaattttaaaaatggaattttgagactctttctaatatccaaccaaataagtcagccaagcaaccaacgaatatttgattggttgctcctctgtatccaaagtgtgcaggtactggagtagaaggatctcaagagacatgtgattattttctcttaattaaataaccttttggcataggcagaaacaaataaaaataagaaggaaagttattcctccatatgcacaccgtatgctcttaaacacaaatactatgcatccttcaagcccaactctatgcaaactaataataatttgaggatacccagagatcagcaagttcaaactcctcattttgcaaatgatgcccagaaaacggaagttctttcaaacatcaccacagagttgaatagcaagacaaaagctggaacccaagtcttttcatccactggccaggattcactgaattttcgttcataaacgtttcctcctctttctcctcctccttatcctactactgctgctaacaataataataattaacatttgctgactgcttactatgtgcccagctgctttccatgcattacttcagttaaacccatgacatagagtcaatcatcatcttttttttaatgagaaaactgtggcccaaataactgaagcaaaaggaaaccattgagaaattagggatctgaatataaacacagcctttctcttaaacctctgttcattctactttcccctcatttccactggaagtcaagtctcccattttctaatcctataacagttgatctgtgcctttgcttcttttggggccctgagtatttaatgtcttggagttgtgrgtttatgtccattgccccaaagttgtggaaagatattagacgttagatgtgagctccttaaagacccagaattctgtcttgtgcccaacatagccagctatgcatagtaatccttctctcatttattcattcaacaaatattgttgaatgtccactctgtgccaggcatttagccaagtgcttggaactcagcattaaaataagttcgaggagctgatttccttattggaggcaagggttacaggtaggaaagaatgagagacatcataaaattgtaaacaggtaactgatcaagataattttacacaatgaatagtccttcaaagacaataaaagaagatgaggtgattgacgtgataaagagtcatctgctagagggggtgccacctccctccagaagctcatgcacaaggccttccaaggaaatttccaatataaatgycatggccatttccttttagcaacaagtgtcagattatccagacacaaataacaggatttactcttgccaatactgtattctgtgaatgttgaaaaacaaaaggccagaaattggccttttcatctgtttctcagcaccattttgacagcttactccttttggaccacataactttattttccaaaggccttaccagagagtccatcttaccagagtctaatgtcatccctacataatttgtctgtaattagaggagctctcatctgttttccagatgagttggacctgtgggctaaggtgaatagaacaggcggtcctgtggcctcagctttggagggtattttgttaggtcctgttctcctgccagatgtgcttctcattggctgtgctgaggagcaggtgaggatgcagagtcccatctggagacctgaatgctctagcctcaaagccttctgctttccccaattcccacttcaagctcctcgcgcatcacagagatggtaactcctcctttgtgcacggtacattacagtttacataacatttgtacactctttgtcttcttccttgaaggcagggggcaggagggtggtatagacagaagcaagaatgactgccatccccattttactgaaaagaaacccaagattcaagggagttgagaaatacacccaagagcactcagctaggaagtggtgaagccagagagtgagccagggtttctgacttaggatctgtaacagtcagggtcctgtgggaaactcagtatactgtactttggtcatttgcaaagagaataatagattaaacggcattgtttacagaagtacaggcaaggagtacataaactgtgagggatggtggcacctcacagtgtgtaaaaagaagatgggaaaagctcttccctttctggcattaaagagcaaggaagccaaaaagaaccacctaatagggcctgtggctttcagtcaaaggtcacagccagcccaaggtgaccccacagtgaagaagacaggggaatagataccttctcctcctcccttcccctgcctgttcttcctaataaaattcaaaaaaaaatccagatggcaaagaagcccacagatgcagcccatgcaggtcagcctgctcagacacagtagagtgaagggaggggagagaatgtttcccgagaagccaatagaagatactcagctcagactccaaggcttttccagcatcccacctggcctcccacttgagggattattgcaggtgatacctgagcacaccgtcttttgaaggaggtgacattttggttaatcctagtgatttttcatcttacaaatactgggtcacctttttcatgtggtgcttagcaggaatgagctttacagcaagcctcagtcatataatttgtgcatttaacagcttcgtggatcctgcaaaagttgtattcgtcttcatctctagaatctgaaatctagatttcagagctcctgcaagtgaagccttaagctcaactgcagatagagatttccactgctgcatagctctaactccagagaggtccagagcaaccccccaaaactgtcatggatccaacttgcagttaaaggagggcaggaaaataaaaatatcagtgtgtatcaaaaagtcaaggtcaaggagactagtaaagcaaaggtcagaatctcccctgaggtcaggaagggctgtcctgccaatgaggatgttgtacaggaggactggcaggagcagccaggaagctctgaagtcagtaaacagggaaggaatccaagcaagttgccaaactgagtcagtatcaaaatctagggattggtgaactaaaaaggcaagagctgacaggatcaggagataaaagtaagtgtgaagtcaggcttgggtaaaagctgcaatcaggctctggcttagctgggcctgccatggccctttatgtataaggaagacctgtgttgaaagggcctttgagaaggcagcagcaacaggcagacaggtagaggccaggtttcccaaagtgaaggccaacaagattgacccctgccaattgggacgatggcctatggaggcaggaggcactctggcctctcagacccactcatactctttcccctctttgatcaaggccctgggtcttttgaagatgccctgatggcaggaacagccatgtatcaaaatgataaggagatgtcggtcaaaggatatataattacagttagactgtaggagtaagttcacaagatctatagtatggcatggtgactagaattaatgaagtatcttgtagtcttcgaaaaatgcaaagagaagagatgttgtgttcttaccacaaaatttattactatgtgagagaatgcatctgttaattagctagttctaaccattccacaatgtatatatatttcaaacagcctgctctacacaataaatacatacaattttctatttaaaaaatttttttaattgttaaaaaatgactctcgaaataaaaaaattctctccctctccctctccccacagtctccctctgatgcccagccgaggctgggctgtgctgctgccatctcggctcactgcagcctccctgcctgattctcctgcctcagcctgccgagtgcctgcgattgcaggcgcgcgccgccacgcctgactggttttcgtatttttttggtggagacggggtttcactgtgttggccgggctggtctccagctgctaaccgcgagtgatccgccagcttccgcctcccgaggtgccgggattgcagacggagtctcgttcactcagtgctcaatgttgcccaggctsgagtgcagyggcgtgatctcggctagctatggcctccacctcccagccgcctgccttggcctcccagagtgcggagattacagcctctgcccggtcrccaccccgtctgggaagtgaggagcgtctctgcctggctgcccatcgtctgggawgtgaggagcacctctgcccggctgcccagtctgggaggtgaggaccgcctcttcccggccgccatcccgtctgagaagtgaggagcgtctctgcccggctgcccatcrtctgggatgtgaggagcacctctgcccggccgcgaccccgtctgggaggtgaggagcgtctctgcccggccgccccgtctgagaagtgaggagcccctccgcccagcagccaccccttctgggaagtgaggagcgtctccgccyggcagccaccccgtccaggagggaggtggggggcagcccccgcccggccagccgccccgtccgggagggaggtgggggacagcccctgcctggccagctgccccatccgggagggaggtggggggtcagcccccgcccagccagccgccccatccgggagggaggtggggggcgcctccgcccggctgcggccccgtccgggaggtgaggggcgcctctgcccggccaccccttctgggaagtgaggagcccctctgcccggccaccaccccatctaggaggtgtacccaacagctcactgagaacgggccatgatgacgatggcggtttttgtgaaatagaaaagggggaaaggtgggcaaaagagaaatcagattgttgctgtgtctgtgtagaaagaagcagacatgggagacttcattttgttctgtactaagaaaaattcttctgccttgggatgctgttgatctatgaccttacccccaaccctgtgctctctgaaacatgtgctgtgtccacccagggttaaatggattaagggcggtgcaagatgtgctttgttgaacagatgcttgaaggcagcatgctcgttgagagtcatcgccactccctaatctcaagtacgcagggacacaaacactgcggaaggccagggtcctctgcctaggaaagccagagacctttgttcacttgtttatctgctgaccttccctccactattgtcctatgaccctgccaaatcctctgcgagaaacacccaagaatgatcaataaaaaaaaaaaaaaaaaaaaaaaaagcagcagctcaaaagatttttagggcagtgaaactattctgtacgttactatgatgctgtatagatgacacgatacctttgttaaaacccacaaatgtacaataccaagaatgaaccctaatgtaaattatggactttgggtggtaataatgtgtcatagtagattcatcagttgtaacaaagtaccactcttgtgctttgatgttgacagaaagggaagcttgtgcgtgtgtagtgacggggtatatggaaactctccgtacttcctgttcaattttgctatgccaaaacagaactaaaattacttaaaaaaaaaatgactcttgaataaccagatactggtattagcttctgtattttgtccttcagttcacttctgcttttctcagatgagaaagaatcatagtcagatttagcatccgaatcatcatgatggcacatattaaacacttacttaccagacacagtgctaattttccagagaaaagcatctagaaacaatgccaaggaaggcagaatcaaaggacacatagggtgtccctcctgcatgtcacttctgagctactgactcatcccaggcacrgctttatctaaacttctaaagtaaacattatatatccttatagtttcagccactgttattagcaaccaggagtgtcctatttgatctaaatgcactgtcacatttaattctcacaatcacttgagggaggtactctgtccccatcttatgattgagacttagaaaagctaagtaacttggcaagggtagcacatctagtggcagagccagacttgaaattcagttctgcccaactccaaaagctcatgctcggaaccactaaactacactgtctctcattgtgctcacctgatgtctaaccctggccagcactagctccatttcagccacacaaaataagatttagcattatgaccctgctcagagcacctgaccctcatcacaaacccagttcaatcttgttactcccatctcagtgcaggataattgccgtggtctcacctagctatgcagctgagacaggacatgctgattcaagggcaggggctcttggctccctgccctgtttctatagtcactgctgtgtgacaggaaagagagatgtattgtagcccaaagcaggaggctagaggcttgcaggtgagtactgctccacacactaccaagggacaaagcagtcccaggctaccctgcaagaaacaaagcagcctcattcctcctgaatatgttcccgctgcagatcaatagtgaatcaggctgatattccgttaaatgaaaacgcaagttgaagaataatatgtacaatgctatatcattatggagaaaaaaaatgtgtttgtgtatgcaaagaaaatatctgaagaacagaaataaaactgctaataatgaccacttctgtgcaatacgattaagggcagggcaatgggtattgtatatctttaaatactttgcaccttacataatttttaaaaattaaagaaaaacacatccattgatcttcacactaaggctacaccaatatagcctgggagtcatgaaaccctgcccaaagaggttagtctaatgggcttgaatgaggcccttactgtgagcttcaaattttatgaaacagatccacagaatttaaagatggagatatgtcctgtgcaggcaaaacacaagtacccaactctgtttgttctccagcaggggcacacatcccttcaccccacctgtgatcagtttatgtttgtactctatctgtaaatcaccttctcctccactccttcatgcctgccagagctcccgctgacacaggccacatgtaaattcaacttgagagcaaggcacggttcaccttgtgctgttaatcagaccaggaaatcaccaaaagccttatataaattaactgcctccctgagaaagagaacaatactcaaaagttcaaagcaaaaactgctaggattacttcgtcttcacctttccttgtgcctgatattcataaagcacactgaaagttacagcacacatccacatgcaggccctcatttgaacctcatgataccccctgtacaggtggactgagtagaaatgatgcctacacagatgaggagactgaggcaaagaaataacaattcactaatgaagccatcgagaatgtgaggatcagtggccacaagctaggaatccagacccctagagaagctttgccatttattcattcattcaggtatttgcaaatatttgctgattacctattaggtggcagctctatgattggcatttgtgaaacaatggtgagctcatagggtgcttacagcccataggaaaggcagacatcaatcaaatgatcaaaaattactgtgttgaaaagcaaacactattttatggtaaaagtgtaaaacacaagaggcccctttcttttagcctgaaaattaaggatgtataagagtgaacttgacatcctagaaacagcattgtgaagagaggttctgtggcttaagtgaatatgatacctctaaagaactcaaaatcagaaaaaggcagaaaccaatgcaaggagaaactacagaaggaaacgtggactagactatacacaatttttgtaagctatattaaggattgtgacctttatcctaaagcttatcagaggctattaaacaagcgtaattgtgtgttggagtgggtagggaataggatgaccaggtttgcagygttaagtcattatgtatcaacctaatgtccatgaaaaattgccatccatgaaaattactcagaattcaatawkactcctgtgctctcttattagttcctgcaggctctagtacatatctaattaggtgccaataaaagaagcaataacgacaaatgccctcctaaatgggggtctcctactgcccaacccttgatttcaccaccagtagtttataatgagaccttcaattgcaaagtccccttaaagaatacagagaatttgtcaccttgaggtagcgaatatcaaaatttatattggagcagtgtaaaaccacatacgtaacactggagactagtgtaacgtctactccacatttgaagaaatggctgaatggctcatttgcagtcagtcgtgatgtaagattatgtccctggccattacacatcagcatcgagacccacacmargcatacaaatcttacaaggacaatgggccgtatctctgtagtgttgaagtcatgaacctatcaatacttcaaattccaggaaagagggagtctttgaatctaaaaacaacacacataagccttctagcatctaaagaccaactgatcagctatacttggaatttataacaaggtggattttggcctaaccaatgtccgtggaaccccaagtctctagctatgtccagttcttcacggaagctggaggtgcatgccagggcaagctgtctgcagctgctgttggaagggtggtgcagatccaacagtttgagactttggtcacttcagtgtaggtgtgggcctagtccacaatgctttggagcatgtcaacctacagccgaaatgacgaagcaggcacaggtactaacaggggtaaatcacgttcctcaggcaaaatgcaggctaatttttcatctctgggtaataatgcagccgccaaggccttctgccctgggcaatggtacaccttatcagttccccatggttcttttggatcctgtacctgtgccaaagtcacaggggagcttctaataggccacacagacagtacacatgtgccctggaggaggatcccttccttggccattcccctacaaacggttaattgtggaggccacacattaaatacccaaggagtaccatgtaagttatactgcagtccctccccacccccagggggctatgatagccaaccatctgcaaacagcggcttggagagtttatggataagattaggttttctgttccctctgccttcaggggtgttggagcaggcaacaacagatcatcattgtcctcatacctggttggagaaggtcatccttcctgtcacagatccagccatatggcctggtcctacatgggttggtgactaactagctaattctgtaactcttaggtgatttaccaaaaggttaaaccttgataaattgctcagctatcggtgcagattaccataggtattacttccttggtgatcatcatccatattgccctgagttcagctcattagctactttgccaacacttggtatcaaactttatagtgtcagtactaggctggactgcaacagcagtccaggtagcagcagtgctctggctagacctatctgtatactatgcctcatcagaaataggggggtgcacttccttaaacggtgatggctcagggtctaggggtacctcaggctccatggccttatcttgcattaggactacaggcttcaatatctcttgtaactctgctgctaagggacttgtagagtacttcactgctctaagtaggtgtcccactttgctaaagtggatgtctgtgctgtcccagcctgtggggttgttacccatgaatgcacccatcctgctattgggtaagctgtgcacatgacaactgtagcccgtcctgttacgttcttatgagcctgaagggcagcatatgcagttactaactgcatctttatcaaggaatactggagcttggctcccttccatagttgcgacccaaagcctactggtgtattcagtgctccacgcaccgctataggccctaactgaaactatctgtggtcacatgcacatcacgtttaaatggacacccctggctaactacccgtagggcttgtgtctgctgaattgcctgctggctgccagaaagactctctcacctgcatcatctcaatcccaggcataaggagcactgtcacttctaaacctgggcagcgtcctgcagagactgagcatgtacttcccacagtgcagtcagaaacacccatccaactctgccggtgaagatgcgttccttcttggtgctgtgtccttccagctgcttcagtgctttctccacactcacaggagacctgcccactgcctctcacatttccactggggatcatcaaagcagcaccactgccactgggtaccacagcccatgctgaggtcacatagccgagctgggagcctcrgggctgaagaaccactcaccttctcctgccagctatgccaaatgtcatgccagatattaggttgcagcccatgctgaggttcgaggggagtgagtggatgggtggtgaatggctgaaagaacactcggggggctataggcaggtgaaatacggttttattcagcgactctctcatcagcagctctctcacactgtttgcctttatctcggctgcctgctctggttctgcagctcctgccgctcccatgcttacagctgcattccctggcctgcaaggctggctctcccttatacggccaacagcttccctctctccctctggatgcatgctgtatgcacagcatcagcagggcagttataccttttacaaacaataatagcratgagccttcccatgttatggctgtgattatataacaagtggagttatgcacctgtactccaaactcactgagtcactctggcccagatgtctgcctcagcctattcttgaccaaagcacatccatgtaccttacacttagcatctcaaaacctcccatctataagatgcaatcacatccatctcacagagctataaagatcaagtgaatgtatcaatcatctctagagaaacataagacactaacctcaactyactaatgattaagcaaaaattctacattttccttagcgtggtgttatgcttctgaggctaaaatgtcaaagaatacaagaaatttgaatcagcatttccccagcctctttcttgcttgtacttcagccaaaaacagcatcagacctggaaagcagatattagcaaaagtacatkgaaggattagtcagtcaactgctttgctgaggatataccaggactaatcacagcctasggctgtttacctccaatgataataaaattccattctgggtaatacaggcattctaggtgtcccaaagaagccagctgatggccacaacttgaagcytgttagttcaaatgtgtgaaatttgctgtcagaaaagtgacaccctcagaytaatmsactctaatgagtagggatgcgacatggcattcytgagggagagttagagacaccattacacaagccctttaaagagaagagaaattatttccactctaattgccaatgaaaaccctcaggtgtgggtccaggcacattagctggctggctctgcaactctacaacccttgctggcagaaacactcacaacaaactaaaaaggataatytggagagaaaagtcacctagatttggggtttgtgcaggaaaaagagtgcacagaaacattttccgtgcaagcytyttcatcctcacatcctaaccccaatataccacctaaaagaggaatagctgagcagatgcagctataaatctgttttcttgtgtccaacagctctggctgctattatttataacattagtttaattaaagtttccaaggagatagatgaatcttgttacagtagtatagaaaatccgttcttttcaacgacatcagcatccctgatctatctggaaaactaatgcactgtttggaattctttgttttgtttttgtttttgttttttcaattaaaaagtcctcatggctcatgcattttttatccccaatgatcttttccaacaagtgaagcataaaaggaacagagaaaactaatatatgaatgtgtatatgtttttttcaaacagagtttcaccaggtgtattgttctggtttactttctttccttgcttttctctttaaaaaataaccatgcatatccatcaaaaatagagtaaaattacaacaattaagatgcaagcatcaatatttttcctatcagaaaatatatttttctcttgcagcctattttccccctccattcatctatatagacccatgtccatgtaatacaatgacaacatgagatgtgactgaaggcaggtagatgaaatcactatgagttggaaatgaagtcttattttcctctctattctaacacatctcaggcctcatgtatgcaacaaaatgctttctttttaatccactcctcgcctcaggtagccaacaaaccatcagataaaggaaagagtctattgtattttttcccagttctttctatttgcaaacttgaaagcccaggagtgcaagtggatggagaaaaatgcagatcactctctcatcttccatttcaattaatcctttcaccttctatctctctttgccattgaggcaatcgttaacgaaaggcatatttaaacccaccagaaaaaaaaaaaaaagaaaaagttgaaggttcttaaaaattagaaataggtctgctactgatgttaatagaacataggacaaggttaacttggaatccacctagcgaggttgatatgaatacgccacagggtacatagcatgagtagaaatgtgggggctaagtcagaatgagatatccaacactgtaatggtcaggctgccttagcaattaagcagacactctctattttgcctgaaaatctcattttgaaagtattatattggccatctatatctttaacattaactctatttcctgttatttaaatctctgtgacttagcagcatccaaggcttcttttacttcagcattcagaggatgtatgtctttcacagcacaactatccatcatctgcttgctactgtgcactgccctctgtcttgtaggtcaccgagctaccaaggcctccatggccagaaaagcctgcatcccacacaggctgccactgtcacatgtctgaggcagagaactcaggaagaaagagcacaaggtggagagaagaaaaggccagcatccattagcatccaaaagtacatattcagtatctactccagcaagtgatttaaaaaagaaaaagagagagtgagcatccaggagaagtgggctttggtctttgctcatcagcagcatgttgcactgccaactcacatataaattcagatgactgcaaacccctgtaggtccactacagaagtggcactttgaaaaggacaagctaagttgctctccatggtgctaaagggggaggggaatgcaagccctgaaataagacttgtgatgagatagaatcaggaggtacacccagaagggtagaggtggaagaagacttaaaagtcatctagtcctagccccacattttatacttaggaagctaaagcccagagacagtaaaggacttggacttgcccagggtaataccaatttctttcagttcaagttttcagtcaagagaatttttgagctaaaaagccagactttcaaagtagagaggcaaatagtacayattttgctcatccatgtgggctttaggacatccagaaaattagagcaaatgagttccctcatttgtaaagtcaaaactttacatcctttcataaaagccatgataattttgcctcatgagtggtggggagtaagtttctgaaccactcctcacaggaataaaaagggaaagtgggcatgtcactttctcaaagccctgccaggatcaacaaaaaatcttacacaggaggaggtgtttccttccccactctgcctcagttacaaatttttaaagtgattctattggtgtaaaaagcatgcaatactgtgctgcactacagaccagagaactcaaagacaaactactggcaaaccttgcttaggatctggaaagtagaataacctcagaaatctcacattgttcagtgaatctacattacacattatgtcctgaatccatgggatataagccactatttttacagaggtaaaaatttgactaaatgttacccattttcagtacaatatattaaaaccttctctatatgatggtatacatctgttgtgcttaatgatgttatatgttcatacagaagcttaacattttcagaggatttggcctataccctctagctaaattcctaccacaaccctatggtagaagaattcatattactgccattttacagatgcaagcgcagtttctggcatatgaatgagtgaatgaatgaatgaatgagaaaattagacatagatttcttgctttcacactcctgcatcgttacataaaaatcacattttataaatggcaaaaccaagactagggtccaaaatatgtttccatctagattaaaccacggagcgcaaatgcttcaaatatgaaacatggaagacaaatctttccttttcctctcctttcccacacttccttctctgtctctccctacagaccttccctcactaccaactcgatactacttacccatacatggttttctctcaccacactagaattggcactgttatgcctgtgagataaaccttgttctaagcctgactcatgtgactggtacagaatcagattcagatcacataatggtgaaactataaagctgtagagattgtcatgcattttcacctaggctggtaagaaattgagaggttactccaagtcccccaggagcttcccctactgtgatctcccagacctgattgcctctaccaggaatctagcaatacatcatatactgactgccttaccacatctcttaccttgtgctgttacttaaatttacacatgaatatgtcctatcttcctagcttgcttcccatctcttcctagacaacctgaagctgctttgttagtttgacatgaggcatatgctagcttccaattttattttaattaattttgataatgagttgtgctcttgtatttctgtttatgaagcaaagaacatatcagttggagaaccaggagattgagagtctcagcctggctctcttgaaagctgagacctttgatagtcatctcttaatttccctccgcatactacagcagatatgcttgtataaaaccaatgtcatgcattatacttgtgatttaaccacctcaaaaaatacaaggttaaataatatgttggtaagtagttgtggcgctctctagaaggaagatgccatatcaacagatttcattatgaaaagtctacacatataaacagatgctcacatcctgaaattactctgaaattttagatagaaaccttaaattactgactcattcattgatttgtagcaagtttagttttggattctgcatgcttttcaagatcagttgtatgcaaaaattggatgtgctctatggataataaatagcatgtgttaaaagtaaaagataagtatgtttagtctagtctagactaatcacttgttaactctctgtcaaggtgacaatcgggctgcagatgtgtgtgtatgtgccatacacatttgaacaagtctgaaaaaataagagctaagttgaaatgtgatagactgcacttaagagctgaatttttccagcaatgaggcataaggaggttaacacagggtagggatgccggcatattacaaaaagtgctggccaaaggctgggtgaattaaaagccatccatctcttagctgctgaggagctcagctycactgtcacttyasgaccaaratgctgggagttcactgtttccagttctttccactgttcagctgccattgcgagttatcaaatcagcctgcttacagggctcctgtctgcatccaggcttcctctgatacccagggactaggcccaatcactgtgaggggctctggtggtttcagaacgaagttaaaatgactaaatgaataagccaagaacttcctggtggcaaggactcttatttccttgtatcctacacagcctggcagagatagtgtacccaataaataaatttgatgggctgaatgaaaattaaaagttacaaataaagagaaggaaataaaattcattttgttgtgaaagggaaaggttgcttatgcactgaatcccagatgttggtggattctgtcctttgagtaatagagacaggctgtaaagtgagctgagaagggagagggtgaatctaaggaaggtttcttcaggttccattccaggctttgttgccaactcttaatataaaaggtagccggagaaaaacccaaggcaatggagataatcagtctccccacccaactgaatggttccttctatgtttctagcttgaggtaatctgctatccacacatcaggaacttctaactaagcccagctaaacagctgaaacaaggagaaaagtgtctccgtagcaagcagaaagtgttgaactaccaactaaaatagcgtttgcttttcttgtgacaatttgtacaattaggtctgaaaaagctgttcctcaattctgacctaaaaaaataatgtgcgaaatcctgccacattaatattcctcagagcaatggaattatctgggaaatttcttctcgattttagagttctcatggtccctgaaccttctgtagtatctctcccttgggaagactccctggtgtggttgtgaccttgtctttggcagtacatgtcattagcacactatggaggtgacctggagggtgggttagactaaggttttggagatagtttcagactcaaagtttgggttatatgcttattatattatgtgattgacacctagttatttatcttgagcttttctatttccaaatmtgcaaaatgcatctagtaaaactgtccccatatggttatcctaaggaatactattactagaacattacctggcctatagtagaggctcaataaatgtatatcccttctccagcaccaaagtaaagggttccatcaattagatttcacatctttccaagcagctcccaggattagcaatataagacatgtggcagggaaatattagaaaggaacaaactgctcacattgaatcttggccttccctcatgtaccaaataaagtgtcaatggtccccactattgggctaaatagcttagtagtagctagatgcagacactcataggtcaaacttgggtccaaatcctggtgctgccatttattagtagcagggttacagacaaatatataacctcagtttcctcatcttaaaaagaggaaaaactaatagaatgagtatggaataagttaatctatgtaaagtactcagcactgtgcctagcacaatcaacatcaaatgttatctaacatcatctcctttcatactctaatcagcagaacactactgggtgagaggttgagaaaaactctaagagtaacagggatcaaaaaataagaatcacaaagtagtaatggatagctgaaattcactctctgtgagggtggctragactaaaagtgatagaaccagcatcttgatatatgggacagagcttctgctactgtaaagttggcaagttctggctgggaagaaacttgtgaagaaggtaaagtttgtttcgtgcattagacactaccctctccttaatccttttctccttcttaccctccttcaggtaactggtcttccacgacttcatttatttgttgtagcccagcctctccaccaaattccttcccctctttctaaaccagtggtttggaaatgccagtccattcaccaagggtagactgcccgcatggaacctatatggagggcttgttaaaaatattgcttctcaggttccgccctcggggaatctaatccagtaggtcagaggcaaagcctggttatccatttttttaatatgttccccaggtaattcttaggtatagtcagattttggaaccatgtttctagccttttcctacatgaaaatcaaaatttacttttcttatgaccagtctttgggtccattttttctcctgacctacctgaaaaatgtatttgtgtttagagtctaygaatcattaactagcagcaacttcataagttttccctccaagatcttacataaaggacatgttatgccacaagccaaagtatgaaaaatattaagaaaacagaaggaatatttggaataccctcagtcaattctttataaatggcaatgactctaaagaatactgtgaactacagatctcctatcctcttctcactctcctggtagagaggtcatggtttccatgaaggacatacagagtatgaaagtttgaaggcagggtcaaagagctgccattgatatgcagagtaaataacaacaaccaccacaaatgtagactgagcactraaggccaagcaccacctaagaactgctccagagagaagaatgtcaggaaacagagtaaaactcttagaaggaagaaacaaaaaactgcatagcaagaaaacagcagtatctccaggactcttaagttggaaattacgaaactagggttttgtggcctctttctgtcctgtggcttagaagaacaagcagggctcttcctctgcaatcccatttrgacagcatgtgggtggtaggtcacagtgggtcataggagtgttgcctgacaggccactttaattctagagaattgaagggggcaatgagctcttgaaagtgaaaatggatatagcagctaagcattggctttatccaggctgcccagccccagtctgcagtgtacaaaggagctagtggtttctatggaaactctgtccagacatatttattatatctggtggaaaccacaattcttcagaagtctaaaaagcaccttaaataggtcatatcaaaatggaccaagactcacctcaagatggcaaaccttcccttgagcctgacaacagttccctgcccttccaactcttctaaaagagactgcagagctagagtggcaggcatattcaagcatctcctcatgagaaatgcggtctgaagctgactgaccttggaatatctctcctcttgatggtttttggaagggaggctatccccaatatgcctgttctttatcctgggttcaagggagcaagccttgtgtggctgaaaagtcattttaactttgatggcatcattaatgagaatcaacaatgcatgggcactgctcagaatgcaaaaaaaaactctgtaattggactcgggtcactatccataaggatcttcagtgggttatggagagataaaaactttccccttgaacaccattatccagctgtccagccataaatgatccaatagaaaccaatggactccctcattcttcaattttcattaaacctggctccagtgacagacaagggagacaacatttccatcccaccccaacccaaaacctcctgtgaaaccccctrgtcccaccatcccctgacaagctggaaggctcattcctctggagaaaatacctggcatcaattccaaaaggctcagagaacagcctctttaagaagcctccatttggaaaagatatttaagcaaaggtgagcttgatgaagtgaaatagaattagctgcttcagtggcacaggcttctcagattcattccagggtagacaagcttattcgcttcccagtggaacgaactcaacaacaatacatcaccgttaactgtgatcacagctccatggaattccagccagtgcctggagcacactgaggtgcacttactattycccaatctgcaatcaaccttttgtacatttgctcctaatcacgggatacagtttcatcttaatgaactgttttcttatcatattacagttggtcatttcagcatgcctaaggtcccatttggtaggttaaattacaattagggtcccttggtgtttgtttcctggcaagtcttgaaggaatttgatattttttccccttttccattgcttgatttcaagggcagaatcagcaacactcaaagacaaagaaatacctgttacagtcgacatggagcaggagatgagaggcgctaactgacagtgcaaccttgtgccattgtccatctgccatgcggtaaggaagtgcctctgtccttggcttcccattgtgtatgtagtgataccgaatctcatccctcaggccactgctctccagttcaaaatagctgtatgtaaaggaacaaacatttgttttattttagttctggatatcacagccatcatcaatccctcaaccccttactaccaggtctctcacaatctaaaattagctaaacatggcacaaagagccaagacctcaagtcaattcactgtaggacacccaatgaatctattgtctgagaaccctcgtggcaacatcttgagcctctgaaacagagatcaattggtccaccatgaggtaacaagccacagctaattagcaaaactcagtgcagtgtttcttaaatacttcaaagtacaaatcagaaccctcattccatgaatgtctaaaacaggccattcatgtggaatggatctattgatggttattttcagaactattatctttaccttttcaagaattaaagggaaatggaagtcatgttggacatcagggattgaaatacattgtcagaatgaaaagattagtcttttttcttctctgtagacaaaaagatataattgaataacaattcctagataatgagtaggggagaaaaggttgaagctagtcacataggaattagtatttcaaattatcagagaatgaaatatgcaattaagttttttcttttccaggattatgatcctgtttttcaaasccataagaaattcttagccttaccactgtggtctgcacttcagtcataaaatgctacaagcaactttgggacactcctcaggcacacaacagggctagtactttcacaggtgccaaaactattttgtttcctatgcctctcttctgaaatgtgtcattgtcatcaacgttgggcctgatctsactgccagggcttgcactaggtatttcacatatactaatttatcactcaaaaaacctgagactggtattatcttttttaaaaaacttaaaaactgagattaaggattaaacatacccaaaccagayttaaacttagatctaaatttgacagtgtatgcactttctgccagtttgttgcccatcccagaggcatgatgacaaagtggtgaggatagcctcaccaggcactaactccaacaactcattcatatggkcaactccagagcgattagcctagacaggtaactaggcttaacccctagatttggaagggcctgctgcttctattctaatccactgagctggctaaccccacaagccaaagggtatttaatctaaaagacaaaatgyatcttctatgaggaatgaaatgaatatatcaggaaactcagcgtctattgtgcctgaatcccaaaagtcatgccaaagaacaaatacrtatttcttgctcatctktcacagatctttccaaagtaaacagtgaagggcaagcagagagtcaagaccagcctctgacccacctcatttgcaccagtacaaagaatcatgcccaaggtcataaactaaaagaggttatttataccatagcagccagcttctaggcccaggttcatacttattagtaataatttatgtaatacatactttataagactgcacaaaaggaaatgctttaacaaagaagacatttattttaagggaattctccagtttcttctaagttgttagaacactgaagaatcaaacaatcrgagaacttagaggtcaagaagatgttacagactattggmcattcattaattcattcaatatgtctttactgaacacataatgaaaaactaaaaaggggtttaaaatatatatcccaygtctgaaggtgctttgtgaactagtgaagaaggaagtaaaatatgtccctccccacggcccccccaaaaaaagggtgraaaatggcctaaaaggaacaaatgaggaggcaagaaaagtcatttaatgaatgattgtcatgtgccargaatatggcaagtgctttcatagacatcatctttttaatttctttaaggtagatttcattatccctattttatagatgatcaaagatattaagtatcttgcccaagaccatttagcacctgtatagaaatgcaccacgagcttatatttgagatcctaccaggattcacacatcatgagaaatctctcaattactttactttgaccaataagcaattactkggggaagggacatgaccttgaaagggcttcaatcaatgacaattagaaatactcacagaagtcacctgctggaatcattaaagagggaggcaaatacatttaaccagatttcatcattattcttggggttgtggcctcattgagcaagtgttcaatgtattataaacagatctcttaaagatcactttataaagcactggagtcagtgattacattggggtaatcacaaatatatagctaggagaaaagaagtctgtcctaatgtcaggcaaatgatacttttatcttagactaaagtttctggccacatcctgcacatattcaaaaagtgctgcatctcatgcaacttggatgaaaatcaagatgatatatttttgaaaacacatgtcagataactgctgaagcagccttagcaataataaaaacactggatggctaagtgacatctggataaaattctttcatgagggctaggaggaaaataaggcaatatttccaggcagtaatgctctacaaataaagatgtgaggcaactctgagcagaaagtcatttggcctgatgggatttggctgtagcctggagggaagactcatgttttctagtagaaccttgtgactcagggtggtctgtagaacaccaatagcagcatcacctgtggaaattcagattattgggataaccccaaggtctactgcagcagaatctgtattccaacaaaactcccagatgattcatgttctatgtttacatctgtgtttaagaagcactatagtagtatgccaggtgttgccttacttcctggccagctggtcttgatgaagggagcagaagtctgacgctacgagcaagtgaataggagccacgtggcgctgccaggtagaaggaggacactggaagtgacagtaggctgatctagtgagcaatctacccctcaccagtcctcattcttcaggactcaggtgtattggggtcttttcaagagtctctggggagggcagctgtataaatgataaaattataagccagattttgtaagcaaaagattttgcaagcccttagccttggacctcagccaagtgtgttgttccaacaaactgccttcgctcccagaaaagtctgctcawcctgcaaatatcggaaaacagcagtgatattccctcttctgtttcaagccaagcttccctggctccttcctttatactcccatctccatctaaactatgagcccctcctggacaaggattctgccttcttcctctttgcagccttccccatgttggtcaccatgcgctaggcatggtcaaatgaatcaattttccacttaaatacagcatccaggaataaaggcacttgtacaratgtggtctaatgcaaagtacagtgacactatcacctgctttgctctgagctgtgcacaactacgcctacactgactttcccatcaactaacaccccaagaccttgaacacaaaatgttatgaaggcaaatcttttccaacctgtatttacttagctgaattctgtaagcccaggcctttgcttaagtrcaaggtagaccctacccagaatcaacatgcataattcctcaaaggtccacccttgggtatcaggtacaatcagtattatcatgaamtgaagtcgattttcatgagactatctgaattccttagtagatctggaaataaattcaggaacaataattctaaaaatataggtagataaagatcaatcaagttatttttattaaaatttttatcattttccccaaaattgataccaaagtatcctattttgagattacatacataatattaaaatatataatataattttatatttatatatttataataaaattttatattcatatatttatataaaattttatatttatataatatataaaatatattatattttatatatagaacagaagggctagatatattcaaaatgttaaagtgattattgctggatgaattakgtggcttctgtgtacaagagtgaaaacagtaaaagttaattttagatagcatccagcactaaatcacaagtaaaggtaaaacatttcttagaaaaggtctcttttccagttattctacaaggatatatactagctattcagagaaatatatcacacccaaagagctccagagttagtgcagtacctgcttacattccaacaatgatttttctgtggccmtgaacaaaccattgcttcctaggagtctgggtggggaggtcaaagcaaaatggatttgggaaacaagaagataccctttcccagcgtgtacccctagcaggactctccagatagagagaaacccaggcaggtgtccagctactttctataaaaggaataagccaccacatatagagagagagtacctgggtagatcatttccacaaatcctggaaaatcctaaagatgatgaaaaaaataagtttcccagcatagtgcctacaattttgtaagacctcaataaagggtaactctatttttatgggcaataataataactatgataacaaaaacaatatagctaacattatttatgtaataatagctaatacttagtgagtactaatcattactaggagaactgcctttaggtctgtatatttcatatcaaaataattcctaccacaaacctgtaagatattttacttgttttaacaaatatttctatagtagtgactatgggccaggcactagtctgcaaatatttactcatgtaatcctsgtaacaaccttaaaaattaccaactattatcatccctattttataaaagatgaaaccaaagtacagaaagattaaataacttgcccaactttgtatgggtagataagaacagattcaggatttaaacaaaagcagtctagttccaggctcactaggtacagtggcatgatcacatcagagtcagaggacaaaacagttcaagtgaactcaggcagcctccattcatggttctcatgatgccctcagtctaggtatgctgccaagtcagactactgcagacccaggtgccagccctcattctttatgctaatctcatcactctggaaagaaatgctacagttgttcatgctgaagctctttttttttttttttaaacggagtctcactctgttgcccaggctgtagtggcaccatcytggctcactgcaacctscacctcccatgttcaagccattcttctggctcagcctcctgagtagctgggattacaggcaccccaccaccatgcctggttaatttttgtatttttagtagagacagggtttcaccattttggccaggctggtctcgaactcctgacctcaagtgatccgcccacctsggcctcccaaactgctgggattagaggcatgagccaccgcacccagcccatgctgaagctcctgtctctttcctggtcctaagtccactgtttggctaataaagagattaagccaacaacacaaggcaggtataccgtgccccaccttagaccaggggtctcaatggctatgtgtcctgaaaaagaggcagtaccacagcttttaagtaaatagtagtgggactactgaagcttgagttgcaatcttaaacctgccagacaaaccatgtaatttttggcacatcatgtccctgcccctctgtgtctcagttttttaatgtgtcttaaataaactaattatatctgatccgcaaagccctaggattcctcaaaaggctcttagagtgtatggcagagggaaaagatgaggcctataaccttttttaaccagagyaacttcactgccatctattacataaattggagtttcctgtaagatttcctctggctaaaagagatccacctccaaaaatagttttaaactattgaactaaataatttttaaagtccagctcaggtctaaattcctagaattcttatgctaatttgcatctgattggtcaattcgtttcattctattcctgatattaygtcagcattcaggctcctgactccttatcagcctggaggagagaggaaggagaggtaagtgtagcagatgtagccaatatctataccccgccttctccctgggcactgggcacatactaaaatatattccccagttcccttgaatctaggagggaccacatgagtagctgtcaccaaaaaaaaaaaaaaaaaacatgagcagaggtgctgtgtattatgtccaggccaaaacagttaagagaggatgtgccttatccacacaagtagcagacgtccagtggagaattctgaggccttattgggtggtggcaccatatggtggaaaaagtctgggtctataaatgacttcatggagcagagatacctttcctcaygcagattaacattgaactgggaagtaaacaaaaatmaacttttactgataataaccagtgaaatttagagattactagtctaccttgagtcagtaaagagaggtacagaaacatgaaaccgaagaaaggcaaaaagaaraagtgctgaaaagtaacaatgggcacaagttattgctagtctataagtaaaaagaaatggcagcaggcatgaacactgtcatctcctgtcctgtgtatcacagataacctgaattacatggcttaatattctgttgggaaaactgtattttgagacacaatatctcccatctggcatactcttctacaatgcgaatttcacattccttaccttgaaaggtgggaactgtgtctcctccccttgaacctggatgaacttgtaagtactttaagggcaaaagtaatgcttggtgaattccataaatgtaaaaatgcagtttctgtcttgtttaccagaacacttgtgctttaatccctaagtcaccttgtaagaagtccaactaccctgaggccaccttgctgtgaggaagtccagaccgtactggggaggtggcatgtaggtgctttagttgacaaccccaactgggatcccagccaacagccattataaacaccagctttatgagtgaaaacacctccagctggcctgcccagctgtccactcttctcactgaagccacaaaagtggtagaatagagataagccatcttttctgggctctgtccaaattcctgatccacagaaactgtgagcaaaagttttggggtagttttttttatacatcaatagaaactggaacactctaacttcaggtatacagatttttattatacctttaaaaataaaaactataacttaagtatgtttctactaaatgcctgggtcattggccagataaccaaatctcaaaatgttgattttctgcttataaatagcaccacagatatataactatacattttcttttaacttataaaaatggaattctaccaaaaatgtaatttaatataaataaaccattatatgttttaaaatacatggttttcagaagctacttaaagaaataaataccttaggactactttgatacctttctcattaatctattatttttcttgtatcaaacccaaacattttggcctcaagcctcttgtttacacaaatggaagtggccccgttggtggttctttcacaaatcagatatctttgggttccaggtccatgtgccctttaaggctacagagctatttgactaaactaaagtcctgattttcccagacaaacttctggtactctcaacttctgtttcctttattcagagcaatatggaaacagaatatataccagaaaaaaatatgccagatgtaaagaggcttcagaacccagatatcttgtgatcaatccctcccctctgccattcaatccatgtgtgaatgtgggcaggacacagcatttccctaagccttcttttcttcatctagttgaaaataaacatctacttcacagatttcttttgagaataaaatgacatacgtttgtaaattgccttacaaactgcctagtatccaacactgattatgatttcccttcatctttctatatacatgaaaattaactgccttacaaaggtgtgatgctgctgaaagcatacgcattctgccttttcttagaaagaagtgcttttctgtctctccctttctcttgtttagactagacctggtgatttttacttgtagttgtaaagttacatattagttctgtactcaatcctcttagcaaacatatagcaagagattaatcgtgacagcaattacaaactgcctttgttattgaaaataaaacactcactgttaaatgaaatgtaaaattcaggctctttatgcccattcaaaactgttctattacactctttaaaaatccacatggtattagccatgctgtatttaacaaagtaaaggctggcttctaaattccctagagaaccaggaaaaatacatgaaacttcaggcaagttaagatagaaaaataaaattagtggcagaatacactttaaaaaaaaaataagctaatttagcaggacaaggggagaggaatcatttggttttgattgtcaaggcctgcaaataaagtcaaataaaaacatttattaagcaaccaagccgaaggcactaagcttggaattgcacaactgcatcttaagactaaggtataactttggatctccaggaactcaaaattaagatgtttatgaatagcaagatttaggaaataggcactaaatatatagtggtgkttgtagttgtagtggtaatggtaattgtactaatgaccaaaacatatgtagcactttctatacttgtttctaaattttatctaaaatgcttaaagaagaaatattattgttcccaaacaagaaatataatcttcagttttctaaatttttttatttctattgttgagaaataaactgatatatctataaaggtactcagtgaaaaatttccctcccatcctgtacccagtcttctcagtatccaacaaccctcataggcaactagtgttggcgtcccatgtatttgtacaaagttttttatgataaactcttttacaatagttttatatttgcagaaaattacaaaartagagtttccacatagcccacacccagtctgccctattaagaaccaatattaatagattattaaccaagtctatattttatttagattttcttagttttcacctaataccctttttaggttccacactcttatctaggatgctacgatacatttgtttgtcatgcctcctcaggctccttatagctgtgccagttcagacttgccttgtttttttatgaccttgacggttttgaggagtactggccagatatttggtaaaatatctgacaattgggatttgtctaatttttctcataattatactagggttgtcacttttggggaggaatgccatagaagtaatgtgcaattctcacagtatcgtatctaagaatgcattctactacatgacatcactattgatgttactatcagggttcatctccctggctaagtgttggtcagttttctctgttataaaaatactcttccccctaccagttttatactgtcctctttggaaggaagacaccctgtggagctcacacttaaggagtggggagttatattccacctccttgaggatggaatattgaaatgaaaagattcattttacataaattacttagaattttactgcatgggagatttatctattctcatttatttatttattcaaacacttattatatcagtgtagactcatgggttatcattttttactttgggttacaatccaacactgtttatttttttgctcaaattgttccagctttagctgttggacgtttttcagctagtttctttgatttactcccatcatgtttcttgttttgttttattttgttttgagcatttccttactttctagtactacaagatgctcaaggctcatcttatatatttcctgacccaatcctaaaatcaaccatctctccaaggaaggcttgttccttctactggagaatggtatgcgaaatcaagatttggccactatgtgtgctcatggctacaaggtattgctgcttctgagctctctcagccaacagaacaaagaaatatatgtgtgtgtataacaatcagtatatatacacatatctataaatatttctataaatatttctatatgtatctatttgtatctaaagtaagctaaacatgaattcatactgatgtcttaaactctaatctgttatcacatagataattctagtctctgtctcatgcttatctgtaatctcccatgatctaccatcaatttacttaattaattattcactttctgtatacacgtatagtggttttaatatcattaaccaataccctcaggtaaacaactktatcaactcaagtgaagtgtctatatacagttccttccgcctttagtcctacatacgccattaatttccaaagttccggaagtcagctcctatttccccaatccccgttgttgaggttatttcacacatttataatacagttagatattctgttacattctgaattccatcctgggatctcttaacttcctaaatgatttttttaaatatgtacacattgaggtttactctctgtgctgtaaggttctgtggcttttgacatatgcatagtgtcatgtgtccaccattacagaattacacccaatagttccactgcctaaaaaattcctgtttttcacctatttagctctcccctaactcccaaagccctggaaatcattaatctgtttgttatctttttttaatcttttttttggctttttccagagtgtcatataaatggaatgatacagtattcagccttttcagattgggttctttcacttagtaacatgcattaaagattcatccaaataggatcagccataaaaaaaaagtttcacctgtgtctttgcatggcttaatcatgcgttgtttttttttatagctgagtaatacttcatcatatacatgtaccacagtttatccatttacttattgaaggacttggttgcttcctgtttgcaggattttttgtgaaaatacattttcaaatcaactgagtaaatacctagaagtgcaattccttgattttgtgataagactatgtttagctttgtaagaaactgccaaactgtcttccaaaggggccgcactacattacactcagaccagcaataaacaaggattcctgttgctattcattcccaccagcaattggtattgttggggtttttttttttttttggattttacccattctaattggtgtgtaatggtatatcattgttttaattagcatttccctaatgataaatgatattgagcattgtaatatgcttatttcctattcacatatcttctttagtaagatgtctattcagatattttgcctatttttaaaaattggtttgtttacttattgttgagtttacttattgttgagtttcaattgttcttatatatgttggatataaatccttcctcaaatgtgtgtttttcaaatatttctcccaatctataacttgtttttttaatctcttaataatctttctggtagagcagaaggcttaaggtttaataaaaatctaacttaacaactttttcttccatggatcatactattcatgttgtacctaaaagctcatcactgaaccgaaagttatgtagattttctcctatgttttcttttaggatttttacagttttgcattttacagtaaagtacataatctattttgagttaatttatgtaaaaggcatagggtctttgtccagttaattcttttgaatacgaatgtcccattgtgcaagcatcattttttaggaagaaaagaacgttttttccaaaggtttcttatgctatgaaagcaagtataaacatactattttgtcccacctctttaacacaaatggtagcagagtattctcactgttccatacttttttcaattaatgtaataagaaaactttcttatacacagagcattttctttatttttactgttttcaatttgatacatattctcccactcaaaattaaaatcactcacttatctacaacacaaattcaaattacaactaggtaaaggcccattttctcaaggctaagccaggcttacatactgtgaaagcaagattgaaaatcatatatgcaaagaaggcactaagtgtaaagataagtaagcaacaagcacttacttaatacaaagtatgcctcttgtcaaagaatttacatgtcactcgataaaataaaaacttacggaaagatagacaacaatacatccttgacctttaaaacgaggagaggagatccaatcttgaacggtgatgtgagaacgtttcaaaaagaagctagatgtagaagaatgacctaaactggagtgagatgggtaagagaagtgcttcaggagtggggaaaatgtaaaaacatggaggaagaaatgtgtctggcatgctcaggcaacaaagaaagaagaggtatgaacagcactgacgatgtacacaaacagatcagaggagttgtgaagcaacagaaaggtaagttggggctagattcatagaaccaaccactgacatatggcccttttcctacagcctagcagttctcaaaccattttatgttaggactgataggcaggtaatgttcaaacactcccacgggtgtcaccagttatgcaaaatttgttttcttacctctaactccagtcctttctccacttctcagaaagtgcatcatatcagtggctctatggaccctgactccactctaataagttagggtgggttttttttgtttgttttttgtttttttttttgagacggagtctctctgttgcccaggctggagttcagtggcgtgatctcagctcactgcaaactctgcctcctgggttcacaccattctcctgcctcagcctccctagtagctgggactacaggtgcccgccaccacacccagctaatttttttgtatgtttagtagagatggggtttcaccatgttagccaggagggtgcttttttacataaataaatcacaaatttatatctccagtctagacctgtcttctgaactgcttacttgcataaccaactacctactcaacatctctcccggaataccccaaactcaatactcgcaacacataactcctaattctttccccaaaacctgggcctcatccattatatcctatatcagaacagaagctaaaaacctaagcattgtctttgacacctttctctccccagcacctgatgtgcacaccatcagcaagttctatcgcttctgttccaaagtatctaccacatttatccattccaaatctccttcacagctatcatccttatcttatccaccaacatctactactagcaactatatagattcctatcaggtctcaccgaatccacgccggcccattccaatctattctacagacaaagttacctttttaaaacaagaatccaatcatattatcgacttcttccaagcacccccacttccaagcttaaaatccatcagtgtcttcttattactattgagctcaagcctagaagtcttaggcatgcgcttcaggaaactacatgctttagcccctgcctatctttccagtgtcagctttctcactctctatcttgccctctacacaccaacgttctttcaagtcttcaaacataccacgatccctcccactacaatgcacttgctccaactacctggaaggctcttatcccattatttccctagctaacttctactcattcagctctcactttaaatgtcacctccccaggaagtccattgacttgcactccccaccaccacatagggtttttttaaataagaatatgctcctttccttcacagctatctctgtacttaaatatttttctcattattttgttaacatctgtctcccactggataagctttaggaacacatggactatatctgtttttctcaccatgttatcttcagagcctagcataacacttagcatacttgtagtgacttaataaatatttttggaataaatgaataaatatagtaatatctggtttgtagtaacagtaacaaattacaggtggcatgccttagtgctgattgtgatacaacaaagggttgtgacattgcagttcacagtcactcttatagaaaacaagttactcatcaaggagataattcagtaaaagcaccatttaaataataataataataataatggctaacatttatcaagtcttaccacataccactttagttattactttatatacaatattgaagtaaattcttggaacaaccctctagaaggaggtactattatcatcttcatttaattagtgaagaaagcaagtcagagagaagttaaatgatgaccaaagacacaaaactaggacaatgatgcctaagccaggccctcttggaagaaagaactataagaatcaacacagaccactctgtcccataactgaaatttccactacccataagagtcactgggaaggctgacatcattagcagagcgttcagtgggatatgaggccagccaccatgagctggaaatgaactacccttaacagaaccaacatggaaccctcctttgttcctggtgctgacggctccacagtactggaggatgagagtgggggttgtaggaaacgtgttctagtggctgcttctgttaggaagacttgagctctcaataaatatagtaagataaattttatggtaaagtacttatcataactagcatgctataagaactcaataaatgtcagctattattattgtcatcattatttaaatgttaattttcctgaattgcctccttgataagaaacttttattttctacagtgattctcagcttctatgtcaaggcagtttgatgtatcaccatcatctgtgagatgtgccatatgtaatttattactgctaataaaagccagaggttcattaaggtattcattcatttatttcaaaaatattaagtctctacaatttgctaggtgctttgctaggttctaaagacacaatgatgaacaaaaacagatatgatccatgtgttcacagagcttacaatccagtgggagacagatgttaacaaaataatcacactaataaatgtaaaattgaaaacggataagtaccgcgagagaacagaacatggttctgtgacaaagcctggttcagtttaagtcacactgggataaagcaacccagcatgaaaagcccaggctaaacatgagcattgtgaagagtctcataaaagtgtacggtcactaagaagaacagtgcttaggaatgagcttagaagatgcagcccagatgggcctaagtggtaacggtcattcatagtgagacactgaaacaggtgagggctatgtagtaaatatctcagggggccattagtaagaccagtgtagcaagctcccacccagcccacttgctattacaggagcctcctccacacccagtatcactgctagtggaaataatgactaaacattcccaccccctacgctgaattccctgttccctcctcaggagaggacacctggatcaggtgaattcatctataaaatctatttgcctagagctaatatatgtaagtgaacatttgcctaaagcagctctatctgaaaccaaatttgacaaaaaccaatttaccttcctatcacatgtgaattcttataaatttcacaaacatgaatttttatgttaatagtactattaggggaaattaccattaagtaaactggccgttaggtaaattgattttagaatcatttattttgggcaaacttgaaacacctaagcccaatctgcagcagttcaaaaaagtagatgagatggctckgtgtcatagggctttctctcactgtcaataaaaccctagaaagctaatatatccagggtcccccccaccttccaaaacaactagtgggcttcaaaattaatcaacttatcctgtgctaccataattcctgttatgttcttcatctccacaatgtccactaagagctgaaagagcttcctggccaccatcatcatgaagctgcctttatcaaatttttgataagctcaattcattcaggtatcaagaaggcagagccattgtaaacactttaaaagtgttcctcgaacgtgaaggtgcacatgagtcaacttgtcaaaatgcaggctctgattcagaaggtctgctggggtctgagatatggcatttctagtaagccccaggtgatggtcttgctgctggtttgcaggccacaccatgagcagcaaggtcttacaagatgagtacgattgttaagatgtgcaggttgaactggagatgaaatttcctagatattagaaggtattcttctctgatcttggacataagaatgcaagaagatatcagaaacttactcacatgttcagtggagtttgaaacagtgacgcaaactttctctgagagagtttgccaaacaatgactctcaaacactaagaaagcttcaaaagtcaagttccctaaaaaggtgattgctatgattggatatggtttgtccccaccaaaactcatgttgaaatttgatctccagtgtggtggtgttggggggtggggcctagtgggaagtgtttggatcatatgggtgtatctctcataaatgaatgggtgcctttcacatagtagtgagttctcgctatcctgagactggaaaagttctcacaggaacagattagtgatggatttgtgatagaataattgttttccacataaggaattttacaaatcacataaaatatatccctgtctaccttggaaatgcattcttaagaaaagagttcccctctttttattacaccaagagtctacaaaagctatttcaggagtcaggtgtggtgacatgcctgtaatcccagcactttgggagtctgaggcaggcagatcatctcaggtcatgacttcaataccagcctggccaacatggtgaaaccctgtctctactaaaaatacaaaaaattagccaggagtgttggcacacacctgtaatcccagctacttgggaggctgaggcaggagagttgcttgaacccaggaggcagagggcagaagagagagcaaaaagaagaccaggtattactgaggtgttgctctccattctttctccttcttccataaacagacccacaggaacacaccttctcacttcagtgattcaaaagcagtttctcagttgagggctggaaaaaaacttttttttttttttgagatggtgtctcactctgtcaccagtctgggtctcggctcactacaacctccatctcccaagttcaagcaattctcctgcctcagcctcccaagtagctgagattacaggcacgcaccaccatacccagctaatttttgtatttttagtagagacagggtttcaccatgtttgccaggatggtgtcgatctcttgacctcgtggtccacctgcctcagcctcccaaggtggggggattacaggcatgagccactgcgcccagccaaaatcctttactactaatttctttaattacaaaatgaaaaataagaacttcacagtgaagaatcctggcaggctccaccttaaccaagcaatcaaggataatatcatcagtaataagatatatcaatataaggaatcctttcacgtgatgcacagagaaaaagcaacatcatttctatggtatccttgccaaaaaaaaayaataataacttaatcatgaggaaatgtcagaaactcaaactaagggccattctacaaaataactggccatactcttcaaaagtgtcaaagtcatgaagataggaaagtctgacaaattgtaacatttttgagattaagaagaaatagcaactaaatgaaatgtgggctggacaagatcctgaaacagaaaaaatcctatattcattaaaaaaaaacctggcaaaattcaaacaagatgtggaatttgattaatagtcctgcagcaggccaggtgcagtggctcacacctgtaatcccaacactttgagaggccgaggcaggtggatcatgaggtcaggcattggagaccagcctggccaagatagtgaaacctcttctctactaaaaaatacaaaaattagccaggtgtggtggcgggtgcctgtaatctcagctactcaggaggctgaagcaggagaattgcttgaacctgagaggtggaggttgcagtgagccgcgattgcaccactgcactctagcgtgggcaacagaacaagactccgtctcaaaaaaaaaaaaaaaaaaaaatagtcctgcagcaaggtcaatttcctgattttcataattttatcatggttacgtaagatgttaatattagaggaaactgggtgagagatatacaagacttgctgtatcatttttgcaacttcctaaaattaatgtaaaagaaaaagttaaaaaaataaatcactgtcttctctcctaagaggcytagccaaggaagccaaaccagtgatcgacatcccaatggaaaaatgtattttatcttttggacttgcaaaaaaggaaagactggatcctctggactttctcttttgaatcatagttttttcccaataaaatcttggctcatggttctcatcttcctcacggattgagttattcttataataaattaacagaagccatccattcacccaggttagaattgtgaaatccaccttctacctgtcacagttgcagaaaaatgaaaacttaagaacagatagaaagtgagacactaaaactgactgaaaagaaaaaacaaatgatgagcataaaacagcattaaaaatattgagttctcctgtcctacgtgagactgggtggacatctcagagtgggaaggccagaaggcaggcagaagtcagaatatagtagatcatgaattactgggtaagaggaaccccaagacagttccacaaatcccttacctgcagcgatcccaaacaagaattgagcatgaacaagctccctaggttaaattttagaaaagtgctaggaaaatggctcctcataccaatcattaaggtaatgacaaacttgagagttttttcaattattaactctcttctgggtttctagtgtttgcaagttatatgtggagactacatttcaaatatggctaattttaatagatattccaagagtagaacatgcaagattaacaagatattcagaatatctcatttaaatcatgccctttaaacttaggacagaaagcgtgggatctaaataataataacatttgacaattattgagtgcctatgtgccagacaytgtcttaaatccttaaagtatgcccattgggcagatatgattatacctagkttacagatgaagaagctgaagttcaaagatataaagtcatccaagaaaatacaaccagtaagtggtagatccaagatagaaacccaagtttatataatactaaagatgccctttctgctccatgacactatgtctaggatgttgtaaaggaaatgaagtttctagcaccaataaagagatgctgaggctgttgggagtaggtagcatagagtcaacagcggttagcagtctccctttgggactaagatatttttaatctatggtgcccatcacaacagaaggaagtcacttaaacagttttgcacaacctcatcactcccccacagagaatattgtgtttttaaaaataagatagtacacattaacttagggtggaagaaaatcataaccaatttacttttcttcttggcacagagctaggactcatttcccagcctttcttgctaataatactaggtgtggccatatgcttgagttccggacaatgaaatgtcagcagaagtaattgatacatgtgtactgcttccaaggctgaccctaaacctcctacatgcaatcctctttctggttgctggaataaagacaaccctcagaaacacctggaataccacatgttgaagatggaagaatgacgaagtggacagagtctaggcctctaactttccactagaagaagagcttcccaggacagatacctagccagaaacacctgaattggtcttttatgtgagcaacatataaatatggtacatccctagctaaaaccgtcaatgagaaatagttcctaattataagccttgaaaatccctccaagccatacagaaagaaagacttactttctcctgcttcatttgataacacaataatgagcactgacagtatctacagagctttggcacaagaataaaaacataagtttactttgacactggtcactcaggctcttccaatcatagtataagggggtccatggaattggaaattaracattaatgttcgtgtcttggcaggcactattagaatccccatcttaacacatgaaaatatttcgactcagataaaccaagccatggttctttccgcactcctattgcaaaaccagggctgtgtcttggcaattccagcataaacctctcaaaggtattatagttaaactaactgccagtgagcaatagagccagatctgacactcaggtcttctgggtgaatgtgttatcgcatatcgaaaacaattaacacacaaaagtataccttcagcaaatgttagttcccttcccttcaactcagctaaatataatctctctactgacgtccagtctgtctcactcctccatgcaaaggtcttgttcacctgaacaagcaaatttaagatgtatcaggcaaataccgagattagttccactaaggctgattcttgcttggaggggtttttatggcaataacttcagggaaggccagcttctataggtcagcctttgggtgattttcctgaaggggtgtcaatcccccagccggttcctaatccagaattgtgcaataaaaaataattaaccagagaggagtgtccagagaggagttcaggaccctgtgagtgaaaatctgaagaatgttggaggcagagaatgccagctgtcccctggtgtgcactctcccctttcctttagtaattgaatcttagtgaagcacacggccatctagaataaaggtcacattcaccatcttccttacagctaggcgtggtcatgagattaagctctcaccagtgggacatgagtgaaagtaatgcatgtaaggagaatgctcttgacttcttcttgttctccttcatgctggcatagtgaggtaatgggactgaatcatcaaggactacaggcagagggccataatatagaagaacctagtttctcggtcctgtaaagttgtcacataaactctggactactatattagtccattctcatgctgctaataaagacgtacccgagactgggtaatttataaaagaaagaggtttgaaacacagttcagcatggctggggaggcctcaggaaacttatgatcatgatggaaaaagcagcaaacacatccttcttcacatggtggtaggaagaagaagtgcagagcaaagtggggaaagccccttataaaactatcagatcttgtgagaactcactcactatcacaagaacagcatgggggaccacctccattatctaatcacctcccacaaggtccctctccaaacacatgggaattacaattcaagatgagatttgggtggggacatagagccggaccatatcattccacccctggcccctcccaggtttgaaatgtgtttctcacatttcaaaacacaaatatgccttcccaacagttccccaaagtcttaacttatttcagcatttgcccaaaagtccaagtccatattctyatctgagataatgtaagttccttccacctatgagcctgtacaatgaaaagcaagttagttacttcctagatacaatggaggtacaggtattggcttaatacacccattccaaagggagaaattagcaaaaacaaagaggctgcaggcccatgcaagttcgaaatccaatgaggcaataatcaaatcttaaagctccaaaataatctcctttgactccatgtctcacatccaggtcacacagatgcaagaggtggactcccatggccttgggcaactctgcccctgtggcttttcagggtacagttcccttcccagctgctttaatgggctggcattgagtatctgcaacttttccaggttcatggcacaagatgtcggtagatctaccattctggggtctggaggacagttgccctcttctcacrtctctactaggcagtgacccagtggggattgtgtgtggaggctctgactctacatttcctttctgtactgccctagcagaggttctctatgagagttttgtccgtacagcaaactgtgcttggataagcaggcattgccatacagcctctgaaatctaggcagaggttcccaaacatcaatttttgacctctgtggacctacaggcccaacaccacataaagtctgccaagacttggggcttgcaccctctgaagcaatggcctggctcagggaaccatttttctttcctaggcctctggacctgtgatgggagtggctgctgctaaggtctctgacatgccctggagacattttccatattgtcttagtgattaacattcggctgcttgttacttatgcaaatgtctgcagctggtttgaatttctccccaaaatggattttttctatckcattgtcagtctacaaactttccaaacttttatgttctgcttcctcttgaattctttgctgcttagaaatttcttctgccagatatcctaaattatctctttcaaattcaaagtttcacagatctctagggcagaggcaaaataccaacagtctatttgctaaagcataacaagagtcatatttgctccatttyccaacaagttcctcatctctgtttgagaccatcccagcctcracttcattgtccatattactatcagcattttgggcaaagccattcaacaattctctaggaagttctaaactttcccacatcttcctgtcttctgggccctccaagtgtctaggaagttccaaactttaccacattttcctatcttcttctgagccctccaaactgttccaacccctgcctgttactcagtttcaaagttgcttccacattttcaggtatycttatggcagcaacccactcctggcaccaatttactgtagtagtctgttctcacactgctaatgaagacatacttgagactgtgtaatttataaagggaagaggtttaattaattcacagttcagcttggctgggaagtccccaggaaacttgcattcatggcagaaggagaagcaaatacgtccttcttcacatggcagcaggaataagaagcacagagcgaagtgggggaaagccccttataaagccagcagatctcatagaacacattcactatcatgagaacagcatggggggaatcacctccatgatctaatcacctcccaccaggtccctctcccaacacatgggattacaatttggattacagctcaagatgagatttgggtgaggatgcacagccagaccatattaactacccacattcaaactgctgcatgaaagagtattacccttccatcttgtttaaatcattgttgtttgagtatttgcttcagtagtcactcctgtatcctaaccaatttagattgtgtgaggctttcttcggggcaggtgcaggggcatttctgaaggatttccatgagccttggctcgccttccaccactggttgggtggctgtttcctctctatggcctttttgagagagggcatacagtatagctaccctcctgtgattcccacatacttggcagagtatttgcattagaatcacctggaaacttatttaaaactgacattcccagaccaaattcccaagcactcagattcaggagattttataacaatttccgaattttatatttaaaagctctccaagcaattaaaatattcagccatgtmttctgtgccttctgaagtccaaggggatttggctgcatgtgtggaaaaagactcaatgtttccatgtgaccctccctgcagtcctactgctgctgccccttccagactgatatggtttgaccctgtgtccccacccaaatctcaccttgaattgtactcccatatttcccacatgttgtgggagagacccagtgggagatcattgaatcatggcgacagtttcscccatactgttctagtggtggtaratataagtctcacgagatctgatrgttttatcaggagtttctgcttttgcatcttcctcattctctctgcctgctaccattcatgtaagatgcagctcgatcctccttgccttccaccataatgagaggcttccccagccatgtggaactgtaagtccaattaaacttctttcttttgtaaattgcccagtctcaggtatgcctttatcagcagctggaaaacagactaatatacagaccttgtattttctgctgtttactgtactgttttccttcatggttcatttatgacccttgtcactggcagaactgttctcttcagctttccaagccaagctcttaggtgtaccaccagagctcatgctccccactgcaaactacacttactttagacctmtktactccccactgcatcattcattcattcagtctatcttactacaagaccaaggtctttaagcaaagctgagcacataagacttccaatgatcttaccacctccaatcttccagckttctctccaacctttacctccccatcctgcactggtaaccactgttcctggtgactggaatgtttttctactcctggacacctggcaaatcatacccactcttcaagactcacctacatcatccacatgaaggactgtaagaactaccttgctacccctgacactggtgaactgtcaaaatctgccaaaaatcaagctccacaattttcattttaaacagatgaatctattaaaacatctctgaggtgtttcacccacccacacctgcaggccctgggcatacctgccccaagaatgactcttgctctacaaaaggcttcctgtctccgaagaaaaaaaaagtttgtygyattcattcaaccaaaatatactaggcatttatgctatatcaagccctgccaggraatgaaggtagaaaatttgatcatctgattgctaatggcttccatctgctataccatctatttgatttctttctgtgaggacttaatgtctattacccaagtgctctctgagtcctgattatgccagtttaccaagccattcccttgagcttacctcttcaacttctgcgtgtctcctggagtctgtctgcctggtttccaacctactattttgcctatgagtcattctcgtatatgccccctgaccctcagtctactcttcactgctagttatcatctgctcctgtccactcctagactgacttggggacactcagggacccagtatgaacttaactaaacacagtggcctgattaagcactttaatatccttggtagaagcctttcagaagaaaagagaaaaatggaaaagaactggacgtagtactactgcctacccagtgggaactagagagaggccctcagctaatctctttgagggtattaaataagagctttctgatggctcttcttcatttgctaagcaagtgctccccagtaacatacaaatgaacaagagagaagccctggtactcagattaagcaatatgtgaatcactacagaacccaggctgagcctgttggtatgtaagttattgctgcccttttcaaaaatttaattaaagtgtttgaacattatctcactttaaagatctagctgctgaggctctattaaaattccaatgtgtcagagtgagaaaaagccccaagtggagatctaacttcatcctgagttttaaacatatgaaaacagttggacatattataatcataacaagtccttttggagatggacattattaccctacaatcaattcaagatgttttacaatccctctgccagcatgtgaaatccctgtgtacttcatataaggagctggttatgagctgataatgtcactgcagaagaatgaatacayccacaccttcctcaacctcatcataatcatacttaagctcaatcaggcacttgacacatcttactgtagtgtaggagcctgagagcaagctgctcagtggtaaactctcccagaaattaagctggatagtaatttgtattctagagacaggtagaggaaggagaagggtggaggagggaaaggagtaatgcatcgtgcctttgtctttgatatcatgaccataatcgttccctccctccacctacctctgcaacccacaacttctccacctggtaaactctgactcatgcttcaagtcccagtttaaatgccatctcctctataaagcctcccttgactttccctggaagggttaatggcttccttctcttcctgcttctcaatagggcaaatattgatggggcatctacaaggtgccatgcattgttcaaagtgcttgggatatagcagtgaacaagccaaataaagtttctgcacttgagttgtttatctaacagaaaagagaaagaaacaaaataaatatatattgtgttaggtgacaagtttataaaacataaatcagggtaatggggatatagcatggcaggggcagagaaggggctacgctagagacagctatcaaggaaggctctctaataaggtgtaaatctgtgaaaggaggtctgaataagtaatcaatgagtcctatgaggaaaagggtattctattctttgacaagagaaataggtacaaagggcttggggcagggtaagaggaagctggacatgcctgtgaacaacagggaggccactgtggctgagctsagtgacaatgtagtaggggcaggagatgaagtcagaagggcaggaaagagccagatctcacagaaacacagccttggtaaggactttggattttattatgaattagtggagaagaaatttaagagtgctaaccaaaggagtgacatgatattactcatttctttkgkaacacatattatggtgtgctgtaactgttgagtgayctgcctctcacaagggtacatctcaatctccccagctyctagcacagcacctagtttataataggtatttaataacattttagagaagaaaagagcagaatgggtgtaaaccggccacaggcctccagagcatacaggactgtctgccttccactaatatttgtcagggaaggattagcctcatacattctgtatatacctgtggttaccttatgtcaggctttcaaaacatcactgttctccaagcacaagaataagcaactattctagtctcccagaaacaacaaagcattaagagttgtcactgaaaaatgctgcttaacattcctgtaaccagaaatttggggccataaaaccagccttcaaaactgatatagggtccaagttccattgtcactacagtctagattgagaaccttatctcactctccagtaagacttactaaagatcctcctgaagtctgcctgaaaggagctcaaggaatcaagcggatcatctctttgtcccttaggcaccatacaactacagttaatagtgctttatgtccccagagtcctctgaaagatgaaaaatgwaactatttttaacccctggagttgctgtacttaccatatttcaaatcctttgcaaaaaagtgggtaaagatattgacaaattctcatggctttcttcaagttttaaggtgcctgaatttcaaccagatataacccacccatttctggggtctacactggcttaaagaaggggaacttatcgataaaggctgaatgttatatttttcatttactggacagctcagaggttatttatcttaccctcatctgaaacttttagacaattttaaaagtctcatgtaacaatttagaaacagacattgcagttgtccagccccctttctgcctctgaatcttgacaagtagagagctcccacacattgccctcagtggaccacaggcccaagtgggcactggacatctttgcagcatgtaaacaacggcctttttcaggagatgttttattactgacctcagaaagacaaagtacaggtaccaatcatgaatgcaacactgtaattgggttaaacgccaccaagcctttcctctcactgactgttctctgacaacctcacctgttccactatgttcaggggtccaagactctgccgcttttatctagactgaaagtccatcatggcctcgaatcaatgctgtacatgcagcattttccagtgtttgttagcacrctaggtcaaatraatggcattaaaaataccaccaaagcactgcatgataaaagtaagtttgggaaatgctgggtaagtaagtttaaagagccagtaaaatatactgtttaagaaaatgtgctgaggagccagatacctgggtttgactctgagatccatcactttactagctgggtgactcttggcaaagcagccaacaatctgtgcttcagtttcctcatctgtgatgcgagrgtaataataccttactgttttgtacagattaaatgccaccacacatttgaagtacctagcacagggactaatactttatgacatgatttgaagagctctcaatatgctaatatttattgtgattttccaagaaagagagtcatgcttcccaaatgtatttaatcttataactcttcttttctaagggcggcttacatgcccagtggcccttgggacccatttgggaagctccccaagctagacaatgataagtgccctaagtcaggctagaattacatcaatctcaacatatccaactcagcaaaactgtaattactmccatgaagtaatactaaaggtaagagatgagaaatgatatttaaagataactcaccagttcaaatattaaatgtcttcccaatctgatttcaaaatcttcaaattttgttttgcattgtggctctgccattttctatctgtatgactttggacaaactactcaatttctctgaatagcagtttcctgattccgaagmcaaaaaaaaaaaaaaaaagcaggggttgcttctcttatatgggatgaaacagacttcaaaccaaccacattaaaaaaggacaaagaaagacgttacatatgctgaaaagttcaattcaacaggaagacttacttataataaatagatatgcacccaaaaatggagcacccagattcacaaaacaagtgcttttagagctacaaaaagacttagaaagtcacacataatagttggggacttcaccccactgatagtattagatcactgaaaaagaaaactaacaaagaaatactagacataaattcaacacttgactgattgaaactaatagacatctatagaatactccatccatcaaacacagaatatacatttttctcatctgcacgtgagacattctctaagatcaaccacatgcttttccataaagcaagtcataccaatgatactctcggaccacagtgaaataaaaatagaaatcaataccaagaagatttcttaaaatcatacaactacatggaaattaaacaactagttcctgaatgacttttgaataaacaattaaaacaaggcagaaatcaaaaaaaaaatctttaaaacagagacacaacatatcaaaatatctgggaggaagcaaaagcagtataaagaggaaatgtctacaccaagaagttagaaagacctcaaatcaacaattaacataacagctagaggaatagaaaagcgacaacaaactaaccccaaagcaagcagaagaaaataagtaactaaaatcaggagagaactaaaggaaattgagatccaggaatccatacaaaggatcaacaaaaccaaagattggatttttgaaaggataaagaagattgatagactgctagctacactaacaaggaaaaaaaagagaagatccaaataagcacaaacagaaatcacaagggtgacataacaactgatatcaaagaaatacaaaagatcctcagagactattatgaacacctttatgcacacgaactcgaaaatctagaggaaatggataaattcctggatacacacaacttcccaggattgaattaggaagaaattgaaatcctgaacagaccaacatcaagatctgaaatttagtcagtaaaaaaattaccaagcaaaaaaaagccctagaccagacagacttactgccaaattctaccaaacatacaaagaagagttggtaccaattctactgaaactattccaaaaactagagtaggaaggactcctccctaactcattctaagaagtcaacatcaccctgataccaacatctggcaaagacacaacaaaaaatgaaaactacaggccaatatcactgatgaacatagatgtaaaaattctcaacaaaaaactagtaaactgaaaccagaagcacatcaagaacttgattcttcatgatcaagtgagctttaatcctgagatgcagttgtttcaatgcatgcaaatcaacaaatgtgatttaacacataaacaaaactaaaaacaaaaatcatatgatcatctcaatagacgtagcaaaggcttttggtaaactccaatatctcttcataatgaaaacctttaacaagctagacatggaaaaaaatatacatcaaagtaataagagccatctatgacaaaccaacagccaacaacattctgaacaggtaaacactggaggtattccctttaagaactggaataagacaaggatgcccatgcttaccactcctattcaacataagactggaagttctagccagagcaatctagcaacagaaataaataaaaagcatccaaatatgaaaagaaggatttaaattctttgttgacaacacgattccatacctagaaatccctaaagactccactaaaagactcctataactgataaatgacttcagtaaactttcaggatacaaaatcaatgtacaaaaatcagcagcatttctatataccaataatgttcaaactgagagccaaatcaagaactaaatctcatttacaatagccacaaaaatataaaatacctaggaataagtctaaccaaaacgaaagatctctacatggacaactataaaacactgttaaaagaaatcatagatgacacaaacaaacggaaaaacattccatgctcatggattgaagaatcaacattgtttaaatggccacattgcccaaagcaatctacagattcaacgctattcctaacaaacgaccaatgtcatttttaacagaattgaaaaaaattactaaaattcatatggaaccaaaaaggcccaaatagccaaaacaatactaagcaaaaagaacaaagctgaaggcatcacattacctgatttcaaactatgctataagactatagtaataaaaacaacaaggtactggtacaaaaacagacacataaactaatggaacagaatggagaccctgaaaatgaaaccacacacctacaatcatctgatctttggtaaagttgacaaaaataagcaatggggaaagggctccccattcaataaatgttgccaggaaaaatgactaggcatatgctgaagaatgacacaggacccctacattttaccatatataaaaattaacttaagatggattaaggacttaaaagtaggacctcaaattataaaattcctagaagaaaatctaggaaataccattctggacatcgactttggcaaagaatttatggctaagaccccaaatgcaattgtaacaaaaacaaaaattaacaagtgggacctaactaaactaaagagcatctgcacagcaagataaactattaacagcgtaaaagacaacctacagaatgggagaaaatatttgcaaactatgtatctaacaatggtctaataactacaatctacaagggacttaaatcaacaagccaaaaacaaccccatttaagaaatgggcaaaggacacgtacagaaacttcttaaaagaagacatgcgagtggccaaaaaacataagcaaaaatgctccacatcactaatcattagagaaatgcaaaccacaggcaggcacggtggcttatgcttgtaatcccagcactttgggaggctgaggcgggtggatcacctgaggtcaggagtttgaggccagcctgaccaacatcaaatctgtctctactaaaamtacaaaaccctrtctctactaaaaatacaaaaattagccaggtgtggtggcaggcacctgtaatcccagctacttgggaggctgaggcaggagaatcacttgaacccgggaggtggaggttgcagtgagtggagattacaccactgcactccagcctgggcgacagagagagactttgtctcaaacaaaaaaacaaacaaacaaaaagcagagagagaaatgcaaaccaaaaccacaatgggcccatctcacactaatcagaatggccactattaaaaagtcaaaaaaataatagatgctggcaaggttgtagagaaaagagaacatttacacactactggtgagaacgtaaagaatgtaaatcagttcagtcactgtgtaaagcagtttggcgatttctcaaaaaacctaaaacagaactaccatttgactcagcaatccctttactgggtatatatccaaacaaaaacaaatctttctaacaaaaagacacatgagctcacaagtttattacagcactagtcacaacagcaaagacatagaatcaatctaggtgcccaccaacagtggactggataaagaaaatgtggtacataaacgccacggaatactacgcagacataaaaaaaagaatgaaattacgtcctttatagcaacatggacgtagctgaaggacgttatcctaagtgaattaacacaagaatagaaaaccaaacactgcatgttctcacttataagtgggagccgaacattgggwacatatggacacaaagatgagaacaatagatagtggggactatttagascggtgggagggtggaggcaagggctgaaaaacttcctagtaggtactgtgctcagcacctgggtgacaggatcagttgtactccaaacctcagcatcacacaatatgccaatgtagcacacctgcacatatagaccatgaacctaaaataaatgttgaaattttaggctgggtgtggtggctcacgcctgtaatcccagcactttgggaggccgaggcgggcggatcacgaggtcaggagatcgagaccatcctggctaacacggtgaaaccccatctctactaaaaatgcaaaaattagccrggcatggtggcgggcgcctgtagtcccarctactcgggaggctgaggcaggagaatggcgtgaacccgggaggtggagcttgcagtgagccgagatcgcaccactgcactccagcctgggtggcagagcaagactccatctctacaaaaaaataaataaataaataaataaatttatttataaataacaaaataaataaattaaattaataaaagttgaaattttaaaaaatacctacatatcttggttgtgataaagacaaaattagagaatgaaggtaaaattattaatagatactaaggatcaatcaaattcacttcccttttcattatgtctcaagagaagtgcaaattcaccctgaaagctgataccacttaagggtacacagaccaacagctccagtttttagctcaagattcatctgtgaacaatgctggagtaaaarggcacaaaatgaattcattttctctttttaacaaatacataatcatgttttgaatgctggaaatagctaaggagcattcccacctcttgttggtttgaatcaagataaactcaagacactgaatatataatactcagaaagagataaattattccatattcccaaagctgagagctgagtacccagaatcaaatcrgagcagaactaaaagagacaaatgagccagcaatggttttttttatcacgtcctcttcaaactcatcatgtatatctactaactatttctacagggccaattctgctaaacctacaatgactatacagactttcaaggaaagttattctaggataatgtattgtcctattttccagttagtgaacaacacatcccaaggattccatgatttcagagactaaacccaatcttctggattaagaattatctctaacgtcagcctaaaattatttatcagagtatatgttccccagactctgactttagaaaatatggtcacccatggtcataagaaaaatgaaatgtccttggagtaacctgcggaaaacaatataatgaagcttcaaaaataagctctgttttgaaggtgtgatacatggaatcaatttagctttcagctagttccatctctttcctctgctatttcttttttttttttttttttttttttttttgagacggagtctcgctgtcgcccaggctggagtgcagtggckcaatcccggctcactgcaggctccgccccctggggttcacgccattctcctgcctcagcctcccgagtagctgggactacaggcgcccgccacctcgcccggctaattttttgtatttttagtagagacggggtttcaccgtgttagccaggatggtctcgatctcctgacctcgtgatccgcccgcctcggcctcccaaagtgctgggattacaggcgtgagccaccgcgcccggcccctctgctatttcttttaggtacaatttgaagagtacctaatccaaaccatgatttctgaactgacctcctcctttaattaacaacataaatgccagcatgctaaattaattatttgcacaactacctaagagctctctctaaaaataaccatcttagcatgttgctttactgtataaagaagaattaataccaattcatgtcaaaatattttttaaaaaactgaattagagggaattcttccaaactcattctatgaggccagcattacactgacaaagccagaaaaggatacwcatatacaaaataacaaaagcaaaaacaataacataaactacagacccatatccctgatgaatatagacacaaaaattctcaacaaaatactgtcaaagagagtgcaacagtacatcaaaaaagatccttcaccattatcaagtaggattcatcccagggatgcaaggatggttcaccatgtgaaacacaataagcataatgcagcacatgagcagaatggaggaaaaaaaaatatgatcatctcaatagatgcagaaaacgtgttttataacatttaacactcctttatgttgaaaattctcaacaaattaggtatagaaggtatatacctcaacataataaaggtcatatataacaaattcacagctaatatcatacacaatgaggaaaagcagaaagctttctctctacaatctggaacaagataatctggacaatctatcaccacttttgttgaacatattactggaagtcctagcctaaataataaggcaaaataaagaaataaagagcatccaagctaaaacagagaaaattaaattgtccttgtttgcagacaacataattttatatatattatataaaacctcagagacatcaccacaaaaactataagaactaataaatttgataaggtctcaggctataaaatcaacaggcaaaattagtaacacttccatatgccaataattgattatttgaaaaagaaatcaagaaagcaatccaatttacaataactaccaaaaatattacccagaagaaaagttaaccaagggggtaaaagaactctacaatgaaaactataaaacattgatgacagaaattgaaaaggacacaaaaaaatggaaggacaaatttcattaattggaagacttaatattgtttaaatgtccatactacttaaagtaatctacagattccatgcaatccctatcaaaatactaaggacattcttcacagacatagaaaaaaaaatcctaaaattaatatggaacctcaaaaaatctcaaatagccaaaacaatcttgagcaaaaagaaagctagaggcatcacactacctcacttcaaaacatactacaaagatatgataaccaaaacaacatgatactggcataaaaacagacatgcaacaatggaaaaggatttgaaacaaaggtgttgagtaaacacaatggagacaggacagtctcttcaataaatgatgctggaaaaactggatacccaaatgcaaaataataaaattagaccgttatttcttaacgtatacaataactaactcaaaatgggccaaagacagaagacccaaactatgaaactactaaaagaaaacacgtgagaaatctccatgacagtggtcaaggcaaggattttttggataaaagctcaaaagcataatcaataaaagcaaacagacaaataggattgtatcaaactaaagccttctgcacatcaaaggaaacaatcaacagagcaaagagcctataaaatgaaagaatatatttgcaaactatacatctgataaggggttaatataaaaaatatataagaaactacaaaaactcatttaaaaaaaaaacccagttacttctacagtgctggtgggaatggaaactagtaatgctgctatagaaaagagtgtggagattccttaaagaactaaaagtagaactaccatttgatccagcaatcccactactgggtatctacccagaggaaaagaggtcattatacaaaaaagaaacttgcacatgcatgtttatagcagcacaattagcaattgcaaaatcatggaaccaacccaaatgcccatcaatcaacaaatggataaagaaactatggtatatatattatggaatattactcagccataaaaaggaatgaattaacagcatttgcagtgatctggatgagattggagactattattctaagtaaagtaactcagaatggaaaaccaaacatcatacgttctcactgatatgtgggagctaagctatgaggatgcaaaggcataagaataatacaatggactttgcggacttggggagacgagtgagagggggtgagggataaaagacagcaaatatggtgcagtgtatactgctcaggtaatgggtgcaycaaaatctcacaaatcaccactaaagaacttactcatgtaaccaaataccacctgtaccccaataacttatggaaaaataaaaataaataaaataaatgaaaaatgttttaaagcccagttaacaaataggcaaaagacctgagtagacatttctcaaatttgcatacaaatggctaacagatatatgaaaaaaaaaagagcttgacatcactaatcatcagggaaatacaaattaaaactacaatgagatacartggatactctcaaawaattaaaagatagcaagtgctggcaaggatgtggagaaaaaggaatcctcacacactactggtgggaatgcaaattagtacagccatcatggaaaacagtatggaggttcctcawaaaactaaaaatatarctaccatatgatccggcaatcccgctactgagtacatatacaaaggaaatgaaakcagtatgtcaaagagatatctgcactcccatatagcattattcrcaatagccaagrtatggaatcagtataaatgtccatcaatgaataaatgtgtttaaaatatgtggtatatacacacaatggaatagtattcaaccataaaaaaagaataaaattctgtcatttgtggcaacttagaggaacctgaaagacattaagtgaaataagcctggtagacagagacaaatacagcatgatctcacttacatgtagaatctaaaaagctgttcacagagaagtagagagtagaagagtggttaccagattatgggaaaaggagaagcaaggagagagggaaagagattggtcaacttttacaaagctacaactagatacgaagaacaagttccggtgttctattttatagttggataactaaacttaacaataatgtattgtatatttcaaaatagctagaagaggtttttgaatgttctcatcacaaagaaattataaatgtttaagatgattgatatgctaatcaccctggtttgataattacataatgtatacatatatcgaaacatcacattgtaccccgtaaatatgtacaattatgtgccaaccatacttttttaaaaaggattttaaaaatatttgttgattcagttagaatatcaataataaaactacttaaacaaaaacacttcaccaacacccaaacccctattcactggtaaaaatctccaagtgcccttccaatcctatttcaaattcttcaggaggaggtgaagcaagatgaccgaatagaagcctacaacaattatcttccctgcagtaacaccaaatttaatagctatctacacacacacaaaaaagcatctttataaaaacccaaaatcaggtgaccaatcacagtacctggttttaacttcatatcactgaaagaggcactgaagaaggtaggaaagacagtcttgaattgctgaccccatccctccctcagcccccagcagcagccacatagcaaaaagaatctgtgcactaaggagagagggagtacaatgattgtgggactttgcattggaactcagcgctgccaacgggcagaattcagccaatgcccacagtgagagcatttagtcaagctctagctagaagggaatccccaatcccaatggtcagaatctgagtttcagcaagcctcaccaccatgggttaaagtctctgggttcctaaataaacctgaaaggcagtctaagccacaaggactgcaactcgtaggcaagtcctaatactgtgctgcactcagagccagctaacctgggggccatgtgacctagttagacaccagctagtgtggccaagggagtgcttgcaccagccctcccccaaccccaggcagtgcagctcacagctccaagaaagactgcttccttctgcttcaggagaggaaatggaagagtgaagaggactttgtcttgcaacttggataccagctcagtcacagtaggataggacaccaggcagagtcctgaggcccccattccaggccctagctcgcagatgacatttctagatataccttgggccagaggggaacctgctgacttgaaataaaggaccgaatccaggcagtattcatcacctgctgactaaagagcccacggaccctggatgagccttggatgagactctgagacatgctggcttcaggcatgacccagcacattcacagctatgaggagagactcctactacttgagaaaagcagaggaaagagtaaaaaggattttgtcttacagcttaggtaccagcttggccacagtgggatagagcaccaagcaggctattggggtccccaattccaggctgtggctcttaratggcatttctggaactaagctgggccagagagaagcccattgccctgaaggatgagtcccaggccaagcagcatttaccacaagctgactgaagagactttgggccttaagggaacatcagtggtagcctggcactacttccatgggcctgtggtggtggtggacagaggaaaagattcctccacctgggaaaaggggaaggaaaactgggacgattctttgtcttacattatgggtgccagctcagtcacaggtagataatgcactaggtagatttctaaggtttctgactccaggccctggctcccagatggaatctctggacccacccagggcccaggggaacttgctgcacagaagggaagaacacaaacctggctggctgcaccacctgctgaatgcagagccctagggccttcagcaaacataggcagcagacaggtagcggttatagtaggccttgggcaagacccagtgttgtgctggcttcattctgactcaacatagtcccagtggtggtgaccacagggtgctgtgtctccccacccacagcctcagaacagagagagagagactctgttttttgggggagaaaataagggaagagaacaagagtctcagcctggcaatccagagaattctccagatctcatccaaaaccaccaaggtggtacctctatgagtctgcaagaactaaagcattactgkgtttagggtgcctcctaatgcagattcagctacagtgaacaaaaacatagatcacaacacccaagtcccttcaaatacctggaaagccttcacaaaagcataggtacaatcaagcccagactgtgaagactacaataaataccttcaatgcccaggaactgaggaataatcacaagcatcaggaccatccatgaaaacatgaccccaacaamaaaaaaaaaaactaaataatgcaccaaggatcaaacccagagtgatagagatatgtgaccttgcagacagaattcgaaatagttgttttaaggaaagtcaaagaaattgaagataacgcagagaaggaattcagaatcctatcagattaatttaacaaagattgaaataagaatcaaacagaaattctggagttgaaaaatttaattaacatactgaagaatgcatcaaagtattttaatagcagaattgatcaaggagaagaaacaattagtgaacttgaagacagggtatttgaaaagacagagccagaggagacaaataaataaataaataaataaaacactatgaagcacacctacaagatctagaaaatagcttcgaaagggcaaatctatgagttattggccttaaaggggaggtaaagagaaaggtagggggagaaagtttactcaaagggataataacaaggagcttcccaaatctagaggaagttgtcaatatttaagtacaagaaggttacagaacaccaagcaaatttaactgaaagaagacaacctcaaggcatttagtaatcaaacccccaaaggtcaaggataaagaaaggatcctaaaggcaacaagagaaaagaaacaaacatacaatggagctccaatacatctggcagcagacttttcagtggaaaccttactggccacgagacagaagtatgacatatttaaagtgttgaaggaaaaaatcttttattctggaatagtatatctggcaaacacaaacacaaacacacacacacacacacacacacacacaaatgcttcacasatgaaggagaaataatggctttcccagataaacactgagggacttcataagcaccagaactgtcctataagaaatgctaaagggagttcttcaatctgataaaaaaaaaaaaaaaggacattaataagcagtaagtaatcmctgaaggtacaaaactctckggtattagtaagtacacaaaaaaacacrggatattataatattggaattgtggtcagtaaactacttataatttaagtagaaaracaaaaacatgaaccaagcaaaactaataactataacaacttttcaaaacagaaacagtacrataagatataaataaaacaaagcaagataaaaagtgagaggatgaagttaaagtgcagtttttattacttttcatttgcttgtttgtttatgtactcrgtgttaagttgtgatcagcttaaaataatgcgttggccaggcacggtggctcacgcctgtaatcccagcactttgggaggccaaggcaggtggatcacgaggtcaggagatcaagaccatcctggctaacacggtgaaatgccatctctactaaaaatacaaaaaattagctgggcatggtggtgggcacctgtagtcccagctgctcgggaggcatgaacctgggaggcggagcctgcagcgagccaagatctcaccactgcaccccagcctgggtaatagagcgagactccatctcaaaaaataataataattaaaataaaataatgggttataagacattatttgcaaatctaaaaacacagcagatacacacaaaaaattaaaagcaagaaattaaaacataccaccagagaaaaccaccttcactaaaaggaagacaggaaaaaaagaaagatgaaagagaatagcacaaaacaactagaaaataaataacaaatggcaggaacacagttaatgatgcttatttatcattaacattgaatgtgaatggactaaactctttattcaaaagacatgaagtgkctggctgagktgtaaaaacaaaaacagaagcaaacaaaaaccaagacccaacaatctgttgcctasaagaaacacacttcacctataaagacacacatagactgaaaataaaggaatggaaaaagatattccatgccaatggaaaccagaaaagaacaggagcagctatagttatatcagataaaatacattttaaggcaaaaactataaaaaagacaaagaagtttattatataatgataaagattaagcaagagaatataacaattgtaaatatacatgcacccaacactggaacacccagatgtgtaaagcaaatattattagacctaaaaacaaagagagatctcaataaaataataattgaagacttgaacaccgtactttcagacagatcattcagatagaaatcaacaaagaaaacattggacttagtctgctctatagaccaaatagacctaatagatttttacagaacatttcatccaaaggctgcagaatacatatgcttctcctcagcacatggataattcttaagggtagactatataacagacaacaaaacaagtcttaaaacattcaaaaaagctgaaataacatgaagtatcttctcttcccaagatggaaaaaaattagaaatcagtaacaagaggaattatggaaactatacaaacacatggaaattaaacaataggctcctaaatgaccaatggatcaacagattaagaataaaattgcctgtattcccagcactttgggaggctgaggcaggtgcatcacttgatgtcaggagttcaagaccagcctggccaacatggcgaaaccccatctctattaaaaatacaaaaattagccagatgtggtggcacgtgcctgtagtctcagctacttgagaggccaaggcaggagacttgcttgaactcaggaggcagaggttgcagtgagctgaaatcgcaccactgcactccagcctgggtgacagagcaagactccatctcaaaaatggataaacaattaagaataaaattgaaaaaaatttttgaaacaaatgataatggacacacagcataccaaaacctacatgatacagcaaaagcagtagcaaaaaggaagtttatagctataagcaccaatgtattagtaagggttctctagaggggcagaactaatggaatatatatatatatatgtttattaaatattaactcacacaatcatcaggtatcacaataggctgtctgcaggctaaggagcaaggagagtcagtccgagttccaaagctgaagaaactgggagtccgatgttcgagggcaggaagcatccagcacaagagaaagatgtaggctgggaggctaggccagtctctcttttcacatttttctgcctgctcatattctagccatgctggcagctgattagactgtgcccacccagattaagggtgggtctgcctttgccaccccactgactctaatgttaatctcctttggcaacaccctcatagacacacccaggatcaatactttgaatctttcaatccaatcaagttgacactcrgtattaaccatcaaaaccaacatcaaaagaaaaaaatagaaaaatttcaaataaacaacttaatgatgcatcttaaagaactagaaaagcaagaccaaaccaaactcaaagttagtagatgtaaagaaataataaaggtcagagcagaaaccaatgaaattgaaacgaagaaacaatacaaaagatcaatgaaagaagaagttcgtttttgaaaggataaacaaaactgacaaatctttagccagattaattgagaaaaaagagataacaaataaaatcagagacgaaataggagacattacaactgatactacagaaattcaaaggatcattagaggctgctatatgccaataaatttgaamacctagaagaaatggataaattcctagacagatacaacctcccaagattgaaccatgaagaaacccaaaatatgaacagaccaatgatatgtaatgagatacaagatgtaatgaaaaatctcccagcagagaaaagtccaggatccaatggcttcactgctgaattttgccaaacattttaaaaaaaactaataccaatcctactcaaactatcctgaaaaatagaggagggaatttttccaaactcattatatcagggcagcattaccctaataccaaaaccaaagacatgtaaaaaaataaagaaaattacaggccaatatcactgatgaacattgttgcaaaaaatcctcaacaaaatactagcaaactaaattcagcaatacattaaaaagatcattcatcatgaccaaatgaaatttatcccaagtatgcacagatggttcagcatacataaatcaaccaatgtgatacatcatatcaacagaatgaaggaaaaaattatacaatcacttcacttgatgctgaaaataatttgatcaaattcaacatcccttcatgataaaaaccctcaaataactagggatagaaggaacatttatctcaacacaataaaagccatgtatgaaagacccatagctatcatagtactgaatgggaaaaaactgaaagcttttgctccagtatctggaacatgagaaggatgttcaccttcaccactgttattcaacatagtactgtaagtcctagctacagcaattagacaagagaaagaaacaaacgatatacaatttggaaaggattaagtcaaattatccttgtttacagatgatataatcttatatttggaaaaacctaaaggatccacaaaaagattagaactgataaacaaattcagtaaacttgtaggatacaaaaaaaaaaacagcatttctgtacaccaacaatgaacgatctgaaaamgaaatcaagaaagtaatttcatttacatcagatacaaaaagaaaatacttaggaattaaccaaaaaagtgaaagatctctatacagaaaacttgaaaacattgataaaagaatgtgaagaggacaaacacacacaaatggaaaaacattccacattcatggattggaagaattaatattgttaaaatgtccacactacccaaagcaatctacaaattcaatgtagtaactcctataaaaaataccaatgaccctcttcacagaaatagaaaaaaaaatcctaaactttatatggaattacaaaagacccagaatagccaaagctatcctgagcaaaaagaaaactggaggaatcacattacctgacttcaaattatactacagagctatagtaacccaaatggcatggcactggcataaaaacagacacatagaccaatggaacagaatagagaacacaagaacaaattcatacatctacaggaaactcattttctatgaaggtgccaggaacatgcatttgggaaagaaaggacagtctcttcaataaacgatgctgggaaaactggaccagcagatgcagaagaatgaaactagacccctatctcttgccatatacaataatcaaatcaaaatgcattaaagacttaagcctaaaacctcaaactattaaactactaaaagaaaacattggggaaactctctagggacattagactgagcaaatatttcttgagtactaccctacaagcataggcaaccaaagtaaaaacggataaatgggattacataaagttaaaaaacctctttacggaaaagggaaacaatcaacaaagtgaagagacaacccacataaagggagaaaatatttgcaaactacccatctgacaaaggatgaataaccagaatatgtaaggagctcaaacaactctatggggaaaaaatctaataatttgatttaaaaatgggcaaamggtctgaaagggcaaaatcttcagayggggctttgcattctggctctgccattttgtatctgtataaccttgagagggagtcaaaatcttcagtggctacaggggccaggcagcatcttacatgacagaagtaggctagaagtctaacgtattttttaaaaaacaagctaccttttaagtccctttatttttcttctttgaataaagaaatgagtttaagaatttcacttttctcctaactttacattcattaaaaaggaaaccacacagcagcaattgacacatgaccttatggtgatgggaagacaactgagagaactagggactgtggcaatctgaaaaatacatacctatttttgatgagaaggtggaaagctggattttttagaccaaatcacttcaattttcaaatgttggaaactaactcatggtttgtttgttttttttaattgtggaaggatactgtggaagccatcacaaccaaggaaagcccttctacaagccaactatggcctgcagtttcaacatttagtcactgcttattaacaaatccagacaggatgcctatcactctcaatatcatcagccccatctctttgcagttcctgccctgcaggctgcattttccagccacgggcacatcctcatcgtttctcattcccacacaccacctacttcccccacttttgtgctgcacccatcttagagatgaggctctccacctctcaggagaggctattattggcaagacagcctacaaaacaggagaaaatattcacaaactctgcatctaacagaggtctaatatccagaatctacaaggaacttaaatacatcaacaagcaaaaaacaaataatccaatttaaaaatggacaaaagacaggaatagacaatcccaaaagaagacatacaagcagccaacaaatatatattaaaagtcaacatcactaataatcagagaagtgaaaaatcaaaaccacaatgaaataccatctcatacccttcagaatgcctattattttttaaatgtcaaaaataacagatgctggtgagactgtggagaaaaggacatgtctatatgctgtcagtgggaatgtaaattagtttaatcactttggaaagcattttggagatttctcaaagaacttagaactaccatttgaaccagcaatcccactagcattcaaaggaaaagaattcattctatcgaaaggacacatacactagtatgttcatcacagtgccattcacaatagcaaagacatggaatcaacctaggtgcccatcaatggtggattggataaagaaaatctagtacgtatacaccatgggatactacgcagccattgaaaagaacaaaatcatgtccttggcagcaccatgaatacagctgggggccatgatcctaagtgaattaacacaagaacagaaaaccaaatattgcatgttcttacttataagtgggaacaaaacattgaatacacatagacataaaggtgagcaaaacagacactggggactactagaaggaggaaggagagagggggatatgggctaaaaaaactacctattggatagtatgctcaccacatgggtgatgggaccatctgtatcccaaagtcattcatatctccatatccctcagcatcatgcagtataacagtgtaacaactctgtgcatgtactccctgaatctaaaaataatagtaataatacatacatacatacatacatacatacacacatacatacttctggctgtctccagatgaactgataatgcttcaaatggtgaactaccaattcactcctaccaaagtattattattatttataatcaagtcaatcaataagaagggggaaaggagaactaaaatgtcctttagaaaaaaagtgtgtgcatttgctctaaaaaatgtaattgttatagttttataaattatgaaatttggatttccaaggaacactatggatggatgggtagacttcctttgcacatagcctgcacttagtaagtaactgttgtcctgaaataatatggccttgtataaatatcacactttgtcatgatacacggtctctcacactgtgaaatcatcaaggaagctattgctgtcagcatctcctcatctaaaaccactccctttcatcaccctcaactaacaaagttttaaatgcactagctcttggtctgtctcctaaacataccaaactggatccttcacagagtctttgtacttactgtctcagctatctgggacactcatctttctgattttttcatagctgcctcttttttagattgaggacaaacgtcctatcttcataaagccctctccagcttctcttctctactgacctatccctcatccctctgttttattttcttccatgacgtttatcattaggtttaattttgtccgtatttatcatctgactcaccccactagaataaaagctccctgaggacaggccccttacacaccttcgctgctaaagaatccaccaatgttcctagcccacagataagtgtccaaagcagattagtatctgatgaataattaatgaactataatttgacagagaagtaaactgaggtccagggaggacctgtctggtctcatggatattcattgacaaagcagagccttgagtccaggtcttctgactcctggcccagaatcactgtcattgcaccaccctcaccaatgttctgacagcytgaggtgcctttcacccagaaatcagcaagtcaggagttaaatctatctttcatcagcaacaacattctgtccacatttctcaccacagaaccaaatgaacgaatgcatgttacccagaaatgcaagtgtttcacaactaattccaaaggatgtcaaagaagagtttttttaaattctctaggagaattccattgagcttaaatgattttatgcawaaatattaatgaaattgtgaatttatactaaaaaagtaaaggttaatggctacattagctgttttttcatttctcaaacactaggcaatccaaaatctaacatgcacatatacaagcaagagcaatttgcccaaagtattatattctattgctatgatacttcttggcttcaattaaggtcaaaagtcatctgaacagcttcatttcttctgacgaagatttaaattttacttaattagtgtgttgcagaaaacatcctcattttctggacatcagatccttccactcattttcatttctgcctgaaaattgctacttcccaatgcacaccatagcctaactgtccatcctcaagtatacatcctttaaacgtttccttgaagctatgtctacactgtgctaggcataaagataaaaatgatggaatctcagaatccagatgtcttgtctcctagcatttggcagcatctctagatggcccacattttcagcttttaaccatttactggaaaatacatcccatctattattactcctttctacttttctgtatttgtggtaatttattcaactgaaaacttggacaaagtaaatgcaaagaattggccatatgacacacacagcacaatgattaaagaaaaaagctattcaccaccccactctatctgcccagggcacactaacttccagtagcacaagccagaaccctgggcatcacccttgactcctccttctctatcccctaatatagaactacatccagtctactccagaattaacttccctcaattggcaccaccattatctgaaatagtgcaggattctgtcctcttatctaggatctcgattctagaatactgcagcaacctcctgtctttttttttttttttttttttttgagatggagtctcgctctgtcgcccaggctggagtgcagtgccgcgatctcggctcactgcaagctccacctcccaggttcacgccattctcctgcctcagcctccgaagtagctgggactacaggcgcccgccaccacgcccacctaattttttttgtatttttagtagagactggatttcaccgtgttagccaggatggtctcgatctcctgacttcgtgatctacccgcctcagcctcccaaagtgctgggattacaggcgcgagccaccgcgcccggccagcaacctcctgtctttatgtctccaattttgccccctccatgccattctccactaagcagccagtgtggtctttctaaagtaccaccctaatcatgccaccaagcctgtgcttatatcctttccatggctcccaatgccctgggcctaaaggctaaaccattacgcattgcttacaaacctattcacaatctggcctcttgcctgcctccccaggtttatttcttgacacaccttgcctcttccttacctatgctttctccactctccaataataaatttttcttcagttcttttaatgcactgtcatccctcatctctcacctctttgctcatgctgcattcagaaccctcttccattcatcttggctgatatctgcttatccttctatttaacatattaagcataactcttggtggaaagaatttctgactccttttggtcgaggtagggtgccttgctccctgtattcctcctatcagggcactaacaatacttggcagtgtttctttgactgtctccactcttgtatgtctcacaattgtagcccagcatctatgaccacacagtatttgatagttttgcattgttatctccagaatgatgctgacaagacagcttacggtctactcggatcatagtcctaactctaaagactctctaatcatagacacccaatatttgtttgaagtgtggagacttgcttgcatacttcaaaagcaggatagattttttagggcaagtctccaatttgctcccttcattcccaaatgaaagtaatttaataattgaaaatatctactttataataatataagccaatgttgtatctcattgaggaaagaattacccaaggagaaagttacatggcttcaacaaaccatgtaacatacttctggaattttctcccctttcctcctaccctacattctgatattcttcaatcaattttataaaagttcaaaataatttaaatatgagcttaagtcatctgtaattaagaaggtaaacatgcttttttaggaattacagaatgcattccatttgggcaattcattgttttagattatctataacaacatcttgatgtgaaaagctaattactatttcaaatggtgggacggtcccaacatctaccttcttcccttatgaagaattttaggaagaagtaggaaatatctaaagcagccatgaggacaggaagaaaaatgacatttactgagagccttgatatacgagatgtatgaggaactgctcttgtttaatccttccaataactctatgatgtggtaatcaatggataccttcactttacctagaagaaccctgagtctgaggtaaattaaagataactgcaaacgctcaaacatctagcaattgatagatccaggaaatgaacccaagtctacttggcatcacagtagaaagttatttccaccatgagagctcagaaaactgaagagtatcttttgaaaaacaaaaattttgtttaaaaaaaaaaggagatgccttctyaggaagccaaaaatgtcttcttcatctcctcagaaaaggattccatgggaagctttttcttagaaccctagctttcaacttcccatctaattgtgcttcaacttaattttatctatcatttagaaataaaattaaaaaacagaagatttaccattatatcttatagagttacatatactggcagagtgttcaattagatttaatctgcattaattaagctttccattttaacaaagctctatattaacacatttgaatccgaaaaaataaacattaaatctgcaatgtcattaagatagttcagcaagacagactcatctttgttgctctgctaatgcactctattgctactgtaaaaaataattttatcacattagaaatatacattggaattaataacagagtacccattccattacataaaagagcctatttcaattactacctccaggtacatttttaatagtctttatatttcagttttctgtttcgttttatctgcccacttaagatatccatgggaactcaattggctcagttacctagggagtttccagatactgctttgccaagaagttcactcctcgtttaaagaaacacaaactcccaagagttctaactctggctactgggttcccaccaggtgagagagatgtctgcctttggccagaagggaactcagccactgaatgaagtcttctaattcaataatggctgtgcctgagagtagcccgaagcctagcagagattggaaacagtgatttccaaaacagtaaatgaagtttctctggttgacagctttggaaaaggcaggggcatgattacttcctgtggtgctcatgatgattagggaaggtgatcagatccagaatgctgttccctcattgtgcttcatcagcaaagatgacttttaactgaaaatcgaacattaccaggtttgggtgatagtcattattttcctttaatcaccgaactgggggtggtgtgtgggatgactattttctcatctggccactcctcagcaccctgtctcccctcagcatcaaatttccatctagataacatcgtcattatcagtatcatcagcatcatcatcattatggcttttttattgagtttcttttgtatgccaagcactatgctaggtattttacaaatactaatcctcagaaaaatcaccaggtattatcaattcagcctccagatgccaaaacctttgcccccttcactatcctgcacagcctcccatgtgtagcacacccagggcaatacctttgtctggtacaatgtattccatgtgaacctttgaaactagtcatgaaaattctgagcagctctaactggagatgaagaagacaaatccttttttcatttaaaatgtgtttattgagtgcatactatgtgcttgagattattacctggagaaacccctatttgaggcagtctgttacctatgctatttccacgtatttgggttcagactcaataggtaacacctcaaccaatcaagacagagactgcctaatgtttccaatatccatgttctctcatccttggcacaatgctaggctgaatttcccagtactgttcaatgaaatgggatacagattatacatgacattttcagcctgacccttaaacctatccaaggagactatgaaaaaatgataattacaatacctacgatgcttacataattacaataggagccattaacctacttctctcaractgtcatggattgagcaatcaatcagttaatcaatacacatagaakttaaataacacaactcaaagttgctacatataaagtcatatgtctgtatttatctatacattttcaaaagcaatccattatttttaaatgtatcaaaaatattgagcatgtgaaagatcaccaggaaaaaaaattctgcaactcaaaaatctaaaaatctgacgcacatattttatgccctcaattaacaataaaaccagaaatcacccattaagcatttttaatttaatcactttggaatatttaaacactgctttaaccagggttaaagaggaagccaaaatgaaattaagagctatagaaaagtacagaaaataaaaacactatatagcaatatcagtgggctgtattcaaagcaatattcacaaggaaacataaaaccatcagtgrttttaccagtaaacagaaaatactgaagacaaatgaactaaacatggaagaagctagtaaaaataccaacaagataatccaacataaggtaagaagtaggaatcaatgaatttgaaatgaaaaacagtccacttgatcaataaaactaagaactgtttcatttaaaagatcaataaattacatgatcccatgatgagcctggccaagaaaagaagaaaacacacatatcacacattagaaataaaatgagataaaaatcacaaatataaaaattttattaagtaaaagagactataacgtccaactacttgccaaaaaaatcccaatatcaatgaaatataggattcttaaaaacataaattgatcccaagaagagctcaaaagtaattagatagaaaccataccacaaaakaagtggaaaatgaacatttcaataataaaatattttccagcttccccaagaccaaattatcagcctaaatattttttgtacttttcagcccaaatattttctatacaaaatattttctgtccttttctaattaygtttacatgtaattatttacatctaattacatttgcatctattttcaggctcattctatcagaaacacttgtagaaaagatacaatgtatattttttaaatagtctagcacataaaaaattcaaaaagccttgaattaactcaaatacacagaaaaatctatggcatctcacttattaatgtattaaaacatttaaatgtttaataagtttaaagtatttaaaacaatgcctataattcttcagtgcttaaactaatgtagttactactactgcttttattaatattgctattgctatcattatttaatgatacaaagatcctaactaaagcattagttaatgtaagtttattcaaggatttcagaaatagctcaacattatagattctattaatgtaattacttatgttaatagataaaagggggcagacacaaaagtatctcaaaatgcacactgaaaagatatttaataaaatataacagctattcttttttaatctttcagtaaaataggaataaaattagatttcctttacatgatgactagatagataaagacagatagaaacagtgatagatattagaaagtactactagacagtttattaaacagaggaccttattaaagttggaaagaaaaaaggattatctgttgccctcttcctgactttaatgaacacctttgatttgttcatatattatttaccactattatggagattccagaccatatcataaaacaagaaaaagaaatcgctaatataaatattgaaattgaagaaaggaaaaattttcaatattttcagcttacacaattatatacctaacaagtcaaaggggatcatctaaaaaaaattaatgtttggcacgtggtatgcaatcagcaaatgttagcttaaaaaagctattcaatatagcttaaaaatcagctaaaactcaaaagaaagatatcaaaatcatattaaaacatgraaagaaagcaagctgcagaccaatayctcacttatggatatagatacaaaagtcctcaacaatatactatcaaatcgaatccataaaatagaaaaaggattatggaacatagccaagtggaatttatcccaggaatgcaagtttggtatagctttctgaaaatcagttagtataatacactacatcaacagaataaaagattaaaactatgttatcatctcagtagatatagaaatagcatgtgaagaaattcaacacccttcataacagaaacactaaccaaactaggaatagaaagagacttctccaatatgataaagaacacctacaaatagaaaaaaaaaaaaaaaaacctccagactggtgaagagtacctgtgaaaatccacacagctgacatacttcaaggtgaaaactgaaagctttccctttaaaatcagaaacaatacaaaratatctgctcaccatttctattcaacattgtactggaagttctggccagggcaatttggtataaaaatgaactaacaggcagcaggtaggacaggaagacataaaacaatctccatttggagakgacataatcttatatggaaaaattytaaggaattcactagaaactattagaactaatcaataagcttaccaaggtkgcaggatgcaaagtaataggcaaaaattaatttcctttctatacagtagcaatgagcaaccaaaaattgaaattaagaaaattattccatgtatgatagcataaaaaaatacacctaggaataaattaacaaaagccacgaaaatcttagattttgaaaacaaacaaaaaaaattgaaagaaatgaaagacgacctgagaaagtagaaagacaccccatgttcaggaatcaaattatttgacattgttttgatggcaatgcttcctcagactgacgacctacagattcaatacaatctctatcaaaatctcaactgacttatttgcggaaactgacaagctggtcctaaaattcatatgaaaatccaagggaaatagaataaccaaaacaatcttgaaaagaagaacaaacttggaagattcatcaatttccaaacttactacaaaactgcaataatcaaacagcacttccatatggataaacatatagatcaatgaaatagaagtaatgatagtagcggcaggctgtctggagcagccgctaccatcacaccaggtgcagcagggaggcgtggccaggcctgcaggctttgtggagccactgggagccttgaaaaagcagaagccccgccccttccaagttggggtagaagttccccaggcatagctgcagccgcccacttgcagctacagacccaggcctcctgccccgtagagcaggcaggagcagggcccaagtcatggctgcagatctagacctcccactccacagagcaggtaggagtcctacctcgctgggctcagctgcagctgcccaaactgtggctgcagacccaggcctcctgtttcaccaagcaggcaagagccccaacccttcccttcacagctgcagctgtgggcccacgcatccctgcactcttggagacctgggaaggaccccactgcacttgtaggctcagaaatgcctgctcctactgcctggcttctgtctgaaataagcacctgcaccaatctttgagcaaagtcggggccgagttccggcactgtcacagcctggctgggtgtgcacatactcagggcagtgctgacacaccagccctctgccaccttagccctctctggattttgggcaccaatgagcataggagggaagctgaggtgaggctgaagtcagctcagcatttgcctgcaggtatcccttggcacctgcagtctgggcaccatgaatgtcagcaggaggtagacagttcctgggtgkaagtggctggctccccagtgaggcttcgccttcaggccagggagggcctgatggctgccagtgccacagacaggaatgggaacttgtagtgccttttcgaggcctatccatggctgcccatgggccaactggcatgcacttcctcccctctgaggcccatataagccccaggctcagccagagctgagcagacatcagaaggaccagctgcagagaggagctacccaatccagggcctcctctctgctgaaacttaagcagacatcaggataacccgctgcagagagaagccacccactctagggcctcctctctgctgagagctgcagagacaacagcaggacctgcctgcagagaggagcttcctactccagggtctcctctctattaggagctgaacacctgttgggacaccctggctgaggaaaggagctactcctgtggaagactgaactgttctattgctcaataaagcttctcttcatcttgctcactctccacttgtctgtgtacctcattcttcctggttgcaggacaagaacttgggactcactgaatgaggctaaaaaagatgtaacacaaacaggactgaaacattctccttgcttgccacattgggggcaaagaggagagaagagaagagctgcagccctttggggagcacagacctgggctccccgagccagggctgtgactccctctttggggccttgcagttcctggtgtctccaagcttccaggtgccrccgtgttccccggtgctggtggaagctgcttgaggtgtacctggtccagccacaacctcacagagagttggtaaccctgccggtacctggagctgcccaccccgtggcagcagccggtgtatctgaatgtgcaggggccagaccccttgctcactcacacaccmcttgctgctccatgcctgactcccatctcccttggaggcatgacacctaggccagtaccatgagctgagtgcagcctgccaggccgagtgggtagaacgagcccagtgggccctagcaaaactcgggcaaaggcaccaccagccacaggtttctggtcagaaaagcaacaccccaaagattccatagcagtaagagaccagaaataagccctcatatttatggtcaattgatcttcaacagggtgccaatacaattcactggaagaaaagcagtcttcaacaagtggtgaagaaacaattggatattcatatgcaaaagaataaagttggacccctacctcacatgatatataaaaactaactcaaaatacatctaagagataaatgtgagagctaagcctataaaacttttagaagaaagtaactcaaaatatatctaagagataaatgtaagagctaaacctataaaacttttagaagaaaacayaggagtaactcttcattactttgaattaggcaaaaatatgacatcagaatcacaaaaaataaaaaataaaaaaaaattggacatcatcaaattttaaaacctttgtgcttaaaggacaccaccaagaaaatgaaaagatcgcccacagaatgggggaaaaaactgtaaatcataagtgactgcctctaaaacatacatgattattacaaatcaatgatagaaagacaaagaatccaattaaatgtgggcaaattatctgaatatacatttctccaaagatacacaaatcgtcaataagcttatgaaaagatactcaacatcatttagccatcaagcaaatgcaactcaaaaccacagtaaggtatcactccatacacattagaatgtctrtcatcaaaaagaaagataataactagtgttgacaaggatgtggaraaatcgaaaccctcaaacrctgcttcrgggaatgtaaaacagtgtagtcactttggacaagtctggcagttcctcaaacagytaaacagagtttccatctgatccagcaattccagtcctagtcatatacccaaggaaataaaaacatgtccacacaatagcttgtacatraatgttcatagcagcattattcataatagccaagagtggaaacaattcaaatgtccaccaactgataaatggatatctataatgtattatatccaaacaatgtaacattattctgcaataaaaagaagtgaactactgacataagctacaatatgaatgaacctygaaagcattattctaagttagagaagccagtcaaaaagggatacacagtgtatgatttcacttatatgaaataaccaaaataggcaaatctacagagacagaaagtagattagtggttgcctaaggcttgggagcttatggggaaattgtgggtgacagctaaaaggtatgggatttcttttgagggtaatgagcatttctaaaattgattgtggtgatgaatgcacaattctgtgattatactaaaagctactgaattataaaaataaaaaattatctaggaatctmataatgcccatcacatcccaattgtttcaaatacttatttaacttatcttcatcactagtaatacaatcagaatcacataagggagaatcacaaaaagaacctgggtgtctgatttttaagccaacaatctatctaccacatacctggatcttctgctattgaataaagaaaagccccaaatccttggtcaacttatatacgtggtcaaatgtccatgccaaatttctacaggataatttgctcctctagatacttttatcctggtaaataataaaagtaacctgaaaattatgaaagattctcacttattgcagatgggaacatttggcgaggggaggagagttataatgaatagactaatttctaaatatatgccattatatattcttctctattttcttacattccagtctccttaagtagatcttctctactagagtagaaaccaggttttctctattacccccagccattacattacaaatccacagtctttcataccttgccttgtcagactacacacacatggaacagggcatcataaagtccagagggagaggggatctagtatctacttcttcatatttattttgtttagcagtcaggatctgaggtttgagatttttcgtacttgtctttcatggtgcctgcttggctctcttgcaagtgtactttccttccttccttttttttttttttttttttttttgagacggagtctcgctctttcgcctaggctggagtgcagtggcgccatctcggctcacggcaagctccacctcccgggttcataccattctcctgcctcagcctcccaagtagctgggactacaggcgcccgccaccatgcccggctaattttttgtatttttagtagagacggggtttcaccgtgttagccaggatggtctcgatctcctgaccttgtgatatgcccacctyggcctcccaaagtgctgggattacaggtgtaaaccaccgcgcctggcctctaaagctttttaataaactttcactcctgctttaaaacttgcctcggtctctccttctgccttatgcccctcagataaatttttcttctgaggacacaagaagaaaatccatatgggtcttgctgtagacccatatggatttgcccccagtaacatattttggtggcatgtaacttggataccctccactgccaacacactttggtgtcttgtgactcagataatttctactgctaatatactttggtgctgtgtgactcagatatrttccctagtggtaagagacctctatgcctcaccttctttggctaaaggcattcaacccctgtacacggttttcttctccccccgcctttttttttytttttttttttgagatggggttttgctcttgttgcccaggctggtgtgcgatggtgcaatcttggctcactgcaacctcagcctcctgagttcaagcgattctcctgcctcagcctcccgagtagctgggattacaggcakgcactaccacacccagctaatttttgtattttaagtggagwcggggtttcaccatgtcggtcagctggtcttgaactcctgacctcaggtgatccgcccttcttggcctcccaaagtgcygggattacaggcatgagccacagtgcccagcctcttctccctttctcaaaaaaaaaaaaaaaaaattctgaagtttttctattacaatgaaaaatgatcaaatgactctcctatcaatcatccttgggctctattagaaaccwaytagggatataaaagacagcctcacatggcaacaaaaaagtttttttaaaacctttcctattgaaaaaaaaatccaaaagagaaaccctgcaaatacagtttcaaaacacacttagacaaggagaataaatgtatatgtgtcaagggatggccactcaccatgcacaatcctttttcttccttagagcagcccgggaaaatagattattacacacattttacagacaaggaaattgaagttccaagacattgaagagctggtgtcacaaagctagaactggaactccagcctccatcagactgactctgaaacctgtgctctttctaatataatagcaactgtttcacatgcttctcacctgctgtgggaagctctcctctgcattcattgagaagtatctcaagatctacctcctactttgggcayttgtataaccctcataccaaagaagcattcacacccaaccccacaaggccaatagggcaaggtagggttgtgaagctgagacttgccttgacactcaatccttggaaaatgagaacctatacctttctccagcatacagaacacctttgaacgaacccatatctctcacagacatgtacatcaccttgctttctctgggctgacccagaacagccagattgtaatgacaacacccccacaaaatgatcagggtccatcaccacgctttgaggctgagaacaaacaaccattaaagacaaaactgttgatccttacaactaccaaaagtctgcatagaaagagcctctgttccagccaaattggtctgtttgctgctcccactcccaaaattgcatttctctatatttcttcacctctgtgactgtgcacactgttccttctgtttgatgtaacacccttcttcccttacctgctggaattctgcctgtgcttcaagagcactctctctgtatggtcttcctcaaccactaacctaatgcatttaattcagtgaacttaacacatttatgtaattttgaaattagctccatacttcattgtaacaccaatctactatttctttattattgactcttttttattcttcagctttttgtgtggttatgccttgtttcctgcattgccaaactccaccatacatgcttagaagattttgttcctttgatttctccacaaaacctcgcatggcacctagaacagagtaggtgcttcataaatattttcagtggactartayagaggaacccagtattaaaaaataaaattgtttaggttacctaatgattattaatttgaattcaatgattgagtgatctttcttaaacttaaaacccattgcctaggggacttcagtacaagtttttaacatggcattgaagctttgcratgatctggcttctacctacctctataataccagccccatcgcccaccccaaactctcatcccttccccatacacacttttatgttccaacgacttacctacccatgtgttgcttcttaaaatcatagcaacctctttctgaaatgttattcttccatcccttactccttcgcattcagcatgtagaatactcacatttttttccttatacaactatcwtcttttccaaagcatttcttggctaccacaacacttagcagaatgactgctcttacctttatttcctgattacmaccttctggcattgcatcttcaatactttattatatttatttgtctatcttccctactagcttatgtgatctttgcgatgaagatcatacactattcaccttaatattcccagtgtcaagtataatccccacataaacacactgtaaatgtttattgaaggttgttaaacataactaactaacttgcttgatgactaaatatgacagaatgtgattttattcaaagtctaccagaagacagacgagaaagatactcatgattggtccttggagagcaaacaagaaagccactttgaccaaagtaaattcttaatgcaaagtaaattcatgaatgtgttcaacagaaatgaggcctcagttagatgaaagttttcatggggctacaaactctaaatcccaagacattttgtataacccattaactctaaggagattttcaaaagcagaaagagctttcttacctgtgctccagttctcgaatggacagtatcactcctgaagtrgatggcttctgctgtacagtggccaaaatggtgaattcactcttgttcyggaacagctgaattaatttctcactcacatgaggagctgcatggatctctctttctatgtctaggaatcaagaagaaaagcaggaggaaacaggagaggagaagaggaaggagaaggagtagagaagaaatataggagaaagaggagaggggagatgagaaggaagargaaaaaagatccatggttaaaaatgtcatgtccaaagaatccagaytgcaaktttcattttcctcttctgtcaatagttttcattttcaggcaccattccccactccctacagctgcattcattcaatgcaaatcccggaaatgctrtctctgtcaccatgcccacttgtcactttgacaagttcccaattggccagacagtgattttctggcaggaattttgacgggacgctgagcaattcagtttgctgcaaacagattaggttgctgtaaataaggtgagaggtagtcggataaatgtggtcctaaattcagagaatcttgggataataagacccaaatgccactcagcatcctccaatttcactttttccatggacacagcttccttctccccacaatggatataggaaacctgtccttgcyttgtacctagcagatatttactagcactaataatgccagacaactctgcctttgcttaacgaataaatacaaggcatgctcatgctccacacccgtgcctggaatttctccataagcatgcaatggatgactttcctcatgaaatatttattgaagttgaggccgattcagcaggcctagaggtgtgtgattccagctaatcctgctcctagacaagaatgtttctttctccaayatcagcataacragagacatccatcacttcatacccagactcacccttgtcatgataaactgggtgttatctcattattttacactacatttttctggcatcagaaaggggcactaagggagcaaagttagagaagattattcagaggatgataaatgaacattagaagtgtgtttggtgacctcctctcacatcctgaccatctcctctgactgcaagataactacatggttatttctccaggactacatgggaagcccttgaaaaacatagaacttcaaatgctgcactgcccaagcaatatcacagactggtatacggaccttgaagaatctcatcctaaagaatggcttctgaataagatatccttcaattcttgacctcgggcctcagtcccctcatctgcaaaatgagggggtagactaggtgatctcttagaaccttcccaccttagccttctataattttttgaattgctgcttcaattttataacacagaaaagaacagcacagtctttcccryctgyaagtatctagggtatgaatcgcagaaagcaatgtttgtcctccaccatggagacacccaacccaggcagaccagtctaccagtataaaacctacctgcacaatagtagcaaggccttcgctacttaattcttaagtggcatgctgtcagcttttatcaagtgttgagaaaagagatagcatcttgaaaaatgcttytatgccttctacaaaatcccagccaaagatattccagatgacatttaaaacctattaaatgtgtgagcaaatcactctgtaaactaaagagtattagaaaatgtttgttaatattatttttattatcattattatttttttttttttgagatgagggtctcactctgtcaccaggttgaagtgcagtggcatgatctcggctcactgcaacctccacctcccgggctcaagcgatctcccacttcagcctcccaagtagttgggaccacaggtgtgtgccaccatgcccgcctttttttttttttttttttttgtatttttggtagagacagggtttccccatgttgcccaggctggtcttgaactcctgagctcaggggatccacccaccttggccttccaaagtgctgggattacaagtgtgagccactgcaccctattatcattacttctaagcaaagatcatcttaataaatttacctacaagtaatgccaaaaaaaattcaagtcttaaaattaagttatatgtttactttttacttttttcttctttactcatcaattagaaatcaactgattggtagcagatgcctgaatttcaggattgtaaagcttgggcccaaagaaaagacagccataagcgatcagcaatgcctgctggaggaaatggatatgaatatcctatcagctatgggtatcgtcatctctcactcagttctccctgagtgatatcatccaaccccatggccaatggcctccaactttatatctgcagccctaacctctcccttatgcagtaaattcaaacgttcaccttcaagcatttcaaattgtaatgtgcctacagtgaagcctgttctcttcccgccactctcaattttctcacaaaggtcccagtcttagtaaacggtcacaccctgttcctcaagtcaaaaaactagaaattgcccttgatttttcccttttctccactctccatatccagtctaaaaacaagttaagtgggctcccatgtctggaatctgtccacttcttcccaacttcactcttaaaactcttgcccaagccactatcattgctccctagggcacttccaatgatctccttcctgcttccatactgccttcttttcaccattcttcacactgtagttaacgtgctctttttaaaccctaagtccgagtcatttcagcctcctgcttaaaatcctccaatggcttcccattgctcataggataaaatccagtcccttcagcatgcctgcaaagttgcacacaaactgattcttgcctgcctttcccaccccattcacactcttctccttggttactagaggagcacaccaggcccactcccacctcagatcttcatgcttgtccctctgcccacagtgctcttctctctccttttcacgtccctgactccttctccttcagctttcactgtaaatgcaatcttctggcctctccaaggcagactctgcattaatgtctctctaatgctccagtctgggtattttcttcatttgacttgtcataatatatgtattgtaatccatttattatttgctgatattatttatcacagtcttgtttcaagcttgttacctcatattatttcctttcttttcccactagactgtaagttccatgagggcaggcatacttatttatccattgttttatccacaattcttagtgcctggcacaaaacaggcatccaataaaggtttactgaattaattaatgtattttccatttatttttctcatttatattgttacttcaagtaaccatatatattatagtcagaaagtaatatatcttttggaaaaccaggagataaatgggtccttctcaaatgctcatggccatgaaaatttattgtaatgatgtttggtgctaaataaaccccacttctttgcaggacasccccacttaacagtctgatctagtcctaccaaacttctgctcactcaatcctccaagaaaatgaaacatttcttatgttgacttttcttatttctttttaaaaatgattggcacactgaagtaaagagaccccattagcactcactagagtgaaatgtaagaaacacctgttttgatacactgaggctttatgtgcattctcactctcagagaagccctttcaagtaaattttgaccatgatccagatgttaaaaaaacaccaacaaagtaattctatttcttacaatatgcaggcagaaacactggacaggtttcaaaggactgagatcactttgagttttgcagatgactagctgtgtgactttggataaagtaccttacctctctgaacctcacactctacatctgaaaattaagaccacwaaattccatgatctccaagttctttcctagtcttgacatttcatttcagttaatcacttgatcctgctcatagctgcatagcaaaagagagcactgagagcaaattccatctattaagaaacctagattctacaatttttctcctctgctgattttccaaattaacataaaacataaagttgtcaactcttaaaaatagtgatatgtcacctactttgcagcagcctgcttttttcctggagttaaaagagcaaccaatgaaacccaattaatgggaacctatagtgaatattgtacttccatattcaaccactacagtatgtatttgctgtattacttaagaatattcaattctgctagagataacaggaaaaacaaatgggacagataaagcccataagaagtgctaaatatagagagcaagttagaaacctgtgaaacatgctaaacatagattgaatacgtggaacataagtgtgttgaacacagataaaaaggattgaataagagtgttacttacaagtacaatgggatgggaggaccaagtcataatgtgcgtatcatgccaccttcagaatgacagtcatgtcatccctaaaccaacacccatcattgacatccatttcatttccattctggccccacatatactatccttgagaaatgctaataaaacccatcactgctcaccaaattaactggtgaattacagttgtagccaggattacttgcttctgagtatttccaatagaggaagcatgtgggctctggaaacctcccatttgctgagccccctcccttttcgttaacctcagctccagtcctcataatcacaccatcatcaaagaagctgatgcagcagagagagagagaaaaaaaacagaatatatgagcaatgaataacacaggaactgggtgggctggtgcttcccactgctcacactcaatcctacatgtgttaacctactccatctctttcccctgtttcctcctaratattttaaacatgattcaagtatttgaatttagtctgtccgtgaggctttccattttgtaaccctgggggtgtacttggaggctaccattgcataaaggtagtttcgcacacaacaaccacttaaagtgaatatttcacatttttaaaacgggggaaaatggcgttccaaatgctcaggttttgcatgttctagttaagaagtgctaactcagcagcaagagtgaagtgctttttctttcccaggataagacggctctacctagtcatttttaaagaaagactaaaaatgctaatatgatgattaaacatcagcaaaaaaaaaaaaaaaaaaaaaaaagtgytgggtgaagggaggagattggagaaggaaagaaattaaatgaggtaaacacacactcttytctgcctcaaatagaagcaacttcatttccctcttccctgatgtatagagtgaggatggtggtgaatttcattgtcaacaagcatataccttgcttcccctatgccaggcactgtggttggcactggggaaataaaagtaaaaacacagtttctgccctagaggatagacacrtaagcaagacagtttccttatgacaatagttgcagaatagggcagtgcacaaaaaaacagaggaggcccatagagattggggataacatcatggaggatataattgaacctgactctaaaaacatgaataagcacttactaggcaggagagagggagaagagggcactcactgcagcagcatcgtatggctgtgaactcacgtgttatacattaccctggcatttttctttttctgcaagtgtatctcttactacaagttcagcagagaaagcatctacttaacctaatattggagcaaattctcaggcccctgattggccaaggggtaccacattagcacaaagcagaccaagaggcagaatccccaccagttcacagcgaagaatcagcaaatcaaggtgggaaaagcagcagcagccagaaacatataaacaamaaatgcaccaaggcagcccgcctcagccttgactggtagagaatgcaggcaacatttcagtaattacactgtgaacctcaaaatatagcaaactcctgatatagacaggccacaaccttctagcctgagtgccacataagctcatggtaagaatggccccaaaaggtaaagcaacatttcttaatttgaaatgacagttggcttttcatttctgaatgtagaggaaatttgtcaattcagaactgccaaccatcagtgaggcaatttctggttttggaggatgggaggcacatgtcccactatttggtcttgtgacccttctttaaggatgtcagatgttattgatccaagcagctttcaaaaaaacagaagtcactagaagactcccagttaacgtgtaagggactttcatctccactaacaagttcacaataatattccattaaacctccatttgttccagaagccggaatgagagaaatcaaacctgtatatcttattactgtgccaagggcagggctaatgccctgcacatgtcatcgcacttacaataactttagaagacattattattattattcctactttacagatgaccaaactaaagcttacagaatttaaataatgttctaaaggacactgggctaggaaggcttggtgctgagatttcaacctggaaagctggttccatgagctacactcttaactgtgttacacctgctattcaccaaaatgtgtgatctcagtgcttgatataaatcaagggtaaatcaccatgatacacccagtgcctggcacttttgtgttcactcaggaaatatttattgaataaatgaatgaacaatctatttgtacaacccttatgaggtaaataccaacacatctccattttacaggtgaaggaactgaggcacagagaggtttcatgacttgcccaaggtcacatgacgagtggagacaaagctgactcttgccccagcagagtcgactgtgatattccatggcattcaactgatgcttctgcttatttttcatcctcctccctttcctctcccccacagcccacactcccgcattctagcaccacaagcctaactaatatcccttcttcccagggccacgttcctacccattttggtacactcccatctgcagcaacctgtcttctctccctccttttctgataacagtttaattgctactcctcagaccagttttctctgaccaccccaggccaactcaggttcctgtctttatttatcttcattgtacttatcacaattgtcagagattatgtatagaatcatttacatgtgtaatcattttattaagtgatatatatatataaaattttattttatttttatttatttttttgagacagtatctcactctgtcacccaggctgttgcccaggctggatcgtggtgtgatcttggctcactgcaacctccacctcccgggttcaagcgattctcctgcctcagcctcccaagtagctgggactacaggcgcccatcaccacacctggctaatttttgtatttttggtagaagatggggtttcgccatgttgctcaggctggtcttgaactcctgggctcaggtgatccacccaccttggcctcccaaagtgccgggattacaagcatgagccacggcccccagccaagtgctatatttattccccactggactgtaagttccatgaagaattgcctaccaacatgtacactacaccaagcacagtgcctggtacctggttaagcctcaaatctttgtcacattaataaactacatcttggctccaaagtctggaacacaatataagaaaaaaaggtttaccaaatacacacaaatataacccaaacctgttgagaaaaagtacattcaagtaatgagctgcctaaggaataataaagccagttcaatgtccctaactcctccattaggggactaaacctaaggcatcctgtgacacatggtattaaccaattttttgtaattactgtgccattcgatcaaaagagattctggtacccccataattttgctaattaggtactataaggcagatgagctcttcttaaaaacatttgacaatactagtaggaaaatyaatgcattccctgttgctaagaaattaaacatgtgtagccactcctctttaggctgcctctccacactgccacccaccagcaatcaagtccccttatccccatccccctcatccccatacctcccaccgcatctcagtgagaaacacaggaataaagagagagttaaagtatgaatgccagctccatctgaatcacaagacaggagaacaaaaagcaaaagagtggtgaaaagatttttataatacgattaagagtgcattatatagtcaagaagctatccaatggtagagaatggctaagtaaattaggatatatacaccccatggaaaattatatattgtaatataatgatatgaaaggcattgaaataacataggaaatgtccagccaatactmtgaaacaggtatacaatagtacatacagcatcataccaagtctatggtaacataaaatttattttgtgatgcatagcagatagataggcatggccttcaattttgtcagcaattgggagctaacatgggtgaaatttttcctctttccacatgtctgaattttccaaatcttctctgagagttattgtaagaaaaaaaactacaatgtttatgctaaaatatatgagctcatcatagaaatgggagaaacaagaaggacatcctacaaaagaagaaaataagcaccaatcaccttgctttcagtcccacaattgtgtatccttaaatcagtgaggacaacagggtttttttttctttttttttggcaataactgaccagcaaccctcctcaggtgccattttaatacacactgattgtcaagaatctgagaaccccaaggtgtactcatcacatagtgtacaaaactctaagcaccaaaggttgctgggtgcaagcaagaacatcagttccagcaagagatgctctcgatgttcttataaagacatgagggcagtccttgccctgccctctgctaaccacccatccgctcatttattcatttgttcattcattcttaactttaaaaacccttactgagcattccctgaaccagcactgtggacaaaaaactaagacacaccttctattcatgaagatctaaaagtctagtaataaagacacaaacaaaagtgaatggatcctgctcagcttttcagttcagagatataagaaaagtagagccaggcatggtagcatatgcctgtaatctcagctactcaggaagctgagacggaggataacatgagcccaggaattctagtctatcctgaggaacatagtgagaaagaccctatctctaagaagaaagaaaggaaaagaaaagaaagagaaggaggaaagaagagagagaaagaaaggagagagaggagagaaggaaagaaaaaaagaaaggaggggaggggagggaggaaaaaaggaacggagggaaggaaaggagagagagaagagaagaaagagagaggggaaaaaaaggtcatgtttaggtcatgtcatcataggtctgaaatcacctggagcaggaccagagagtgagtccctcatcagggacttaatcttccaggtaagaggcaatgtagggtagtggttaagagctcaggctctgaagcctcactgtttggttaagattccagtttcaagccgggcgtggtggctcacgcaggaaagaacacaaaaaacggtggataaagccgaaactgcacgtaaacacaagacttcaagaccagcctggccaacattgcaaaaccccatctctactaaaaatacaaaaattagtcaggcctggtggcatgtacctgtaatcccagcaacttgggaggctaaggcaggagaatcacttgaacctgggaggaggaagttgtaataagccaaggtggcgccactgcactccagcctgggtgacagagagccagactccatcttaaaaaaaaaaaagaaaaaaaaaatccaatttcacatcttatcaagtatataaccttggataatttaatctctctgtgcctcagcttcctcatttttacaaatgagaataaaaccacatctacccatggggatagtataaagattaaatcaataagtacatgttaaactctcaaaactgtcttccacataagcagcacatgacatctgttagcttatttggtatacagccaggacaggccctgggtcctgtaggatgggtggggtaccaagctatggcagcagccaccatgccaaaagaaccctggtgctgcagctggggctgaagtaaaggtcacactgatggttggttatggtggcccagcaggagagcattgagcaggtgagcaggggttgccagccagggttggaggcatggttagtggtcagttctaactcttttctgttaaaacaaaaattgaaaattgggcagagactatgggacttccagccactccaatctaagtccagccagccaatttccaaacagttctgaattttttatttttgctagatgtcaagctaaggactttatatatgctaatttaatcctcatagcagcctagtggtgtcagcattgctatctccattttacagatgagatacaaaaagttaaaacgtgttctactaactagtctagctggaattcaaacccagatctgtctaaagccaatcataaggcaccactgtccctcagcaccatctattggctcagacaaaccagtgtttgaatcccagctctgccaagtacctgctgtaagaccttaggtagctgttttccttccttcatccttgagttgcctcatctgtaacactcaccttccagggttcrggaatgaatgaatgaatgaatgaatgaatgaatgaatgaaaagtgcctaatatttaggtaataggcaccttatgacatttctgagatgctttaaaaaaatgcccatatctagacattaaagtcaggactttaacattttctaagcatattcatatacatgatagtatttcaaattcataaaaccaattaaatgggcattaatagcctcactttaaagatgaagaatctgtggtttatagaaaataagtgacttatccaagatctcacctctagcaagtagcagagatgtgtctctgactccaactttgtagcttattgtgtatatttctgtttggcttccctagtccccaacacgagagcatcattacttctctactccaatgctatgcctcccctacgtagcaacactcctcctcccagagtctaaactactctgtatattaagggtgtcatctctagcctgctttaaaagtttggtgggctgatctaattataattcattcccttttgtgcacggtcctaattctcaggcatgaaagagacatttttaaatgytgtattggccctgaccttgccacatctactcagattcaatagtaaacagtagggcatcatgttcaactgccaagctctgtaatttatgattattcattataaatcatttttacatgttacttcaaatgctgtttttcaagaataaaaatctgcctgcattgaaaggcacagtgattttaatatgcaaacctcctacagagatgatgtctcattttaattattgtttcggtttaatgggttttcattaaattagaggatggagcaattactagggtgaacagctaatgtttcaaaggtaagctcctgtggctccgcgggcaaaaagacagttgtggcacacagaagcagaaagacacactcttctgaataagcttgtattaagcctgacagaaaacagcaccagayagatttttccccagcttcaaaatagagctggcatcccctctctrtgatacgcaaacagctctaagagtatctttagaacttagaggtatcttggggtatcttaatcatatgacttttctatcaggaatctaggcttccccgtcatcagactagaaagtgcttttaaaagtccatagcctgcaaagcgatatgtcaaaccacaggaaaatactcctgaagaaattgtcttctctcacacacaagtaatttagttggtttagtggattaatgtctgacttcccacccctgggaaattggtccaacttcagcataggatgcaatgaccaaaatcttattaattagcaaactgtcagaggctcartgagaaatgactttggtggcctcagcaatatttcaccccagaaactgcacagatttgacactcagggaccaacagggcagcattacctcagatggaggcaaaggaattaatgagaagtaggaaaggagtggagagtgagaagtaaagttggctttattggggtcccagaggtcagtggtgagggacatgactcagtacttggggagggggaccctctgcattgcagmagcctgcacttggggagatggagggggyttagtaagcttcaaatatgtaatttcttctstccagttgagcccaaggagagagccggggggaagctagaggggtctttccagaaacaactgtgcaggttgtttctggaaagacccctctgtccagtgcagatctggctacaatgtgtgccaaataaataatacaggagcctctcaccttgctatcagaaggaggggaaaaattmttttccacagcagccaggagtcatgaagcaatgtcagtccctgatgaaccagcaggaactaagtgatgaatagctaccctcatgctcaccaccaccccaccctcccagctggtatttctgacaggaataataattcagagctcctcaatataatgctttcttttcagctcctttatttccactgtcctaaaaagcacatcatcagctcttagatcacatgcattaatctaattacatgccttgttagctaattagttccagagtcactgctgaggaggtctccctcactatttatctatctgtgttggccacagggtgtttgtgcattcaggttcctggggaaactatgcaattatcagccttcaaccttgtgctcaggaaggacagtgaggctttccggacaggaaacaggtcacctgaaactccaggctttgaacagaagctccaagaaatgtgtgcatctgtccagaaaaggggctatggatgtggtggatttttttcctttggcagacttgctgtttttctttaaaaatggacctcctctttagagatgttattctgactgtattaaacattaatgtccccccttaaaatgaatcactggaaatgccacttgctccttgagctcacggcctgttgctatctggctrcaggatctttctcaaccaatttcccacctcaaacccttccaaatgagagccataactgagggctaaaatgataatcctcatttactgaagcttttttaaaagaaatgaaaatgtcaatttgggggaaaattggtctttgatcattgttgcaaataatttggttcttgcgtgtcctagggtaagaacattgaatctgtttcgataaattattccttcagtgtattaaataaagactttgtgataattcatttcaaaggatgctggtaggctcccacgcagtcttttctacttgggtatcatctaacttagacaacagatattcttttcagctccctgaaccacccataccaagagtagttgtaagttcatccttgtgcaaccccaattagagtacttgtcagatctcagagcgcaagacatgggaagggtctgaagcacagccaggcacaagtggggggctccgtggggacaacatctcaacccttctccctcccagagttccagccatctccgtgcctatccaagccctgcgcatctctcaaggcccaacccaattcctctaactccatgaagttctagcaccccagctgagggtgattttcctcctcgaatccaaaattcaatcactcacccattcaaagatgtatttgtggagtatgttctctgtgccaggctctgtactgtggtgattaagatggactcagtctggagagaaatatctggccagtatttttagctgcactgaccaataccacccactcttacaaatcttattctctacattgtgccaaagttaatggccagacggtggcctgaccactaagtgaacccttggtaacttcccaaacagtcgtgctctgcctccttttgaaacattctgcccttttgacactgcattcttcctgttgtcctcctacctccggggctgtctagaggctcctttattgtgcactcctctgccttctgtcttacttgtcagagtgcctcaaagaacattcatccatcagcaagccctgagctccatttccactgtgacccccaatcttcttgactagaatattgcatcagcccctcactgtcagtttgcctccacttgtctctcctcgcctcccctcctgtcccctctcctcatttcccctttcctcttagtctttgtcgttttctctctctatcccatgtagcaatcagaaaatcaggaagatccttttcaaacttaaatcacattacctcaatcccttacttaaagtcctcaaagagytgctttattagtttcttatggctgttgtgacaaattactgcaaccctagaggcttaaggcaacacaattttattatattacagttctggaggtcagatgtctgaaacaggtttcacaggacaaaaaccaagatgggggcacggccatactccctctggaagctctaggggagactgtttccttgcctttttcagcttcccttgggtcgtgtcttcttcctccatctccaacacaagcagcataraatcttatgatctctctctgcttccatcttcacatcacttttctatccgatcctcatgtctttctcttatgagaacccttgtgattacacaggccccacctggaatccaggataatcttctcacctcaagacccttaacttaatcacatctgcaaagtcccttttaccatttgaagtaatatagtcacaggttatggagattagaatgtggccatcactgggaaggagggcagcattatccagctctccacactgcccattatgatttgaataaaaccctaactccttgccatggcctgaaaggccctggctatgctctctggcctcctttggtagcttcacccacatgggccatccttgtgccctttaaacttgtttgatccaaggggccttttggctggctgtttcaagaacaagggcttcggagcacaacagcctggattcaactctcagcttactggacctatacataaccttggccaagtgatttaacctctattttcctttctgtggctcataatacctatctcctttgcacaattgttataaggattaaatgagctcatgaatataaagaatttagaatagtacctagcatatgaagtgttcrtcattaataatgtgagtgattattaataataatattatctttgcatggctggctccttcatttaggcttcagctcaaacgtcacctctgcggggaagccttccccaatgtaaagtcaactctccccctaagtctctctctctctctttctctctccagtatagctcttatatttccttcatagtatatattacaatctaaagttactcatttattagtatacttgtttactgtgattggccattggccatctttgctagaatataggcttcatgtagacagggactgtcttttctctgctgcatccttaacactcagaacagtgcctgtcacatgaygtgcaataaatatttgttgagtgcatgaatgaatgaatgaatgaatgaatgaatatgatatattgctggttccctcttcactgtacctaggccaatagcccctcaaggacagggtgtctgtcatactcttacataatcaagacccagtgagaggtgaagccagctagacttcctgggtcgagtggggacttggagaacttttctgtctagctaaaggattgtaaatgcaccaatcagcactctgtaaaaatgcaccaatcagcgctctatgtctagctaaagtattgtaaatgcaccaatcagcactctgtaaaaacgtcccaatcagtgctcygtgtctagctaaaggattgtaaacacaaccatcagcactctgtaaaatgaaccaatgagcaatctgtaaaatgaactaatcagcaggacgtgggtggggacaaataaggaaataaaagctggccaccccagccagcagcagcaacccactcagctccccttccatgctgtggaagctttgttctttcgctcttcacaataaatcttgctgctgctcactctttgggtccatgtcacctttaagagctgttacactcaccgcgaaggtccgcagcttcattcttgaagtcagcaagaccaagaacccacctgaaggaaccaacaacagacacaccaggacagtggctggcacacagcagcataacagactatcgtgattgatcaatatgtcaacagcagccgtgcccagtggctcacacctgtaatcccagcagtctgggaggccaaggcaggcagatcacttgaggccaggagttcaagaccagcctggccaacacagtgaaaccccatctttactaaaaatacaaaaaattaactgggcgtggtggtgcacgcctgtaatcccagctacttgggaggctgaggcaggagaatcacttgaacccaagaggcagaggcagcagtaagccaagattgtgccactgcacttcagcctgggcaacagaatgaggctctgtctgaaacaaaaaaaaaaaaaaaatatgtcaataggaaataggatttaaagcctcctttaaaggtaagtgctcaaaataagaaatgatttttctccatccagtcaaagattgagagagaagggatgccaaagtacatgttgacaaaagagagattcaaagcaggaccccaggaagttgctctctcaaccttgccctgtccccattacacactagagggtttagatagttctttaatcatggtgagatcttctgtttaaatgaaataccaaaaaaggatgctgtggcaaaattatacataaaatatgtggctaaaagccagttggtggggaaaaccttgccacgccctgaatgccaaccaccttgtgtctttcctttccgataaaacaagcagctcatgcccagtcagatgaggaccttcctctttgaggcactatctggttgcactccctgctttcaccctgcctgcagtttagagtagaaatgacatgacttcacatgaaaatagttgctcctctcacygctataaagtgctgcactattactgccatccagcccagtgtttgggctttgacagggggcccagggaagggtcattctcgacatcaatcctgaagtatggagatgtctacctacaccttcctcactcccttgaatagcttaggtgcagcttacctgtgcttacagctcctggtacatacttgtgtcacaactgattacgtatgccactgccttgttcaaaacccttcaatgaccccaattgcctctaagacaaaatccaatcctcctaaaatatggagttattatttaatggatatagcatttcagttttgcaaaataaaaaagttctggagagctgttatacaccatgaatatacttaacactgctggaatgcacacttggaaatggtaacagtggtcaattttatgttgtgtgtttttttatctgcaattaaaaatgcaaatttaataaaaattgaatccccttaatatgaccaacaaaactctacacaatgtactcctatagacctcaccaggcccaactcccacctcacctcttccctccttcttggcctccttcttggcccttctttagattccaccaactaatacacaagctccttcctgccttagggtctccggtcaggccattattttgcctgaaacacactttcgcccactccatacctggttacctgccattcatcactcaggcttcagctgaaacgtcatttccctagaccccagcccccagctaaagcaggcctcctggtctatgttaattaccataccacagcttttccttctttgggcttatcctagtgtgaggctgcatggaagctcaccactgtgctgtggtgtctggtgccacacatagcacaaagagcaggtactgaaggacattggagaaatggatggatggatgactggtaatccattggtaatccttggtaatcccttctgaacctgtatgaacctagaaaattaagcctttctgaagctatctgtacgttgtccctaaacctaccatgcaagtacaatgcctacagtatacagtagcattagaatttctcctgtatctgcctcattttattttttttttttaacaaagacagggtcttgctctgtcacccaggctagagtgcaatagcatgttcatagctcactgcagccttgaactcctgggattaagcaatcctcctacctcagcctccgaagtagctgggactatggtcatctgtcatcctgcctggctaattttttaaattttgtagagacatcttgctatgttgcttagtctggtgttgaacccctgacctcaagtgatcctcctgccttggcttcccaaagtgctgggattacaggcrtgagtcatccttcccagccctcattccaatttaaacagcagcccccagttctcattccttgattggagattttggtcaacaagatcaacaaatacctgactctcacgtgtagtttccttccccctcagccttttgtgaacacagactcaacatctcaccttttcctcctcccaactccctccagctgagcagttctcagcactcactgtgcatcagaatcacctgggtaacattttttaaatgtgattttcagtctgcaccctgagagactcaaaaaaaaaaaaaaaggtctggggtgtaggccaggtgtcaatatttatttatttgtttcaaataaacatgatgggcagtcacagctgagaactggtgtcccagcctcaggtcttggtatcttggtgactatcctggctccaggtcaaaagtagcatactgaccagcctcaggccagatgcagcctcagcatgttggtgtagctcccagtgttactcacccaacccaccatatttcaccaagtccacrgtgccatagattataaaatacaccatcatttgacataccctaagaaataaacaaaaagctgttgattataagagacaccataattgtaacacatatgtaatttattacataattataccaattgcctataaggcaaaatccaatcctaccctaaaatatagttattatttaatggatatagcatttcagtttgcaaaataaaaaagttctggatagctgttatgtgaataagtgtgtgtgccttggaatcagtgaaatacagcataaaaattgaaacatttcatataaaaattcaaatctccattaaaaaattagatgacctggcaacgcagagcccatattcccacaggcaacagtgcagtgaatgcagagttgaagaaatgcagctcatggcacaatgttgccagtkggctgcattaccttgccagtgcacatcactcagctgttacctggctggccccctatgcacctgggattgaagaccctccccagcacatctctaacttatgctaatactacacacactcacccaggccccacacaaaccccctccattcctgcccttccaggttcttcccagcccctctaggctcgccagcctcaccctggtgcttctcagctggcctgccagggcctgagttacaggtgtcactgtagtatgagtccctcagccctcgctgtggctcrgcagagcacttttggcataaaaacagtcccttctctttccttccgtgtaatgtacaaatacagccattttccttatgtgtcatgatatgaaaaaggtcacagaaygtggtccagtgttgaagtagaattggggatcagaagatctgggatgcaccatcagtcctgccacttagtatctgggtgatatttaatactccaacactaatatctgggtggtcatttaatccctctgaatcttggtgtctccttcataaagtggtgactaatgagaatawttctatcccagaatccacacaacaaatattaacacatgtgatcatgcacatgaccagttttgaaaatgtcgctctcactttcctccatgcctgagtgccagggtaggacaaccccatgcaggctgggtacatgcggtggctacagtgggagggcttgctcttaccacgcttctcaaatagcttacaacccagcagtgagaatgggtggatagaccccagcaggacaaagataaaccctgagtaaataaatacctcacgccgaatccccagggaggagagaggccatgagcatatggatggtgtgggtgataggtgtctccgggtaagttagtcaataaatgaggagtcactaagccctgcatccacagagaaagccatggaacaacagttgggcttttttgtctttccagtaaggttggcrtatctttttttaaagtgtttcggcttacttttaaaaattcatgatgtaaaccaacaggacgagtgtctttcttcaaccccgtgctgctgtcccacaacatctgtaggtgcaggtatacttttaartttttcctgccactattccctcaagtccccccataccaggcataccaaatgatccagaccccatgttctctaaaaaagacaaaaatgtaaaaaacaggaaagcaatattttgatcaaccacagaataataatgtgagcgtgagaaatgcaaagawgcctgtcaacgtttctatttatgtgtaacgatggctgtagccctctccttaattacgctcttattcaccatacgcatggagtctgtcactgtgggtatgggtgtgactgagactccaaccagcataaatacatgccacacacccagtcgttccatgcaactttttcaaatgaattatcggggagatttaaaaattcttcaaaaatgtcaaaataataactattttatcttttttatgccctaattatgatttgaagctttgcttttcttatttcawccaggcacaccacaactcatgaataaaatatgacaagtttgatagcagccattggagagggttcatccgtaaccgcagacgtgctcagtgtacaaagagcttttgtattccaacagcctttgtttctgggacaggcttttatctaaaagaargaccacgtgtgttctctcatctctcctgtctccctcgcaataccccacaatccctgccttcagcacaacacctgaaccgtgtttactttgtcttttaatgagcacatttctaaacaattagggaacaaataaaaaaccaaagggcactctgctccatatgaacctggcttgaaacaacacatcaaacaattgactctaagagacatggtcagaccacagactaatccacaaagtgggcaactttacatcggaaaaatcactcatgtgatggtgcccacctggaaagatatttaaggcactcacaaggttctctcccgagaagtttccttttcttagcaaaggctaccaggtccyttcaaagttcagactctcgtatgtctttcaaagaaataaatgtgaaaaggaaaaggaaataatgtgtggctctgcaaaaccatcaacatttatcaaatggccccagggatatcagacttcaagtttcgaggttttatttttttaaagcaaacctataagcatcttgttttatcacacatgcaaaaccagctagcttccaagatcccttccaaatacattttctcccagagtttgtttcaaaatatgtaaaagcaagaagacattttaaagtcattccttcgctaaaacttgaagaactgagtcaagatttagatctcctggactgagcatttgccaaacttcccaagttgtgggtttgtttgtggagctttacaaacaaatctaagattaagctgagactacaaaatatttctgacattcctcaagaaaatgaaccctggtattctcaagaaaagcagaatgcaaaaagcttgaagcrtatgttgtattttcataagtttactgtgcagatgcacactggtaactatttctgaagactgcaactccacattttttttctcttcacccaggtagtgcaggtgctccaagacgccaggtasccttgaactgtgactgcttgtatccactagaacaagtcttaagcccaagtgamtggctactgtattgaggctatagttcctgagggggtgagtttagtcacattgtctaacctaatgtcatgttatgttaaactgcaccttaccattgacacttcatgacaacaggcaacccaacagtggttatgtgcagatgcaaaataaaattcttcctcctccaccacctcacaacctcaaacacactctcatgccagacatgcctgcagtttggacagcaagatgagtctgaatctttggcagataaataaggcagcagcttgaacactcatgaaaaagagctaatttttatacccgcgggacagcacacaatagcggcttttggcactctgagaagctgcgcatttagagatgttgggccgagttttccttccaycagacccgattttccaaaggggccaagtgagacctgggaatctggcagtggcatttaaatctttaacagacacagtcaaatgggattaggcaccatacttcagatttagtggtaaaaataaagtagaaagataaaaagatttccaaactagctgaatgtatgcctataccaatcttgcttgaaatcctaagaaatcttatttttatttcaaagaatcccagatggaaatctcaaggtcttgcctgatagatctaggagctgacatccatcaccgtaagccctaattaatcattccctctctgtcctccactggctggacacactccatgtgccttcttccatccatgcccttgaggacagagaaactacaacagtcattagattcacttttcccagaaaaagtctagggrctcatggtctggaacataaaactattagtaatctgcatttgtgccagtaccagtgtgtacccaaatgtctcttgggctctcctttcacaactctaaagctggctgatcagtggcatcctggacacagactgagtagcagagaattggaccagccacactagttaagtcaaccaaaaggatgagttaaacacacttgagaacaacattacggctacatacactccagctgaaatctttcactgatggtgcaaaaatgttggcatttctccaatctagtgtcaatctcctcttttcatttgcctaagagggcatggtggccagctaagttgaggcccagtgctatagctgtaagcaacctacctcccaacccacaccatatagccgctatatgttctgagacctttgtttggcatctggggagaggaaagggagtgtttctcttttttcattatgatrgtagcctgtagggagagaatgaagtatctctctctcctccccaggcctttgggcagggttggagccactatgtttagaggtataagaacacacaggagacaggatagttccttaagagattctgtggattctgggcaaagcagggatagagtccaggaaacaaagtgtggtgtaattggagtaagagtcyttctggacccaggaacactctgctcccmcagagggctggattctggtcaaagtggggaggacacctctgtctccaamagtatctctaaagacctgcatctctggaggccaatcaggcgcagcaccctggacagaggtggtgatttagagaggattctatcagccctggcaatgacaaacctcctccagcagcttcttgaactggccagagttgagaagagagaacaacctgcccagwggtggatgaagctgtcggactgagtggtgagatgccctagaaggaaccccagaaagacttagattcctgagatgacgcacaaaacacgagaggttatgcttggacagaatgatgcaagaatagatgttttatggttattagcaatactgtagttycattggtattcacgggtttgtgaatcctggtgacactgagtctcacaacaaaccattagcagcattaagtagaagtgtacagcatttcaatgtgatcttcttcttccacgtggaccatggatcctttcaatgtctgagactccaggtcagccctataggagagtgttgagccaaggctctatggaaaagttaattacaagaagcaaataccaaaatactcccaaattttaaatgtgtagttcataaagggaggcaggttaatgtaagagttgagttaaaagcaatggagatacatttagataaaagcaagaggaaagtagaggaagacagagtttgtcaggcaggtccacatttgggacttagctacactgcttaacagctgcataatttttctgagcctcaagttcctcatctgtaagatgggataaaattctctatctcacagattttcgtggtatatggtaggctcaacgaacatcagttccttctcatctttcccttcattctcccaaccttaggtacttccaccaattttttaagtacttattacctagaaaatagaagaacaaaatgttacagattcttattaatagaagagactctaaaacagtcatcctcaactgagttttgcccccaggggacatctggcaatgtcttgagacatttatcattcccaccacttaggggcactactgtaatctagtgagtagcagtcaagaatactgctaaacatctacaatgcacaggatagctccccacaacaaagaattatctagcctcaaatgtcaagtaccaacactaagaaatctggcctgagaggacctctaaccatcttcccactactttgggaattctctctacaataactctgagggattgttttcctggctttggtttgaacattttcagggacaggcactcactacccctgatacaacctctctctattgtcagttggttctaactcaaaatgcctctccttagcttagcatacactaagggtcagtaggataggaagaacttagaatcaggagcgtgatgtagkggaagatgagaaaagtggtttggagccagattcatggaagttctcaaatgtcatgmtaaggagtttggatttattaggccacaggacacattctgaatcaggcgacaccatgatgggtctcgtgggaggacaatgcctgccacagcttagagtatgacctggagaagagggagattagtgacagtataaggggatatcagggtgaagggatgttttgaattttaggaggcagggacagaattccatcaccccaaaattcgtatgttgaagccctcaatatgatggtatttggagacaaggcctttggaaggtaattaggttagacaaagccgtcgtgatggaataagtgcccttacaagaagagaccagggagcttggcccctctctctctgccatgtgaagatagagcaaggaggaggctatctgcaaaccagggggaaggttctcaccagaacctgaccatgctgaaaccctaatcttggacttctcagcctctaaaactgttaaatttctgttgtttaagccatcaagttctatgatttgttatggcagcctaagctgactaagacagcatgttaagaggaaatagaaggaacataccaaaattgcaaaaaaaggagaacatggctctcaaatcaggttttggaggcaggagattccatgggcttaggtaaaatcggtttagaaaggaagacaatcacatggctctcagaggctgagcctaaaggatgagaagagaggtgatgacggtggaattccagaggaaaaaagagttaaggaaactcatttcacataacctaaatttttactgagataaaggcaaggttatgggcagtaaaagagtgagccaaataagaaaaatggaaaggtttgaaacagatgctctggtatgtatatagggtcagaaagcatttgggatatataagcaccaaaggaagataataagagwccagctaaagctggctaatagaaatttgaaaggctgtaagcagctgagtctcaccattcctactgagcatggatggtggaatttacccaaggtgggggattatagtaaggcagccaggagaagtctctctatacccagtgatggggtaggaagataaaactgagtgaattctgattggggtgataaaaaattttggaaatagtggtgattattgcacaacattgtgaatgtaattaatgtcactgaatggtacatatatatatggtatcacaattttaaaattatatttaaaaaaaaaaaactaagtgtaaaggaaaatgaagccagagaaaagagaaaggggaagaaagaaaggagttayagagaaaaaaagttgggagagaaagaagaaagagaaggaaggatggaggtaaagctgggatatccttccccaacatctatctctatcaccaccaccagagtctgttctcttccagtctgaacagtcttagttcctccaatatactagtgatatggtgttcatacatctcaccctggtccatgcaattcctctggactttaccagtttgtgaattttcctcgtaaaatgcattgcccagaactgaatacgagctccactatggagtctagtgcaatggttcttaactagaggcatttcccccctctctcagggatatgtggcagtatctggaaatattttggttgccacatctgggggaacctaccggcagtgagtgggtggaggcccgggatgctgttaatgcacaaagcataagatagaccccatcaaaaaagaattttctggcctggtgtggtggctcacgcctgtaatcccagcactttcggaggccaaggtgggcggatcacgaggtcaggagatccagaccatcctggctagcatggtgaaaccctgtctctactaaaaaaaaaaaaaaaaaaaaaaaaaattacaaaaaattagcccggcgccatctcaggtgcctataagtcccagctactcaggaggctgaggcaggagaatggcgtgaacccaggaggcggagctttcagtgagcctagatagcaccactgcactccagcctgggcgaaagagtgagactccatctcaaaaaaataaataaataaaaaaggaattatctgacctaaaatatcagtaactctgctctagtgcaactatcatctcccatgatctggacattatgtccctattcaggtggcctaagatagatgacatagactcctctggatcatattgaacttgactcgattaaacaatgcaggtctggccaggcgcggtggctcacgcctgtaatcccagcactttggggggccgaggcaggcggatcacgaggtcaggagatcgagaccacggtgaaaccccgtctccactaaaaatacaaaaaattacccgggtgtggtggcgggcacctgtagtcccagctactcgggaggctgaggcaggaaaatggcatgaacccggcaggcagagcttgcagtgagccgagatcacgccactgcactccagcctgggagacagagcgagactccgtctcataaaaaaaaaaaaaaaaaaaaaaaaaaaaaaaaaaaaaaaaaaaccgcaggtctggctgggcgtggtggctcatgcctataatcccagcactttgggatgccaaggtgggtggatcacctgaggtcaggagttcaataccagcctggccaacatggtgaaaccccatctctactaaaaatagaaaaattagccaggcctggtggctcatgcctgtaatctcagttactcgggaggctgaggcaggagaatcgcttgaacccaggagacagaggttgcagtgagctgagatcgtgccactgtactccagcttgggtaacagccagattctgtctcaaaaaaaaaaaaacaaaaacaaaaayaaaaaaaaacaaaaacccacacaggtcttttttacatgaaatgctctcaagtttggcttgttgttgtacagctgaggtgttagaccccttggaagaactttatattaacccctatgaaattccatcctttcagttttggtttctggttacagtccatggagataatgaaatgagaggcttggttctaacattcagtgaaggagcaatttctctcagctcttcattacttccagcagcagctcccaaataggcgactacaactggatccaggatgctggtgattggcagcattctctcagctagttttctgcctgcttcagtcaaaatgagctgggtttttacctgagcactcaggtgagagcagccctctaagtaacagcgccccctatcatacttccygcacatcttactgccgggtaccacagcttcttccctcccctgcagggaaaaggagggagcagaaacggctgatgatgagtcaggccagatatgtacatgtatgtggcttggggttggggaagttgtttctcaaccactctctgtataatgcgaaatatttgaattgaataaaacagcattaagagtgtggttcttctatttttgtcagcagagctatatggacctgaacttttcactaagtctaaaagacaatcaaatccacaggctaacattaaggctccagtctatgatctccaaatgacaaaycttcagagagaaaattacagaaatgagattcactgtaattttgaaaattgaattcttatgttacgattgtttgtgttatatccattacattattttattttaatgtcagtataaggcagccaaatttcctttcttggaactgtcttttcttatgacatcatatacttttttaaatattaaaatgtcatatcttagtaaaatgttagtgaaatgaatagatcacagttaatatatgtacatccttccttggcaaaaataaaaagttggagaccctgcataatttcctaaataattttttctacaattttccaagactgtgaaacccaaaattctaggagcaggtgacctaaacatttgacaaatacaactgtgacgtgttcgtgcaagttgctgatgagaaatgtcagcccagaaattatatatacaaaccacatagcatggccctwgggttcatccttcaggtcaacatcaattcatgaatcaacattcttaggatatgtttgttcagtaaactataaatctgcctaactatattatcaacacgctcacatttaactgtcttatttctgagacactgttaaaggccctactgaaatcaaagtcaacttgtctgtgagatagcaatagataacytagtccagaacctggaggtacttgaatttatttttcctgcttgtcatgtactccctcttttttggtagctacacagtgattttcctctggagatccaccactcacccactttcagcccatatgatgcaggtgttcactccaccctgcaactctatgggtaggcatggggttcaggtctggkccatcaacaccgtccatcctcttgaccacatatttggcttaaggatgtgtatatgccccatgacaaaccaatgagacacagttccagaagttttgttctgcttattgatgaaaacaaaacaaaacaaaacaaagcaaacaacttgagtagcatcttccaactggaattcctgagaaaatatgatataagcctgggatcctagggaccactttgctcctatggggacagcctgcctaaatatagccagcccaagacagagtggagcaaagagatggagagaaagtgagattaagccatgatgacatcattggagcaccttattccaggaggatgcaggttacatccaacactaactttaataacaagagctaattaatttctcccttttacttaagccattttgaattggctattgatcttttagacttggccctggtttttaaagaggtggtggcctaatgaaggagaccggcacctaaaaatacaaattacaagaaaatatgtagttagagctagactcaaatgtgattaatgtaggggcacaaagaccaaactgaactgattccaccttccagggttcaaaaagccatgaggaaaaaaaatatgacatatgagtgtattcttgaactagctccagcagagtgaatcatttctaatgttaccatctgtttaatttctttaattcagaattttaccaagaagagatattaagatcactaggctctgctatcctatgctttttggaatacaaaatttctccattaaaaataataaggacagatagcatagaagccattagcacatccctcactctccttgatttttctaagattatagcatagaagttggatgaccaaaactaaatttgttctgtttctttggatgagattcatctgggctcaggattagaaattgtttaaagcacattgaggccctcttcctgttataaccaaattagggcttaattttttctttctcctgtttgctttatactgtactgtattaagaccattcttccggaaggaaaaattgaatcaaataaggaaaagtgtgtgtgtgtgtcatctgttaatgttatagcttctatttcaagcacagcacccattttttcctttttcttctacttcacccagacatagttaatgataagatcttaaaattatggtaatttctgatacgtgggccatatacaaaattttctgcttcaaggacaataatttgagtgaaaagtaatgttgtggtctcaccagttataactttattttacagagaaaattctcaaagaaaagtcagtttttctttgccatctttacaaaccatgtttataaatttttgccctcttacagctcctactgttgaaatgactacttccaaagctgacttgaactagagttggtgccaggttttctcaacagatgcaaaaaagacacttgacaaaatgcaccattcttaaggattttatgtatttatttatttatttagagatggagtttcactcttgttgctgakgctggagtgcaatggtgcgatcctggctcaccgcaacctccacctcctgggttcaagtgattctcctgcctcagcctcccaagtagctgggattacaggcatgcaccaccacgcccagctaattttgtatttttagtagagatggggtttctccatgttggtcaggctggtctcgaactcccaacctcaggtgatccgcctgcctcggcctcccaaactgctgggattataggtgtgagccaccacaccyggccaaggattttattttttaaatctctcagcaaagtaggaatacatgacaactcattctgatacagggcatctacaaaaaaatctacaggtaacatcagacttgatgaaatattgaatgctttcaactaaaattggaataaaaatattcagcatcatttctatttaccactgtactgtaagtactgatcagtgcaataaggcaagaaaagaaataaaagataaaagatgagaaaagtaagactgctattgtttacagatgacaacactgtaaatgaagaaaaccttatagaatctgccacattaaaaaagaaaaaaactaccaaaatcagtggattcagcagaatttcaagatgaatggccaatatataaaagttaattgcaattctatgaaatagtaataaacaataaaaatgaaagttaagtgtaataccatttaaattagcattaaaaatctaatattaaaaaataaatccaacaaaaagctggccatggtgattaacgtctgtaatcccaatgactcagaaggctgaggcaggaggattgcttgaggccaggagctcaaaaccagcctgagcaacacagcaagacttcatctctaaaaagagttttgtttttttttttttaacttagccaggcatggtggcatgtgtctgtagtcccagctactaagaaggctggagtgggagcatcacttgagcccaggagttcaaggctccagtaagccatggtcatgccatcacactccggcctgggcaacagagtgagaccccaactccaaaagaaaaagaataaatccaacagaaaatgtgcaacatctctacactaaaaactacaaaacaatgctgagagatattaaagaaacctaaattgatggaawgatagacaatgttgatggattgagtcatggaaaactcaatattgtattagtattaaaaatatttttaagatgtgcattatccaaaattgatgcatagatttaatgcaatcsaaatcaaaataccagcaaaattttttaaagaaattgacaacttattttaaaatgtaaattaaaatgaaaagaacctagaagagaaaagcartcataaaaaaaaaaaagttggaattcttctactgcctgatttcagtatttaccataaaactgcagtaatagcaaagtgtggtattagcataaggataagctatagatcagcggaatagaaatagattcatatatacacacacacacacaaacacacacacacacacatagacaaataatttttgacaaagtcaatgaaataggaaaagtcttttcaacacatagtgccagaacatctggggagctgtgttttaaaagctgaaccccaaccattattttatatcacacacaaaaattaattccaggctgggcatggtgtctcacgcctgtaatcccaacactttgggaggctaaattaggtggattccttgagatcaggagttaaagaccagcctgagcaacattgtgaaaccccatctctacaaaaaatacaaaaaattagccaggtgtggtggtgtgcacctgtattcctagctactggggaggttgagacgggaggatcacctgagcccaagaattcaagggtacagtgagccatgatcttgccattgcagccagcctgagtgacgtgacagaatgagaaccctgtctcaaaatgataaaataataataataataataataataattccgaggtacattatatactaaacataaaagccataaatttctacaagataaaatttcttcatggctttaaagtaggaaatgatgtcttagaaaagacacaaaaagccacaaaagaaaaaatatatatactgggcttcatcaaaatttaacatttctgttcatgagaaataccagcaagaatatgaatagataagccagagactgtaagaaaagtacctgcaatgcatctatctgaaaaagaacttgcagccagaataaagaactcctacaagtccattttttaaataataataatgaagaaaagactttaatggaccctgcactgagacataggaataaaaacaaaacacacgtgaaaagatgctaaacatcattagtcatcggggaaatacaaatttaaaccacaaagagataatactaaatatacgtttgaatggctaaaatcaaagggactgacaatactgaatgttggagaatatagcaactgcaactcctatacattaatgataggattgtaaaataaataaccactttggagaactcgttggcggtttcttataaagttacatctactctctgtcccagcaattccactcctaaatatttacccaaaataaataatattttcatacaatggaaaactagctgacaataaaaataagccactgatatatgcaacatggctacatctaaaaattttatgttgagaaaaatgaaagcaaatacaaaaagtatagtgaatagtagtattctattcatctaaagttcaaggacaggcaaagctaaatagtggggggtagatgaagtgtcaggaagggataataaaaatatttttatttagagggtgatggttttatgggtgtataaaattataaaaactcatcaataacagttaatatctactcattttattgtatgctaattacaccttaattttatgttattttatttagttatttttgagaaagggtctttctctgtcacccaagctgaagcgtggtggcatgaacacagcttactgcagcctcaacctcctaggctcaagcattcctcctacctcagcctcccaagtagcttggtccacaagcacatrccactatgcctggataattttttttaatgttttgtagagatgaggtctcattgtgttacccaggcttgtcttgaactcctgggctcaagcatccaccgaccttgacctcccaaagtgctgggattacagacgtgagacacagtacacaacctataccttaatwtttaaaagagaaaaaatatgaaaacattgaacttttttgctcttttacaaaacgtgctagtaatttctcgcccgccatagtcccagctgttcactatactgtgtgacatcccctgctttcttccatccctgccctaaaagctaactgtacaaagaattatcactcaaccaagatcaaacagccctagaatagctgcattacttataatcatttaacgtctgtttctatcactggattataaatcccatgagagtagaggttttgtctgctttgttctccattctaaccctattgcttaaaacaattcctagggtataacagcccctcagtaaatatatgtcaaaatatggatggatggatggatggatggatggatggatggatggatggatggrtggctggstggatggatggatggatggatggatggatgatagaatatgctccaatacgcaattgcaaagacatggaaccaacctaagtgcccatcaactgatgagtggataaagaaaattatatatatacacgcatatactatggaatactatttagccataaaaagaacaaaataatgtcttttacagcaacttgaatggagccggaggccaatgttctaagtgaagtaactcaggaatggaaaatcaaaataccatgagttcttacttataagtgagagataagctatgggtatgcaaaggcatacaaaatttataataaattttggagactgagaaggcagaagggtgggaaggggaataaggaattaaaaaaactacatactgggtacaatgtacactactcagatgatgggtacactaaaatctctgactttaccactgtacaattaatccacgtaaccaaaaactactttgtatcccaaaagctactgaaataaataaattttatagatacttaagctaattgagtgttggcagttacttgcagacaaaatatctaaaatgtacccaagaggcatgagggaatatgaggtattcaaggaatcaaaaggacctcaatgtggctggagtacaggaagcagggaggtgagtggtaagacactgctggacatgtagacagaaaccatatcacaaagaccacctaatgattcttaggtggtctatcctaggtgcaacactaagtcattaagggaatactgggtttcctaattccactgcagatggagcaagaggacaaaaattttggctatagaatgaaggttttgcatctgaactgacatgttggagggctaactcttagtagaagctcacccctctttagctatggcaagggtaaagaaagtaattggagctttgcaatccaacccatcagaaagccactaagaatacaaatttccccacctccccagccagcttttccttcattcagtgatgccaacagacagaacaaatgaagacacatagcttgaggacatgcagttcccaactatagctcaagcaagggaaaccatacacagctgccatgctcaagaaggcctaaaacttacaaactcaggtttttcctctgatactcagatcacttgtatccccatataatcccatgacctcaagtgctgccctctgcaataaatgccttctgctatgatgtgaacatttgtcacctccaaaacgcatgttgaaatttaatttccaagattgacatattgagaggtggggcctttaggaagtgactaggtgataagggttctgctttcatgaatagattaatccatttatggatgtatagatgcagtcttcaaccttggacttagcctccataactgaagaaataaattacttttctttataatttactcagtttcagaaattctgttataatcaacagaaaatggactaagacatctgaattccatctcagttccttctctcttttgaatgaaagggtgccaaactgaatagctcttccttttcatcatgcctagatgacctagttatcttgctgaccaagacatgttcctcttgctgaagaaatcatgtttagatgcatatttcaaaagattcagcacattctgtttccactaataaaatgtatcgtacaaaatattcccaaacatgcaaaaccatacattgatatatctttatacacagatacattgcccacacagactacttaacattttctcactatttaaataattcaattgccttcctggtcagcacaacccatcactctgaggcaatactcaaaaattattatatgtgccaggtgttctataaaaaggaagtcaggcatgtaattgtgaacaagacatatctgtgagccaaaggggagcagaccaataatcagctaactgcagtcaccaccagggacttctcctttcgagggcaaagaaaatgaaagggttttatcagcctggaatagtgtgcacaagttgttaacttcagccatgggaatggcacaaaagtcttttcaaggttgtttccagccttcaggatataatggtgtagaaccaggaacaaactacctgggaagctgtgtatcgtacacatcctggatttccacttaccaaaaccactacagagaaataaacaatgtaaaaactggtgagtgtactgagaaaacagtctaaaaatgatctagaacatatcttgtaaataagatttcaccttcaatgtcctttatctgaaaatcacacttggcaaaaacaataggatgagaaaagggcaatgttcaattccacgtgtgtgtgtgtgtgtgtgtgtgtgtgtgtgaaatctgtcacaattccacttttaaataatcataaccactatctattaagtggctctgtatgccacatacttcgatgcttttctacatatgtgaagggaggacaatattaatatctccatcttacagattagaagtctgaggttggagtggttaagttacttgcctaagattactgacctagtaagtgggragaaggatttgaacccaaatctgtctgactccaaatcacatctttccactcatccatgtcaccttagagttcttgaaaaacttggagatttttgtgtaatgattccaaagaacttcattctatgaactatagtaagaagtaaggtcaaaggtccagcagaccctgtgcttctccctctgccaacagacactgtcaaaagatagggagtatctgcaaccacagtccaggtgactacagaagtcttccctcacccaaaagacatggattctagtggggctctgtcactgtttggctcctcagtgtctcagtttccccccttttaaataggataatttctctccttgctcacctatcttcttattagttaaataattagagttaacagactttagacaggtaagaaattctttttccttgcaaagatattttcactttacatggaggtccagcacagagaagcagaaagaacactaagctcagagtcagaggacaagaataaaatatttcatagttcagccattacttcctatgtgttcttggacaagtcatttccctgctttgagcctcaatgtcctcatctagaagattatggcattgcaccagatcaatcacccttcaaatgtggcccacacccagtggtagaccataagggttgtcttgatgggtctaaactggatggaaaaacaaagctccttttattaattgcatgagtaaatggcatcccatttcaaggtgctattttgtatacagccaaagattacttactagtaacctactaagtaggttactgtaatttgttaacagtcaactaaaattaatgtgcttttagtttattcaggactcaactacttagcaacattcaaagttcctactgtgtatgaacatgtgcagatggtggtaaagcccgcaattttgaggaagaacacactaatgtcagtgctatcttcagttgatcatggctttcgattgctgttatgattgcttataaattgatgttaataagctccataattatccatttagattgtaatgggtcatttggttaattctaccatgtgtggtgatacatacttggatcaatgtgtgagacttataattttcaatagttgggctttaaggcatataaaaattagatggctggacaaaaaacaaatatttactgatcacctattatgtgacaagttctgttccaggcactggaacacttctgtgaacaagataacatcctgtcgttcaaaattgtacattctagcagaagactacagacaataaacacatgaacaaaacaagtaaatgaagtgatacctggtttcaaaaaaagggtgatggaaaagataaaatagggtaatgtggtagagagaaggcttcttcagccaaggcaaaggtcctcaaagatgtctctaaggaggtaacacrtaagtcataaactaaataatgagtggcagacttgtgaagatctgggcaactgtattccaggcagagrgaacagtaaggaaaagagcttctgaggcaggaacaagcttggagtatcatggtctggactgtcattcagcaaatatattccctccctactcccactgtggacagaacatattaccatggcccctgatgttgagtttgaccgtatgaatttactttggccaatggagcataaatagatgtgatatatgcaaaggcttaaaacatgctgtgcaataggcttgccctcctgggctaccgccttgcaaagaaaagagtctgccctgagtatgtgctgccccatcattctgggctccagaaggaccacctatggagcagatttgagcttaaactactataaagagccaagccsracaacttraagctgaactcccagtcaagctcagcctagattagctgattccgtcaacttgcagtcctataaaagagagaataaatgcttaccaatgtatgctcctgagttttagagtagtgtgttatacagcaatagctgactgatatagcatgttcagacagtgagaagactggtctgattatgacaagcaaggatgataaatagtataataatatggatgagatagaaaggagtcagataaggtaaaactttacaactttaaaagtctttagtttgcacttcattttaatcatagtggtaagtcactggacagttttcagcataagagtgttgcctgtaggatggactagagtggagcgtaagtggaggacaggataccagttaggaggctattgtgattttctaagcaagaaatgatagtagcttggaataagattgtggctatggacacagtgagatgtgatctaattgaagatatatttttggaggtagaggagatggtactaatcaatagactagatgaggaacataaacataacagtgttcaagaatggcccctaaatcttgggcctgagtaactgagtagatgatggagctgtttagtgagatagaaaaggcttaggattggggcaagaagatgtccagagtggtgaggagagtggatagttttggcataccatgtttgagatgctagcttgccagttagatatttaactctgcctttcagggaagtggtgtgagttagaaatataaatctaagtgtcatcagtgtacagatgatatttggagccatgtgaccagagagcacctgaagaggtggagaagatgagacagagctcagagcaatatttgaagatacagaagctgaggacaagccagcaaaggttacagggaaataagggtctgtggggtaagaggaaagcaggcaaggactgaagcaggatacctagagaagactcaaggctcaaatttgattcattcctagctttaggtgatggctaaagaagatatacaactaattacaaaagaaaataaagaaaagaccaggaaaagtaaacagtaatctcatygttacaacaactcatgtctagaaagtagggttgggtttggcagataagcgatgagtcttgttccctgcacaaataggttttagtcagaaaagtttcagagtcactggatttttttttttaagacagagtctcactctatcacacaggctagagtacagtggcacgatcttggctcaytgcagccaccaccccccgggttcaaggattgtcccacctcagtctcccaagtagctaggattacaggtgtgcgccatcacacctggctaatctttgtatttttagtggagatggcgagatcaccatgttggccaggctgatctcgaactcctgaccttaagtgatacacctgcctaggcctcccaaagtgctgggattacaggtgygagctcccgtgcccacccagagtcactggatttaatagtttctacaagccctttgagctttctagagtctttgaatacagattggttagaagctacattagctcagtrtagattacctgatgtatatatctattgaaaatgtgcacacagaaacattctaggtgaaagaatagaatataaaggaagagctcttccctcccctacctgccacagctcttccacctccaaaaagcactgctatgggttagggatatcaaggggcagaaggcggtgatatggtttggctgtgtcctcactcaaatctcatcttgaattgtagctcccataattcccacatgtcatgggagggacccagtaggaggtcattgaatcaygggggtgggtctttcccatgctgttcttgtgatagtgaataagtctcatgagatctgatggttttacaaagaggagttctcctgcacacgctctcttgcctgctgtcatgtaagacatgactttgcttctcattcaccttctgccatgattgtgaggcctcctagccacatggaactgtgagtctattaaacatcttttctttataaattacccagtctcagatatgtgtttattagcagtgtgagaacagactactacagatggagttttcagtgtgctataaggggaggtaatgagtagacccatgggagccaagatccctgagtctcgaggaaaggcattataatttctgctcttgcttggaaagatttcagtcattttcctcttggtttccccctactacctctttgaactctcctccttacctataaccattacagtaagacatagcacagcactttccccagcttgggaggatgtgtccgccacagcacttcattcccaacagagccaagcaagagcctggctgatgcctaggtgtaaacaacagtctcctcttggaaaaagaagcccttcttactgcaaagtcctcctcaatagaggaatgcaccagagcatggagaaaagccccagctagtaataacaatgctccttcgctggtttcttgtcctctaaccctttgttgctcaaagtatggtccatagacytgcagcatcagtgtcttctgggaacttgttagaaatgcagaatgcctaatctcctgaatcagaatccatgtgttatcaagatccccgaaaggttcatatacacattaaagtttaagaagcatgactccatcatatatttcccttaggactttgcaggaagkggtggctaactgagcacagaattacgtattcatcagttcccctgacaaatactccatctaatctctgtggaaacacggtcccagaattctgaaaattgagagaagtttataaagacttggagtgttccatcgtagaattaaccttgatgggtttgggtgactcatctacattttctttgaagtacccagtaccactagcaatccctctttaaggaaggaagytctaatctctgaaaagttcttaggattattcacagagatgaaaagaaacaccrtgatgttcttggtggcttgacagggaagattctaaaatgtctctgccctttttatcctaatcaggaatattaaataagtcctgattatgcttgtaggcttcagagacctggaggtcagtttaatcacaatggaaaaatgtcatcatctgtgagcagttagagatgaatagaagcccttctgccaggtgacacagtatgacactttcttaagttgagataggagaaaagacaaatggcaatagcataagcccggggtctaggagggaaagctaaawggtctgtatttgggacgtggattaagaatcagacatgcatcaaggcagagggaaaaacacyatgaggggcragaaggctccaggaattcacatgtgcacagaaagctactatttgatttagaatgagaacatcagaaacccagggaggattagaagcagcttaaaaattggttttgttcttaaagttaaaacgggggatggggtgggggaggggccagaaagaagtaaaggagaggagaaaactcagaaccagaaaacatgtcagttcagagaaggaactgaaaaagcaggttgaagcccttttaaaaaagttaaatctgcagaaagcagaaagggaacatcagaaggaacagaaaataaaacattagagctgggcatggtggtgcccagctgtagtaccagctactcaggaggctgaggcaggaggatcacttgggcccaggagtttgaatccagcctaggcaacatagcaagatactgtctctacaaaraataaaattaagataaaatgaaaagaaaatgaaaataaaatattagaaaaagtagatttgaatttctttgttgcaaccaaggaggtactagaaaaagaatatttctgacatcactgatattcctgtcatcatcatgacaacattaagaaaagttatttaaggctaaagaaatcaaatgctgcaacttgggacaccagcatcagcagsaatctgttaaggggactctccattgaggatcaaggagggaaggattcctagatctaagggactccagggccaggggcaaccatggaagttgcagtgccctcaatggtattacaaggctgagaaagcttcaggattcttcaggtttggaaaatgccccagaggagaggagcaagagcctgggaccggggaaatgcaaggccaattacaaagtcccctgtcctaaacatggggttcctgctcccagagatggcagggactgctcagtctgtcttcatccaggaagaccttctcctttcctagtttgaggagtgacagtaaagtgcagggtacgatcaagagtgtggactaggaagccaggtagccaggaccagttctgccaattccaagcaagtgaccctttgaaaaatgaggacagtaatagtgtacatctcagggggttgttataagcattgagtgggctagaaaagtgcccagcatgtggtctgcactcaataagtgttggctattcttccctcactgaaatgtaaattccaccagaacagagattatttgttactgctataacttaggcacaagaatagtatgtggcaaatggcagtgactcaataaatatttgttgagtgaataaatagttccctctctgaatcttcctcctggtataacgatggcgcttgagggtaaagtatcttggttattgtctctttgttttgttgcatgtctctgagtgactcctttaaaaaccgtgcttccagaccacttgagttttctaggccatttcactacttcctttctcatgctaccccctacagtatattaagcacatcctcttgtgaaccctgcagaaagtgagaagaggtcactttgtctctctgcccagggaatggcagtgcgggaacatgtccattaacatgactggcaatttatccagctgaatcccacccaaatcccattgcaggtcacttgagcaaggacctccatccctttcactttctgaggattctcagaagacactgtcaagggaaagacagaaatggtgaagtgcttttaccatgccacagctcccactctctctatcgtgacagaaaatgtaaatacaggcagacagcggctggattattgtctgctgggaacatttaaagagcaacaaagcacagcaggaaagcaagagacagtattcatttaatgttgagcatttggctcccaagatgcaacctgacaacgtggtgtgcatcctgcccatctgcaaatacagcacaaagaacatagtaacattgacggttcatcatttcactttcactcaagggctctgtcctctgcaggcctcactggacaatgtcaacgggccctggaaggtgctgccaaaccaccacgattttagcagagctctgctgatcaacgttgccgtgttccctgctctttgtcaggcagtgcgtccaacagagctttctacaaggacagctgtgctgtccaacacagtagccaatacagcatgattactgagcacttgaaatgtagctagtgcaaataaggacctgaatttttaacttttattttaatcaatttaaatttaaatagccacatgtagcttgcggcaattatataggacaactcagctctaaggtgctaaaagagccctacttgtatctctgctcccagttctaacacctcaatgacttgcttgctcctccaacaggaaacacacctttaagaaatacattaagcaaagtctgactccacttcctggggttaaagaccaagtacactgccatctctgaggaataaagaaataggtcccatctttcaaatctggcttctcgtcctctagcaggaaaagttcttccccaggcattacctcattggtgattcacaataccctgggaaatagatatttcctcctacactttacatgtggggacatgatccaaggtcaagaagctagtcctgcctaagctgggacttgaatccaggtccaagtccagaaccygggctattattcaattccatcagaaaagaatgaagaaaagaaagaaaaagtctttttgaaaacatcaaattttctaacgtgaacacaaacagcaaagtgacccagattttgatccacagtagctcaaaccagtctctcccaggaccctgcatctaagctgaagygctcctgcttaaaaccatcagtgattccccatcatctgcactccctgtgccmcagcaagccagcaaacccagtgacctgacagcacctcaatgcctgttccattcatccactcagtccctcagcactgwgcactcctgtgtgccaggctctctgtaaagcactgcatctctgctcagaatgcctcctgccagcctctcaacctgatgaaaatccccccacccaccagggcttggagtatcctcttctgggaygcttacctggaaaacacacgtgcacagctgtgcacacgcacacaccctctagctctcagcagaaatattggctgtgatcttacaatcttctatgctacattttctcacactgtgtcatagatgatagatgattctgggtgtttttcactacttcgtttacttaacgaatactataccaataactgggatatagcagtgaacatcacaacttaaaggaagctaaactcagggcccttatatctagtatggaagaataacattaaacaaatccacgtataaacataaactataattcctgatcgttccaactctgagcattgcacagygcctaggtaatagtagttctcagtaaatttgattttttctccactttaaatttttgtacttggaatatttatcatagtatcttgtagaatattctttggaaataataataatgttaatagtagagactgtaaccaataatattaccattatggaataatacaactaataataatgctagtagtaggagatgtataataataataatgctaactatggctgacacttaagcatgatgtttcaatcacttgctaatctctctgcaggcactgtattccttaatccttaccacagtactatgaggtacacactactattatctacctgttttacacatgtaaactgaggcacaacacattaaaaaaactgactcagggtcacattctttttgagcattatcatgtattcatggatttttttgtagcaagttatttttatcaattataataattgttgcttttttataattaaattgttccacattgaccaatgggagccctttcagtttacctcttggcccttttttgctctaactcagatatatctgaaaacagataccccagagccaccttgatgtacccctgttccaaattttgtaatcagttctacccagggagctctggttatttttaaaggagaataacaataacaaactgggggscaggattcacaccaggctatcagactccagagcctatgtgagctctagaatgaggagaaataataaaaataagagcaggtaagtaaaaaataaataaataacgtagggaagaaggctacacaggactggagaggagaggtatagaaaagaggaaaggggggcaagcacggtggctcacatctgtaatcccagcactttgggaggccgaggcaggcagatcatgaggtcaggagtttgagaccagcctggacaacatggtgaaaccccgtatctataaaaaacacaaaaattagccaggcatggtggcacatgcctgtaatcccagctactcgggaggctgaggcaggagaattgcttgaaccagggaggaagaggttgtagtgagctgagatcacaccactgcactccagtctgggtgacagagcaagactctgtctcaaaaaaatgaaaggagagaggaagggagggggaggggaggagggtaggggtccagaaattatcaacttttcctttaaacattttagaaatatatcccttgttatggtgaaaataaagaacttcatgatttaaaaaataagtacagaatgtttgatgaagtaaataaagtaatgctgtattttagacaatggacaataaagagcaggcctgagaaattccacagaccaagcagaccaccatcttctctgaatgagaaactccaagatgattcttgaacttaaagattatcctaaaccatgatgacaggggccagctttgacgctgggctaaatgcctaactttttaccccagtgagggcagcgtrggcatctatgcttgcctcacttgtgcactgacaggttgctctgctcggccaggggcttcctgtggctgctggggcaagaggagtagcccatataggagaagctctaactgtctttctcctgccctgccctctcacctgcccaccgtgagtgtttggagagcatgtgagaaggcatgctctagccaatcacatggcctcatttattttcctcttttcacacattcttctctcactcaaaccttcaccccccacttgccctcagtggatgacctcacttcttatttcactaagaatagaggcagaactagctcatctttgcatcttcaagtatactaacctcataaatccatattcattatcctctccctttcctcctgatgccaaggatcagcttaccctgctcctaaaatgagtcccctcactcacatatggcatcccggcccctctctcctattcaaggatttccttcctgcaattagcaacccctctactgcatcatactttacagactctactacaggacccctgcccactttcaaatatgttataatatctctgaccttaagaaaaaactccccttccaaaacaaaaactccctaaacccaaagtcagcattcagctactgctctttgtcactgtacctttttatctaaccccataaacagctggctatacttgtctctgtttctttaccatcctttctcttttaaccttacttcaaacaaggtttcatgctggccactccattgaaactgttccagtcaaggctgcaaaaagatccttgatatggtttggctctgtccccacccaaatctcatcttgaattgtagtttccataatccccacatattgtaggagggacctggttggaggtaatttaatcatgcgggcagttacccccatgctgctgttctcatgatagtgagtaagttctcacaagacataatggttttataaggggctttttcccctctgcttggcacttctccttcctgtcatcatgtgaagaagaacatgtttgcttctccttctgtcatgattgtaagtttcctgaggcctcccagccatgcaaaaacgtgagtcaattaaacctctttcctttataaattacccagtcttgggtagttctttatagtagcatgagaatggactaataaaatcctcatctttcccaagccattggacaatttttagtcctcatctccgtcaaccctcagcagcatttgacccractgctcaccaccttaaactcttagcatccattgcaaaacactttctgagtttttctttgaagttccaaattggttcttcttagtaacctttgctggctccttcttctcttcctaatactaattgctagagatcccgggatcagtctaggcctcctctctatctcactccccagtacttaatttcagttaccaccagaattggttggaggaattattaaaacttatctagaccccacccccaaagtttctaattcagtaattctagggagaagcctgagaaattggatttctaacaaatccccaggggccactgctgctgttgttgctccaagaaccacactttaagagatgctgccctaaataatcttatcaccaccttggcctcaaatatcacacttgtgctgatgaactccagaaatacacctccagcccaatctctcctctgaaccctggacttgtttgacctaatgccttcctgacatctccctgtggacatctaatggatttctcaaatctaacatgaccttagatgactgaatgatatcagcacctcccctagtctttccaatggtaataccacaaatgcagtcttgattcctcaggatccctcatactccatatccaatccatcacatccaatccatcctgttgtctctacctataaaatatatatatcccaaatctgaatacttctcaccatatccttcatgatgatcctcatcggagccatcatctcacctggattcctgcacctctcctcctatctggtctctctagttacattcttcaccttatacacaaaagcagccagtcatatttcaaaaatactaatcatagatcattgtcctgctcaaaatcctccaactgcttcccacccatggaaaacaaaatctaaatttctctccataacctctaaggcccaatatgatctgtctcctgcttacctctctgacattaactcctgctactcccamttctcaccttctctactttagtcaccatgatcttctacattttcctcaaactcaccaagcttggagccttcatacttgctgtttcatctacccargatgtccttctcctggagtaggaaatggcttcttccatcacctcaggtaggtctctgccctaatattaactccttcttgaggacttttctaagcatttcatctaaaaacatccctatcacctgtactctgttgctttcctttattttacttcatagcacttgtcactaacagagtcttattatatatttatttgtctactggttaattgactgtctacgctagaatgcaaagtccaygagggcaaagactgtcccttttcttgttatagtcccatcacctaaaacaataactagtaaagagtagacactcaaaattttgttgattgaataaatgaacgaatggcctttgtctctattcaacattatcttgtaatttatttgttcatgtgtttgttttctctctcttctgattttatgcaaccttcataagggaatttattctcttggtcattgctgtagcctcaatgactgcacagtggtaggtactcaacaaatacataaggaaaaaataaacttctacatatggaccactcttaccattagaatttcccactacacctggggacttttttatttcttcttgtccccatcctctcctctgctgattctacttcctatcctcatctgttcctgcttctcccagcctaagctcctaatctaggttctctttaggcatggtccakctygagctcagactatgctctgaatttgcagttgtcctggagaacttcccaagcacttacaggttaatttctactactgatgaaccatcttgacctacatcaattagatgtcacttctaggaagcaaatacattaggccaagtacctaaggagaccgctaaattgtagctgaatgttagaagatacagtgctcttctgtcagagcaacagatgtaggagagaacaaagactctcaaaacctatggaaggaagatagaggaagagggatggcagggaggaagaggaagcggggagctaacacacttggatagcagccatataccaggccctttgatttacattatttcatttaggtccaactatccctattttacaatcgaacaaattgagacttagaaaggttaaataacctgtttaagtttacccagctggaaaataayaaagcgagggtttgaatccactagaatgtaagttctgtaaatgtagagactagcctttgtgttccccactgtatcaccagaacctggaatggtacctggcatttcaataaatgacttacaaaagaattaatgaatgaactcaggtctaartgatacaaaagcccatgcctccccgccgacaataagctccaaaaccgggtacttaaaactttgtacagctaagctctaacctaactttccaggattttctctctgtcttgccacatgaactcattactcaygtcaaactggcatctacactgtcccttgacagyatatcccctgctgcctcatatgccttcccccacttctcagcctttcccagccatactcacttttcccctcttgctgcaaatcctccaggatcctgccagccccaaatgatctccaaatcctcagacctccaacagcactcaccacctgggagtcattcaggcacaccattaatgctcattatctttacacatatatctgtatttcctccccagctagactctgctggtagttaccttatcagaaaaacaacagtargaccccaaactattagtgcagaacaaaaggacaaaaatccatgcagtaaaagaggcaactgaggccatgaaaagctgaagtgaggattaaagatggagcttaacacaggaggaactcaaatattctctcccatttattcagattcatgaagcataagaacaaagagggaatgggcaggaagaaagggcaaagttctatctaggtctcaggtggtagcaagtgggcccagtgtaaatcagatcacccattcctccagaatacctcctccttccaccgagggaaaggactcggaaaatgatgactagtgagaaaaaaaagactccaaaaccctgaacaagcccagcagaaagctaggcaagtcctagaaaggatgggtcccagaggactccattagaggagcctcattgtgaaatgcttctctagaaaagttggtttagagagcacaccagtgattttgcatgaagggaagtcttttactcagagagtcttctaagacagctgaggacaaagccaacgtgtttacccacacatatgcacatccttaccacatgtatctgcgcacacctgctcccactacaaatggcaacagctgccatttactcaatacttgctaatcccggacatatgcttagcattttttatacatggtttttattttcatccttatagtaaccctgtgaggtggttattattattctgacttgacagataagaaaactgatgtgcagagaggtaagttacctaacctacccggcttgtgaattgtaagtctggaattcaaacccacgtcttaattactatgcacacataatcccaacagcctcatactcaggcacatccccacactcatgccmatgcagacacatgggtattgagcatctgcacatttacactyacagagccataggcatgcactcacacacacaattccacctttaatgcacacactcacagtgacgccccctctaacctaagctacctaacctagctccagttctttattgctagaagcaaaggttcctactctctccccttctttcattcagccacaggcatcagccaagtaaacccaacataataatttcctatgtggtcttaatttgtgcaacagaacctcagcaggtaayttccaaagtgctttaagcccactaaagccttgcagcttgtcaaggtgtcaagacattcacagagtatctgaagccctgggtgccccatataagtgcagacctcctcaggtgtctgcagaactgtgtttctcaaggtgaacagcaatgttaagtagtgtaggtgtcaaatgccccttttggagctgcagctgaaatcatagaatccygactcatacataccgattaactctccactggcttctggacaccaggaaaataaagtgcatttagaatcacagaaaagaacaatgaccaaagaaaatcttcagagatctatgtatccttcccctaatctcagwcaaaattattcaagacatatccagatctggctgctttgaaaatgtaatccctccctcagtagccactttgaagttaggaagttcttccttgggtataaactatactcctcatccagcctctgtgaagtcagggaaaactgcctgccatcatctttgtcttacacattcaggtatccactaggaagcatgccatcctcagtctgctgctctcaaggttaaatgatcccaaaccttgctggctttcaccctgaagcacagacttctgttcaaagcagcggtcacagtcacacaccattcgtgggtacaaatcaaagctgggggaatggaccaaccactgcttgcctctgtttcctctactatggtaggagtgcaccatagcaagatgagccaagcccaaggtgtggtatcaaagaggtctaggttcaagtaccgattctgccatttaacctctctgggtattggctttctcatgtgaaaaagaagactgctatgagaatgaaatacaatggacttaaatttgtgacagactgcacacatctttgggaatatgatgcaaaaatagaccctttccccagtaaaatgcatacacacacaaaatttacatgcaatttcaggcagttyacaggctcactgatgcttctccatggactgttaagatctctaagatacaacaggtgtctcttagacaagcacaatactgttagctgctaatttaacagtataataytaataatcttttacatatttgcttattttccaactatactttcatatcttaaaggacaggaatcmaacttggatctgcctgtaattcacagttcctacatggtaccttgcagttagtgagccattagtcctctttgattatttgtttcaacggggaagctgtgtctaaggtcctatatgattaagcgaagccaagtgtcckccttggaaattcatcttctctctacatttcgaagctacagccaatccactggagctcaagccagagatggaacagctgctttccctttcccttggcccagactaacacagtcattccatctatcagacatcctgagtgcatccaatttcctcyccattggctcagctccacagacagcttgccttcccaaccgccacagcagaagagagcataaagtcaggcaaaagaagtgactcacagttattctctcctagtactccattactgtgtggaaatacctgcccagcactagatataagggaggtctttaaccatggagataggtgagtggatgaatggatggatagatgaaaggatggatggatgaagatgagatagaattaaactagcaatctatcaacatattcaaattaataaatgtaattcaccacacaaacagaatttttaaaatcatatgatctcaatatatacagaaaaagctttccataaaatccaacatccctttatgataaaaaccctcaagaaactaggtatcaaagggacataactcaaaataataaaagccatctatgacaaatccataaccaacatcatactgaatgggcaaaaactagaagcattccccttgagaactgtcacaagataataaagctcactctcaccactcctgttcaacatagtattggaagtgctagctagagcaatcagacaagagaaaaaaataagaggcatctaaataggtcaaaaaagaagttaaactatctcttcactgacaatacaattctatatctaggaaaccctaaaaacactgccaaaaggatataagagctaataaactgtttcagcaagctttcatracacaaaatcaatgttaaaaaaaawcagtagcatttttatataccaataatgttcaagctgagagccaattcaagaatgtaatcccacttataatagccataaaaaaaataaaatacctagcaatacagctagccaaggaggtgaaagatttctacaaggaggactgcaaaacagttaaaggaaatcatagatgacacaaagatttgaaaaagtattccattcttttggattgcaagaatcaacatcattaacatggccatactgcccagagcaatctacagattcaacactattcatatcaaataaccaatgtcatttttcacagaattaggaaaaactatgatgaaattcacatggaaccaaaaatagagccccatagtcaaagcaatcctaagcaaaaagaacaaagccagaaacatcacattacctcacttcaaactatgagactacagtaaccaaaacagcatgatactgrtacaaaaacagacacatagaccaagagaacagaatagagaacccagaaataaagccacaaatctacagccatctaattattaacaaagttgaaaaaaaaaaataagcwatgaagaaaggatttcctattcaataaatgatgatgagatagctgactagccacatgcagaatgaaatcagacacctacctttcactatttacaaaaattaactcaatattgattaaagatttaaatgtaagacatcaaactatatgaatcatggaagaaagcctaggaaacaccattctcgacattgaccttgaaaagtaagaatttatgactaagtcctaaaatgcaattacmacaaaaacaaaaattgacaagtagaagctaattaaactaaagagcttctgcacagcaaaagaaactatcaacagagtaaacagacaatttacagaacaggaracaatattcacaacctatgcatccaacaaaggtctaagatccagaatctattaggaacttaaacaactgaacaggcaaaaaacaaataaccccattaaaaaacacataaaagacgtgaacaaacactcytcgaaaagatacatagaaacggccaacaaacatatgaaaaaatgctcagcatgactaatcattaaagaaatgcaaatcaaaaccacaataaaatascatctcataccagttagaataactattattaaacagccaaaaaacaacaaatgctagttaggctgtggagaaaaatggaacacttatacactgttggtgggaatgtaaattagtgcaatcactgtggaaagcagttaggagatttctcaaagaatttaaaacaaaactaccatttgaggttccgggaaaactggctagccatatgtagaaagctgaaactggatcccttccttacaccttatacaaaaatkaattcaagatggattaaagacttaaatgttagacctaaaaccataaaaaccctagaagaaaacctaggcaataccattcaggacataggcatgggcaaggrcttcatgactaaaataccaaaagcaatggcaacaaaagccaaaattgacaaatgggatctaattaaactacagagtttctgcacagcaaaagaaactaccatcagagtgaayaggcaacctacagaatgggagaaaattttacaatctacccatctgacaaagggctaatatccagaatctacaatgaacgccaacaaatttacaagaaaaaatcaaacaaccccatcaaaaagtgggcaaagtatatgaacagacacytctsaaaagaagacatttmtgcagccaacagataaatgaaaaaatgctcatcatcactggcmatcasagaaatgcaaatcaaaaccacaatgagataccatctcacaccagttaaaatggcgatcattaaaaagttaggaaacaacaggtgctggagaggatgtggagaaataggaacacttttacactgttggtgagactgtaaactagttcaaccattgtggaagacagtgtggagattcctctaggatctagaactagaagtaccatttgacccagccatcccattactgggtatatacccaaaggattataaatcatgctactataaagacacatgcacacagaggtttattgcggcactattcacaatagcaaaaacttggaaccaacccaaatgtccatcaatgatagactggattaagcaaatgtggcacatatacaccatggaatactatgcagccataaaaaaagatgagttcatgtcctttgcagggacatggatgaagctggaarccatcattctaagcaaactatcacaaggacagaaaaccaaacactgcatgttctcactcataggtgggaactgaacaatgagaacacttggacacagggcagggaacatcacacatggaggcctgtcatggggtggggggatgggggagggacagcattaggagaaatacctaatgtaaatgatgagttgatgggtgcagcaarccaacatggcacatgtatacctatgtaacaaacctgcacattgtgcacatgtaccctagaacttaaagtataattwaaaaaataaaagaaaaaaatattggtgattgtattaacataatattgagtgttttttttttaaagcaggaacaaagatttttctactgtggggttcaacttgygtaaagttcaatactatgcaaaactaatcgatgatagaagtcagattatggttatcttttccggtgctagtgactagggtgctggtatattgtatttcttagtccagagactgactatacagttgtattcactttgcataaacccagcaagttgtaaacttataatttgtacacatttctttatgattatgtctcaataaaatatttttaataaaaaaactaccatttgatgcaacaatcccattgctgggtatatatcccaaaaaaaatcattctaccaaaagacatatgtgcttgcatgttcatcacagtgctattcccaatggcaaagacatggactaaacctaggtgcccatcagtggtaaattagataaggaaagtgtggtatatatgtgccatggaatattatgcagtcataaaaaagaccraaatcatgtcctttgcagcaacatggatgcagctggaggccrctatcctacatgtattaacaaaggaacagaaaacaaaatactccatgttctcacaactgggagctaaacattgggaaacatggacataaagatggcaacaatagacactgaggactactagagtggggaaggaggaagaaagagttgaaaaactaacttttgggtactatgctcactacttggatgatgggatcattcatacttcaaacctcagcatcacacaatatacctaggtaacaaacctgcacatggaccccctgaatctaaaataaatgttggaaaaataaacaaaaactagcaacctagagatcagaaaacatcaaaactaattcctagtacgacctggattctaatttttattctgcaattaacaagstgtataactctaaataaaactttttccaaattarcacctatttcctcacatataaagtgagaaaatggggcttaaaaggtaagtatgtttatataaaaccccagattcatgcattttctttgctttcaagccagagagcaccctctcattagcttacacaattcccacggtgatccagcagattgctgccgccacatcaccacagacttacagcctgccttggagactgtactcagatactcctgttgctcacatgcctgctctgatggttcctcacctactttcatgccatctctggggcttccctgatgccactgacacaggaaatatctcagaactcatatggcatccaggcacatgcaacctggaagtctggggaagtggatgtttcatgtaggaaatttggaacaatagtagttgggagtcaacagatgaatttttctcccttcctcccttactgcatgaactgtttggagatgctgtgactacatatggtgtctttaaaaacatcctggagacagatataatttggctctgtgtccccacccaaatctcatctcaaattataatccccacatgttgagggaggtgattggattatgtgggcagtttagtgagtkcttatgagagctgatggttttaaagtgtggcacttcctcattctctttctctcctgccaacatgtaagacgtgccttgcttcccctttgccttctaccatgattgtaagtttcctgarwcttccccagtcattcagaactgtgagtcaattaaacctttctttataaattacccagtgtcaggtagtatctttgtaacagtgtaagaatggactaatacatataattggtaccrgcagagtggggtactgctataaagataaactgaaaatgtggaagggactttggaactgggtaatgggaagatgttagaacagtttagagggctcagaagaaaaaaagaagatgtgggaaaggttggaatgtcctagagactcgttgaatggttttgaccaaatgctgataatgatatggacaatgaagtccaggccgaggtggtctcggatggagatgaagaacttgctgtgaactggaataaaggtcactcatgctatgctttagcaaagagactggtggcattttcccctgccctrggaatctatgggactttcagcttgagtgagatgatttagggtacctggtggaagaaatttctaaccagcgaagcatttaagaggtgacctgtcttattctgaaagcattcagttatatatgytcacgaagagatggtctgaaattggaacttaggcttaaaagggaagcagactatataagtttggaaaatttgcagcctgaccatgtggtagaaaagaaaaacccattttctggggagaagttcaagctggctgcagaaatttgcataagtaacaaggagctgaatgttaactgccaagataatgggaaacatgtctccacrgcattgcagagatcttcaaggcaaccccttccatcacaggcccaaggcctaggagggaaaaatggcttcataggccaggcccagggcccagctgctctgtgcagcctcaggacatggcacactgccttccagcttctcggtgcagcctcaggacatggcaccctgccttccagctgctccagctccagcagtggctaaaagggaccaaggtacagcttgagctgtggcctcagagggtgcaagccccaagccctggcagtttccatgtggtgttgggcatgtgggtgtgcagaagtcaagagctgaggtttgggaacctccacctagatttcagaggatrtatggaaacacctggatgtacaggtagaattctactgcaggggcagagccctcacggaaaacctctgctaggccagtgtggaaggaaaatgtggggttggagcccccccccacagagtccccactggggcactgcctaatggagctatggaagagggccaccattctctagatgccagaatgatagawccagcaacaggttaccactgtgtgcttggaaaagccacaggcactcaacaccaacctatgaaagcagctctgggggctgtaccctccagagcttcacgggtgcagctgcccaaggccctgggaacccacctgttgtatcagcatgccctgaatgtgagtcatgaagtcaaaggagattactctggagctttaagatttactgagggccctttaggattctggacttggaggaggcctgtggcccctgtgttttggccartktctcccatttggaatgggaacatttacccaatgcctgcacccctactgtatgttgggagtaactaatttgttttttattttacaggctcatagggagaagggacttgccttatctcagatgatactttggacttagatttttgagttaatgctggactgagtyaagactttacagaacagttrggaaggcatgattgattttgaaatgtgaaaaggacatgagatttgggaggggccaggggcagaatgatatggtttggttctgtattcccacccaaatctcatcttgaatggtaatccccacatgtcaggggaggcgactggatcatgggggcagtttctctcatgctgttctcatgataatgagtgagttcttatgagagctgatagttttaaagtgtggcgtttcctcattctctctctctcctgctgttatgtaagatgtgccttgcttccccttcaccttccaccataattgtaactttcctgaggccaccccagccaagcaaaactgtgagtcaaataaacctcctttctttataaattacccagtctcaggtagtatctttatagcagtgtgagaayagactgatacagagactgagtaatcaacttgccaggcaamtatggcttgcttggtaatraactctcttgtatttgttctccctccttctctgctttatttctctgactctggcttcttmggcttgcacttcttaataagggttagtgtagaaaatgattgtctcatatttattgtgttctcactgtgagcctgccactgtgctaaaagctttacatgtatcacctcagctaactacaatgagaataattaccatttattgaggatttatcacaagcattggcgtaaatgttttaaatcactaaatcctgtaataaccctacaaaatgtgtactagtattatctcaatgtgacagatgaggaaactgaagtatacataaccaagttgcccaatkccatacaactactgtgtaaagagatattactcaaaatattactgtgaggtggatgacactgctgttccctttgagaggtgaggaatggagactcagggccgggcatggtggctcatgcctgtaatcccagcactttggaaggctgaggcaagtagatcacttgaggtcaggagttcaagaccagcctggccaacacagcaaaatcacgtctctactaaaaatacaaaaattagctgggtgttgtggcacacacctgtaatcccagctacttgggaggctgaggcsggaggatcacttgaacctgggagatgcaggtgcagtgagttgagatccacaccactgcattccagcctgggtgatggagcaagactttgtctcaaaaaaaaaaaaaaaaaaagagagactcagaaaggtcaagtaacatgacaaaatttacacagctactaagtggcagagctgcaacttgaagtcctggaatacaaagcctgcaccaactatccgccctccccctctgccaagaactcttcaarccctcacatgttaacctgttaagcatctgataaaggatagattcttctggtgttaactacagttagatctctgtgccaaagccaaagtycttctctttaccctttgccctagtcttcccactcacctagtgtcaagtcattaaactctgtctactatctccccgaacttttctaaaaacattaaaatattatattatgctagactgtgaccaacagtgctcacaaatatttgctgcccctccctagaggagaattgtactttccatctcctttaacttaaggcttggcgataagacttactttggccaatgaaatttgagcagaattgacacatatcatttctgagcagtagctttaaatgccagtagatgcttcacctttcttattttcccacaatttgccacagcaacagcaagcctcctwatagcagttgcatgaatcccagggggtgaaaaatgtgaaggagaaaggtaggcaattcatgatgaacatgtattacaagcaagaaataaactcttgatattgtatgtcactgagatttgagggttgttgcaacaacatccagtcttcctgttgatacaaaattcgtacaggaagtgtgaggtactaccataacaacacaacaacaaacaaataatatatatatatataaacaaaatatatatataaacaaaatatatatatacacatatatatatatatatacacaaaatatatatctatatctcattggtttctggagccatgcagtgggcagaaaggagactgtattgttggaagctagactgattttgattcatacttcacaaggatgaaacatttgctaaagctgtcatcctaaataaattggaagaggaaaatgtacctgatgagcttggaaaacagaaagtagtgtgtcttggttactattggctgcatcagacaaagaccaggagaaaaagatgtgttatgcactgaactgtgtccccccaaaaattcatatgttgaagtcctaatctccaattcctcagaatgttactttgtttagagatagggccttacagaggtaatgaagctaaaatgaggttggtagggtgagctctaacccagtatgactggtatccttataaaaagaagaaatttgaacatagagatccacttagagggaaaatgatttgaagagacatagagagaagacagccatctacaagccagggagagagccccataacagacccttccctcacagccctcagaaggaaccaactccaccaataccttgattttggactcctagcatccaaaaatggaaagaaaaaattctgttttytaagccacctastcaacagtactttgctagagcagcccttgcaaactaatacaagataagaacagaaaagaggctgggcrcagtggctcatgyctgtaatcccagcactttgggaggctgaggcaggcagatcacaaggtcaggagttcaagaccagcctggccagcatggtgaaaccctgtctctactaaaaatacaaaaaattaaacgtgtatggtggcgcacgcctgtagtcccagctactcgggaggctgaggcaggagaatcgcttgaaccctgcaggcagaggttgcagtgagctgagatcgcaccactgcactcactccagcctgggtgacagagcaagactccatctcaaaagaaaaaaaaaaaaaaacaggaatgaactggccaccttataaatgaaaaygaaaggaaatagagtccagaaattccagagcttgtagtatcaaaagcaacaacgttttctcatctccagcaataaaagataaacctgaaaaaggctttgggcaggccaattaaatctcagccttgaaaacaaaacaaaaaaactcagccttgaggcaaggattaagtcaaggaaatagatgtcccacccattgttaaagcatctgaacaaattaaggtagtaccagtgaatcttttcagttggacgagataaagaaaagtgactaacagtctggtttttccattaaatcctgataggtttgtggtactcaaaattaaytgtgagtatggttcctggtacataccatggctgattggaattaaatasatgataaaaatcaccaagtttcactcttatttcatagccaaacagtcacactatcttagactaaaagagtcaatgattgtttaggaaataaaataatcctcatgcttccaacctctatgggtaaagagtggactgacagagtttttcaagactataatggaaaaagaaggaccccaagaaagtgaaaccataagccatggaaaacaatgaactagagatctgtttccagggagctaaagaacatgctcaacttttaaggtaaggatccttgtaatgtctgttccattaaatcacaaattttttctagaagtaactattgtgtatcctccattcttcctttttccaaaactatgtgtgtgtgtgtgtgtrtgtgtgtgtgtttttaatagtatatttaaatattctggccttgttcygacaatgaatatttaatatgagaagcagataatttgcttttttccttcatgaatacctgaagcaagagaatcaaataaatacctagagaaagacacatcacaggatcctgggctatgatcctattgccatgattagatgggacatttgtttgtcctccctagagaaaggccagaagagagtgtattttctcaatcaaaaagagattgaaccaaatatttgtgatgagaagaaaagactacaataaactttattatcattcacaaatgtttgttgtcttttcctaggggaggccacttccttgcttagccatggaacttgctttaagcaaaagggatacacttctagaagatgctttcgaggccagctcctgcttcatcatgctctcttttccttctgtcagaacaccagcaaagttctacataaaggctgccctgtcagcttgctccaggagtcccagatgtcccataatgaacacgtaaagaaatcagcccttggtactagctacagtgcaatccagcctatatggaatgatacaaccataaattccctcctctttgaaagatccaagccgatattccttctgcctcatmaacatttggcccctcgttctcctcatcgtactggggctgagttctagagccttaagttctagaatccagactaaygaagattacagatatgaaaaacactatgcacagaaatccagtctgaagactagcaatacattttgccaggagctcatagcttaccttgaagaaatgttttaggtttgacacctaaaagaggaagacccttgagagcaagggtmatgactgccttcttcaaagctatatcccagtacccagtactgtgcctagcacatagctgatgctcagtgaaagaaaaaatattttaatctattaamtaaataaaaaaaamaatgaataaataaaccctgaccctaaacaggccatcctatctgcttgttggtttctccccatatgctatgcatgccatttcatcttttaaaattctgatactgtttttctagaatggcactacccaataaagcagccactggccacatgtggctacttaaatttaaatttaaaatccagcttctcagttgcactagtcacattttaactactcaatagccacgtgtggcttgtgactataggattkggtagtgtagctatagatcttttccatcatcacagaaagttctattggataatgctgctctggaataaccaatttcatttttagaagcagaaagtgaccttggttatttaattcaaccctctccttttatagatagtaatgaaatttaatggtaatgaacataaggacataaatgtgagtccaaaaaactaactgcatgagctcaagaagggagaagtcagagattagcaggaacaagtgaaaaacaaacaaacctctttggggttttggtccacaataagtttactacaagttaatattgtgacaggggctacactaacaccaacatatgcacttgcattgagtgtcacacattgtgctgggtactgatttatgatggaagacaaaacaagtagagtttatggagttatttattatttactgggggacaaaaattaaaggagaccaaaaaaatatgtaatttcaatttatgaaaagaactctgaatgactaaacaggaagtagtgattgataacaaaatggggaaccctcaaaggtaagacagtccttaagaaagtaacatttaagttaaaaagagacgatgagtaagagccagatacagaaaaacaaacaagctgcctaagttcaaaccccagtcaagactctgacttgctgtttaatcttgggcaaggtgtttaacttcctcacttcatttttcccatttgtaaatagaacctctatttataaggaacagaaacttttgttgtaaagttccttgtgtaaaggaactgtgtaaagacaaagaggtcttccaggcaaaaggcaagcagaaatggtggcatgagtcagggaaaatcttggagtattcaggcaaccaaaatgtggccagcatgactgaagtgatttaggtgggacaaacgtaagaccattgcattaaaccaaatttagtcttccttcaaattacttataacagagcagtccaaaaatattatttgctgcctcacaatgtagtattatctccatcattgggatgaccaggcataggattggactaatgagttgttggataattaaggatttcctaaagaattctgtggtaaggtatgtgccataagaatttaaaagccatgaacaaggaggtatgcatgaagatgtatattgcagtattgtttgtcaaaaatctgaaccaagccaagttttcatcaatagcaaatgaatgaatacattgtggtattatgcagtagttcaaactaatgaactagatctaaatgtgttcaaaagaawaatggagagtgaaatgataagtttcagaggaatccatttgtattatgccatttagataattttgtaaaccgcataaggcaacagttaacactcactgartgtttgctacatacccaatgmtgttctaatacattatattaactaatttgcttaatccacagaacaatactatgaaatagacactctatttacaaatggtaaaaatgaagtgaagaagttaaggaaattgcccaagattacmcagctagtaagagtcatagctaggatttgaatgtaggcagtctgtccccaaaggcttcacattttgccactagacataagccctctctactatctatcttgtatatggacacatacaaacgtggtaatatgtaagcatgcacacatacatacacacgtacatggacatggatcgaatgctttcaatcacattaatagtgacatctggcaaggttgataaaggaaaggaaccaggaggggaacttccatttattttgcaattattttttgttaaagatcgaggcaaatatgaaaaaatgtgaagatgtgttgattctgagagacagctacagggttgttgctaatagcatcctttgtgcttgtgtgtatttttattttgttttgtaaaatagttccttgtcaagctatatagccatttgactgagagctaaggccaggaaaagttaagtgatatacccaggggtcaatagtgaaggctagagcttgggtccccaggcacgtggccccatgcctgctctgctagcccatgctgccaggcagtttctgtgcccgatttttttaacagactgtaagcatgagactggagccagcctagcttatcactacatgtgctttatttcatacaytggctgcattcacagaaagttgtatttaagtaaaatrtttgcatatcgaatctttttttcacttacattttaattttagagatgtgttcccacagaaaataatttagccccaatatgtaaagataaatcctaattagaatcagaacattcatgaaagacagtgtagtcaatacagatctaattctcctacaatgctttctcaagaaagcccatgtcaaatatccacaaaggctacattgaaatagctgcctattaaattgtggccccatggttaattcagatgttcttgcagattctctttaagcagacaaaaagactaccagatactcaactctaggtattcagcagsctcctctgagtgaaaggatcatcaaaattccattaaatggaattcaccaactgacaagacaaccatctgtcctggttaatttaaaatacctgtcaaaagacacattggcagatgtcctctggtgtctcttaagagaagctgtatttctrtcaggttgcacttatttattcctttccactttcgtgaagtaggggaaacatgcataaggtggagtgagtctaagccacaggctccacaggcatagtctcctgagttcaaatcctatgtctgccataacagctaatgtgtgmtcacaaatgagttaccggaacctcctgggtctcaatttcctcatctggataaaaaatataaaaatagtacctgtataggaaggctgacagaaggattaaattataaattttaggtatttgaaatcattcttttaaaaaaaaaaaacmaaaacccagctcaaatggcagtcatccatcctcactaggaattaagcgcaatatataattttttttttctcactctgtccccaggctggcatgcaatggcgcgatgtcaactcactgcaagctccacctcctgggttcacgccattctcctgcctcagggtcccgagtagctgggactacaggcgcccgccaccacgcccagctaattttttttktatttttagtagagacggggtttcaccatgttagccaggatggtctcgatctcctgacctcgtgatccgcccgccttggcctcccgaagtactgggattacaggcgtgagccaccgctcccgtcctataatttcaaatatatgcttcttgagagaaaacaaagcagaaatattttcctgatttaaatgcacgaattttcttaacttatataaggtgaacrtactctacacttacttatttgccttttgtctttgatttcttcactgttatatccctcatgctttaaaaagtgcctagcacatggtaggaaattgctaggtatttaattttaaaagtatattttctaataaatactcttaataataacattaattaatatttaattttctttttctcattagccaggtgtggtggcacatgcctgtgggtcctagcyactcaggagactgaggtggaaggatcacctgagcctgggaggtcgaggctgcagtgagctggcaacatgccactgcactgcagcctgggttagagagtgagaccctgyctcaaaaaaaaaattaaaaataaaaaaacacatcagggccaggcatgatggttcacgcctgtaatcccagcacttagggaggctgaggcgggcaggtcacctgaggtcaggagtttgagaccagcctgtctaacatggtgaaactctgtctctactaaaactacaaaaaaaaaatgccgggcgtggtggcgtgatcctgtagttccagctactcaggaggctgaggcaggagaactgcttgagcctgggaggtagaggttgcagtgagctgagaaggcaccactgaactccagcctgggtgacaagagcaaaactccaactcaaaaaaaaaaaaaaaaaaaaaaaaaaaaatcggggagatagcagataggagacaggggaggtagctcccacttcgaatgacagaacagtgtgtggagactcacaccatgaacttttgcttgaagaaccaccacagaaacataccagaaaaaaacaaaagaatgcattgatcctttgaaagaagtggcacacraagcaaactctgggagacagacaaaaaactgagttcccgaagggtgagaggggaaaaaccggcctccaaacatacatgcaaactgaggaatctgaatatccagatctcaggagaaagatttaaacttacctagagctgaaacaaatttagggagctgcacaaaataaaaaatagaagcagcagcaggaagagccttctaggcactcccaatctccagctgaaatccagggaagccatcccttattataattataggcatccttaaagaaggcaatgagtagaactggggasgggtcacaaggtgaaccaagcttccaaatgaaatctgtaataatttcaactggacacaaattttcttgagtaaaatctggggggtggccaggaactgctgcagatatgagcacaggagctgctgaccacaatgtgggcagacagggagggggcaaggcctgaaagccatgttttctttctcagtgggaactttatgacctgggcaagatctgaacagggggcactgcaggagcaagaccagcckcaccaacygcgtgggtgttgggtgagacctttcactaccagctatcccccacttccctggtgaactatatgacacagaagaggcagccataatcccctctgaaacataaccccattggcctgagaaccaccgcccctctaccagccctcacagtggctgcagcaagccccacccaagaagagtctgagcccagacctgcctaaatcttcccccacctgatggtatttctctaccaaccctggtagctgaacacaaaagacagacactccggagctttgtagacctgcccatcaatcacctgagaaaccagaatacttaccctggtcaacttagggcaagcttatatccccctactaccacagctgatgctctcttgaaagcgccacctcctggctggaggccaaccaactcaggccattaaagcaactcatgatggaataatcctgctcccaggaaagagaaaacaacaggtaattccactgcctgcaacatcctagctaaccagaggtcctgtctgtccatgtgacagcttcactgttaactagcattcgagaaagtaagcacactaaacatatttacaaccaaggactcccatagagtctattttactcccctgccacctccaccagagcaggtgctggtatccacagctgggagacctgaagatggatcatatcacaggacttgttgcaaacattctccagcaccagcctagagcctggtagccccactggatggctaaaacccgaagagcaataacaatcactgtagtctagctctcagtaagccccatccgtagtgaaagtgggagagcaccacatcaagggatcaccccatgggacaagagaatctgaacagcaggcctttagttgcagacctctctactggattactctacccaaaagagaaggaaccaaaaaagtaattctgataacatgacaaaacaggttctataacacccccaaaagatcacactagctccccagcaatggatccaaaccaagaagaaatctgaattgtcagataaattcagaaggttgattattaagctactcaaagttcagaaggttgattattaagctactcaaggagatgccagagaaaggtgaaaaccaagttaaagaaattttaaaaaacaatgcaggctatggatgaaaaattatccagagaaatagataccataaaaaaaattataatttctggaaatgaaagacacacttaaagaaatacaaaacacaagggaaagtttcaacaatagactagaacaagtagaagaaagatcttcagagctcaaagacaaggcttttgaattaacccaatcagataaaaacaaagaaaaaakaatttttaaaaaattaacaaagcctccaaaatatatgggaatatgttatatgaccaaatctaagaataattggtgctcctgaggagaaagaaaaatctaaaagtttggaacacatatttgagggaataattgaggaaaacctcactggccttactaaagatctagacagctagacaagaagctcaaagaactaaagatctagayatctagatctaggcatcttactaaagatctagaaatttagacaagaagctcaaagaacacttgggaaattcattgcaaaatgatcttcacctacgcacacagtcatcaggttatctaaagtcaagatgaagtaaagaatyttaagagctgtgagacaaaagcatcaagtaacctataaaggaaaacctatcagatkaacagctgatttcttagcagaaacttttcaagccaaaaggggttggggtcctatctttagtctcctgaaaaaaaataattatcagccaagaattttccagcaaaactaagcttcataaatgaagaagagataaagtctttttcagacaaaaaaaaaatkgcttagagaattkgccagtaccaagccagcactacaagaaatgctaaaaggagttctaaatcttgaaataaaacctcaaaatacaccaaaatagaacctccgtgaaacataaatctcacaggrcctataaaacaataacacaatgagaaaaaaatacaaggtacttaggcaacaacatgatgaatagaacagtacctcacatctcaaaactaacattgaattgaatggcctaaatgcttgacttaaaaaatacagaatgacagaatgaataaaaatctaccaaccaagtatccactgtttgagagactcatctaacacctaaggactcacactaactaaaggtaaaggggtggaaaaagctcataatagggacacaacttttcaaaacctctgggatacagcaaaagtggttctaggaggaaagttcatagcattaaatgcctacatcaaaaagtctgcaggagcacaaatagaatatctaaggtcacaccccagggaactagagaaacaagaacaaaccaaacctaaactcagaaaaagaaaataaataacaaagatcagagtagaactaaaacaaattgaaacaaaaaaatacaaaaaaaataaataaaacaaaaagctgattctttgaaaagataaacacaataaagaaaycattagtaaggttaaccaagaaaagaagagagaagatccaaataagctcaattagaaatgaaacaggagatattacaactgacaccatagaaattcaaaagatcattcaaggctactgtgaacacctttgctcacacaaactagaaaatctagaggagatggataaaatccaaccctcctagattaaatcaggaagaaatagaaactgaagagaccaataacaagtagcaagattgaaacagtaattaaaaaaaaactgccaacaaaaaacactccaggaccagacgcattcacagctaaactctatcaaacattcaaagaagaattaatattaatcttactaaaactattccaaaggatggcattctccctaaatcattctgtgaaaccagtgtcaccctaataccaaaaccaggaaaggacataacaaaaaagaaaactacagaccaatatccctgatgaacacagatgcaaaaatcctcaacaaaatactagctaactgaatccaacagcatatcaaaaagatatcacaccatgttctagtgggtttcataccagggatggagggatggtttaacatacgcaagtcaacaaatgtgctacatcacayagacaattagaaacaaatatatgatcatctgaatacatgcagaaaaagcatttgacaaaatctagcatcactttatgattaaaaacctcagcgaaactggcatagaagggacatacctcaaggtaataaaagccttctatgacaaacccaccacctacattatactgaatgggagaaaagttgaaagcatttcccctgagatctggaacaagacaaggatattcactttcaccacttctatgcaacatagtactggaagtcctagccagagcaatcagacaagagaaagaaataaacggcatccaaatctgtaaagtggaagacaaactgttgctgttcactgaagatatgatcgtatatctagggaaccctaaatactcatccaaaaagctcctaaatctgacaaatgaattcagtaaagattcaggatacaaaatcaatgtacacaaatcagtagcactgacatacaccaacaatgacaaagctgagaatcaaatcaagaactcaatcccttttacatcagctgcaaaaaataagaataataataaaatattaataatatacctaaccaaggacgtgaaaaatctatatgaggaaaactacaaaacactattgaaagaaattattgatgacacaaacaagtggaaatacatcccacacttacggatgggtagaatcaatattgtgaaaatgaccttagtgccaaaagcaatctacagatgcaatgcaattcccatcaaaataccatcaaaattcttcacagaactagaaaaaagaatcctaaaattcctatggaaccaagaaatactccatgcagccaaagcaagactaaacaaaaagaacaaatttgaaggcatcacattactcaacttcaaattgtactacaaggctatagttaacaaaacagcatggtactggtataaaaatagtcacatagaccaatggaacagaatagagaacccagaaattaaagccaaatacttacagccaactaatcttcaacaaagcaaacaaaaatacaaagtagggaaagrayaccctattaaacaaatggtgctgggataattggcaagccccaggtcgaataatgaaactggatcctcgtctctctccttakacaaaaatcaactcaagatgggtcagacttaaatctaagaccggaaaccataaaaattctagaagataacatcagaaaaactcttcgagacaaggggtccccaaccccttgtcaggaaccgggccacacagcagcaggtgagcagtaaagaagcaagcattaccacctgagttctgccacctatcagatcagcagcagcattagattctcataggagcatgacccctattgtgaactgtgcatgcaaggaatctaggttgtgtgctccttttaagaatctaatgcctgatgatctgaggtgaaacagcttcatcctgaaaccatcgcctgcccccaccacagtccatggaaatattgtcttccatgcaactggtccctggtgccaaaaagtttgcggaccactgttccagacattcgcttagacatggacttcatgaccaagaatctgaaagcaaatgcaacaaaaaataaatggatgggacctaattaaactaaaaaacttctgcacagcaaaagaaataaccagcagagtaaacagacaaccaaaagagtgggagaaaatattcacaaattatgcatctgacaaagaactaatatccagactctacaaggaactcaagcaaatcagcaagaaaaaaagcaaataataccatcaaaaagtaagcaaaggacatgaatagacaattctcaaaagaagatatacaaatggccaaaaaacattaaaaaaaaaatgttcagggaggttccaagatggctgaacaggaagagctccagtccacagttcccagcatgagtgacccagaagacgggtgatttctgcatttccaactgcggtacccagttcatctcactggggcttgtcagacagtgggtgcaacccaaggagtgtgagccgaagcagggcggggcatcgcctcacccgggaagtgcaagggatcggggaattccctttcctagccaagggaagccatgacagatggtacctggaaaatcgggacactcccaccctaatactgtgctttccaacagtcttagcaagaagcacattaggagattatatcctgtgcctggttcagagagtcccacgcccacacagcctcactcaccactagcacagcagtctgagatcaaactgcaaagcagcagcgaggctgggagaggggcgctcaccattgctgaggcttaagtaggtaaacaaagcagccgggaagctccaactgggtggagcccactgcagctcaggcaggcctgcctgcccctgtatactccagctctgggggcagggcatagctgaagaaaaggcagcagaaagttctgcagacttaaacgtccctgtctgacagctttgaagaaagtagttgttctcccagcatggagtttgagatctgagaatggacagactgcctcctcaagtgggtcccagatccctgagtagcctaaccgactgacacctcttatagccaggtgcccctctgagacaaagcttccagaggaaggatcagacagcaacatctgccgttctgcaatacttgctattctgcagcctctactggtgatacccaggcaaacagggtctggaatggacctccagcaaactccaacagacctgcagctgagggtcctgactgttagaaggaaaactaacaaacagaaaggacatccacaccaaaacccaatctgtacatcaccatcatcaaagaccaaaggtagataaaaccacaaagatggagagaaaccagagaaggaaagctgaaaattctcaaaatcagagcgcctcttctcctccaaaggaatgcagctccttgccagcaatggaacaaagctgagcagataatgattttgacgagttgagggaagaagacttcagacgattggtaataacaaacttctctgagctaaaggaggaagttcaaacccatcacaaagaggctaaaaaccttgaaaaaagattagatgaatggctaactaaaataaacagcaccaagaagaccttaaatgacctgatagagctgaacaccatggcaggagaactacgtgacaaacgcacaagcttcagtagccaattcgaccaagtggaacaaagggtatcagtgattgaagaccaaatgaatgaaatgaagcgagaagagaagtttagagaaaaaagagtaaaatgaacaaagcctccaagaaatatgggactatgtgaaaagaccaagtctacatctgattggtgtacctaaaaatgatggggagagtggaaccaagttggaaaatactcttcaggagaacttccccaacctaacaaggcaggccaacattcaaattcaggaaatacagagaacgccacaaagatactccttgagaagagcaactccaagacacataattgtcagattcaccaaaggtgaaatgaaggaaaaaatattaagggcagccagagagaaaggttgggttacccacaaagggaagcccatcagactaagagaggatctctcagcagaaactctacaagtcagaaaaaagtgggggccaatattcaacattccttttttttttattttgttattattataagttttagggtacatgtgcacaacgtgcaggtttgttacatatgtatacatgtgccatgttggtgtgctgcacccactaactcatcatttagcattaggtatatctcctaatgctatccctcccccctcccccccaaccccacaacagtccccagtgtgtgatgttccccttcctgtgtccatgtgttctcattgttcaatccccacctctgagtaaaaacatgcggtgtttggttttytgtccttgtgatagtttgctgagaatgatggtttccagcttcatccatgtccctacaaaggacatgaactcatcattttttatggctgcatagtattccatggtgtatatrtgccacattttcttatatccagtctatcattcttgaacattagggttggttccaactctttgctattgtgaatagtgccacaataaacatatgtgtgcatgtgtctttatagcagcatgatttatagtcctttgggtatataacccagtaatgggatggctgggtcaaayggtatttctagttctagatccttgaggaatcgccacactgtcttccacaatggttgaactagtttacagcyccaccaacagtgtaaaagtgttcctatttctccacatcctctgcagcacctgttgtttcttgactttttaataatcgccattctaactggtgtgagacggtatctcattgtggttttcatttgcatttctctgatggccagtcatgatgagcattttttcaygtgtcttttggctgcataaatgtcttcttatgagaagtgtctgttcatatactttgcccactttttgatggggttgtttgattttttcttgtaaatttgttggcgttcattgtagattctggatattagccctttgtcagatgagtaggttgcaaaaattttctcccattctgtaggttgcctgttcactctgatggtagtttcttttgctgtgcagaagctctttagtttaattagatcccatttgtcaattttggcttttgttgccattgcttttggtgttttagacaggaagtccttgcccacgcctatgtcctgaatggtattgcctaggttttcttctagggtttttatggttttaggtctaacatttaagtctttaatccatcttaaattcatttttgtataaggtgtaaggaagggatccagtttcagctttctacatatggctagccagttttcccagcaccatttattaaatagggaatcctttccccatcgcttgtttttgtcaggtttgtcaaagatcagatggttgtagatatgcggcattatttctgagggctctgttctgttccattggtctatatctctgttttggtaccagtaccatgctgttttggttactgtagccttgtagcatatagtttgaagtcaggtagcgtgatgcatccagctttgttcttttggcttaggattgacttggcaatgtgggctcttttttggttccatatgaactttaaagtagttttttccatttctgtgaagaaagycattggtagcttgatggggatgtcattcaatctgtaaatcaccttgggcagtatggccattttcacgatattgattcttcctacccgtgagcatggaatgttcttccatttgtttgtatcctcttttatttcattgagcagtggtttgtagttctccttgaagcggtccttcacatcccttgtaaattggattcctaggtattttattctctttgaagcaattgtgaatgggagttcactcatgatttggctctctgtttgtctgttattggtgtataagaatgtctgtgaatttttgcatattgattttgtatcttgacattcttaaagaattttcaacccagaatttcatatccagccaaactaagcttcgtaagtgaaggagaaataaaatcctttacagacaagtaaatgctgagagattttgtcaccaccaggcctgacttacaagagctcctgaaggaagcactraacatggaaaggaacaactggtaccagccactgcaaaaacatgccaaactctaaagaccatcaaggctaggaagaaactgcatcaactaacaagcaaaataaccagctaacatcataatgacaggatcaaattcacacatactaatattgaccttaaatctaaatgggctaaatgctccaattaaaagacacagactggcaaattggataaagrgtcaagacccatcagtgtgctgtgttcaggagacccatctcaccagcagagacacacataggctcaaaataaaaggatggaggaagatctgccaagcaaatggaaaacaaaaaaaagcaagggttgcaatcctagtctctgataaaacagactttaaaccaacaaagatcaaaagagacaaagaaggccattacataatggtaaagggatcaattcaacaagaagagctaatgatcctaaatacatatgcacccaatacagcagctcccagattcataaagcaagaccttagagacctacaaagagacttagactctcacacaataataatgggagacattaacaccccactgtcaacattacacagatcagcaagacagagagttaacaaggatacccgggaattgaactcagctctacaccaagcggacctaatagacatctacagaactctccaccccaaatcaacagaatatacattcttctcagcaccacatcacacttattccaaaattgaccacatagttggaagtaaagcaatcctcagcaaatgtaaaagaatagaaattataacacackktctctcagaccacagtgcaatcaaactagaactcaggatttagaaactcactcaaaaccactcaactacatggaaactgaacaacctgctcctgaatgactttcgggtacataaggaaatgaaggcagaaataaagatgttctctgaaaccagtgagaacaaagacacaacataccagaatctctgggacacatttaaagcagtgtgtagagagaaatttatagcactaaatgcctacaagagaaagcaggaaagatctaaaattgacaccctaacatcacagttaaaagaactagagaagcaagagcaaacacattcaacagctagcagaaggcaagaaataactaagatcagagcaaaactgaaggagatagagacacaaaagaaaaccttcaaaaaaaccaatgaatcygggagctggttttttgaaaagatcaacaaaattcatagactgctagcaagattaataaagaagaaaagagagaagaatcaaatagacrcaataaaaaatgataaaggggatatcaccaccgatcccacagaaatacaaactaccatcagagaatactataaacacctctacataaatgaactagaaaatctagaagaaayggataaattcctcgacacatacaccctcccaacactaaaccaggaagttcaatccctgaatagaccagtaacaggctctgaaattgaggcaataagtaatagcctaccagccaaaaaaagtccagcaccagacagattcacagctgaattctaacagaggtacaagcaagagctggtaccattccttctgaaactatttcaatcaatagmaaaaagagggaatcctccctaactcactttataaggccagcatcatccaaagcctggcagagacacaacaaaaaaagagaattttagaccamtatgcctgatgaacatcaatgcaaaaatcctcaataaaatgctggcaaaccaaatccagcagcacctcaaaaagcttatccaccatgatgaagtgggcttcatccctgggatgcatggctgcttcaacatacacaaatcaataaacgtaatccatcatataaagagaaccaaagacaaaaactacatgatttctcaatagatgcagaaaaggcctttgtcaaaattcaacagcgcttcatgctaaaatctctcaataaattaggtattgatgggacgtatctcaaaataataagagctttttatgacaaacccacaaccaatatcatactgaatgggcaaaaactggaagcattccgtttgaaaactggcacaagagagggatgccctctctcaccactcctattcaacatagtgttggaagttctggccagggcaatcacgcaggagaaggaaataaagggtattcagttaggaaaagaggaagtcaaattgtccctgtttgcagatgacatgattgtatatttagaaaaccccattgtctcagcccaaaatctcctyaagctgataagcaacttcagcaaagtctcaggatacaaaatcaatgtgcaaaaatcacaagcattcttatacaccaataacagacaaacagagagccaaatcatgagtgaactcctattcataattgcttcaaagagaataaaatacctaggaatccaatttacaagggatgtgaaggacctcttcaaggaggactacaaaccactgctcaatgaaacaaaagaggacacaaacaaatggaagaacattccatgctcatggataggaaactcagtatcatgaaaatggccatactgcccaaggtaatttatagattcaatgccatccccatcaagctaccaatgactttcttcacagaattggaaaaaaactactttaaagttcatatggaatcaaaaaagagcctgcattgccaagacaattctgagccaaaagaacaaaactggaggcatcatgctaccttacttcaaactatactacaaggctacagtaaccaaaacagcatggtactggtaccaaaacagagatatagaccaatggaacagaacagagccctcagaaataataccgcamatctacaaccatctgatctttgacaaacctgacaaaaacaagcaatggggaaaggattccccatttaataaatggtgctgggaaaactggctagccatatgtagaaagctgaaactggatcccttccttacaccttatacaaaaatgaattyaagatggattaaagacttaaatgttagacctaaaaccataaaaaccctagaagaaaacctatgcatcaccattcaggacataggcatgggcaaggacttcatgtctaaaacaccaaaagcaatggcaacaaaagccaaarttgacaaatgggatctaattaaactaaagagcttctgcacagcaaaagaaactaccatcagagtgaacaggcaacctacagaatgggagaaaattttacagtctacccaactgacaaagggctaatatccagaatctacaaagaacttaaacaaacttacaagaaaaaatcaaacaaccccatcaaaaagtgggcaaagtatatgaacagacacttctcaaaagaagacatttatgcagccaaaagacacrtgaaaaaatgctcatcatgactgagcatcagagaaatgcaaatcaaaaccacaatgagataccatctcacaccagttagaatggcaattattaaaaagacaagaaacaacaggtgctgcagaggatgtggagaaataggaacacttttacactgttggtggrgctgtaaactagtycaaccattgtggaagacagtgwggcgattcctcaaggatctagaactagaaataccatttgacccagccatcscattactgagtacatamccaaaggactataaatcatgctgctataaagacacatgcacacgtatgtttattgtggcactattcacaatagcaaagacttggaactgacccaaatgtccatcagtgatagattgggttaagaaaatgtggcacatatacaccatggaatactaggcagccataaaaaaggataagttcatgtcctttgtagggacatggatgaaactggaaaccatcattctcagcaaactatcacaaggacagaaaaccaaacaccgcatgttcttactcagaggtgggaattgaacaatgagagcacttggacacagggtggggaacatcagaaactggggcctgttgtggggtgggggaaggggggasagatagcattaggatatatacctaatgtaaatgacgagttaatgggtgccgcacaccaacatggcacatgtatacacatgtaacaaacctgcatgttgtgcacatgtatcctagaagtataataaaaaaaattttattgaaatatatatatwtttttttctttgtcttttttgagatggagtctcactctgttgctcaggctggaatgcagtggcactaccttggatcactgcaacctctgcttcccaggttcaagcaattctcctgcctcagcctcccgagtagctaggactacaggcacgtgccaccatgcctggctaatttttgtatttttagtagagacggggtttcactatattggccaggctgttcttgaactcctgacctcatgatccacctgccttggcttcccaaagtgctgggattacagacatgagacactgcacccagcctattgaaatacatattatccatttaacatatatttkgttttttaagctctgttttgtttttgtttttgttttttctaaaaacagttctgtaatgaagcttgctttgtcaaggactatgttgactgataatgaaagcatcattttataaaaaaaaagttctacgtccctaattatcagggaaatgaaaattaaaaccacaatgagataccaccttactcctgcaagaatggccatagtttaaaaactaaaaaattataggtgttggcatggatgtgataaaaaagggaacacttttacactgctggtaagaatgtaaaccagtacaaccactatggaaaacagtatggagattccttaaagaactaaagtagaactaccatttgatccagcaattccactattggktatctacccagaggaaaagtcattatataaaaaagaaacttgcacatgcatgtttatagcagcgcaatcagcarttgcaaaaatatggagccagcctaaatgcccatctaccratgagtagataaagaaaatgtgtggccaggcacagtggctcacgcctgtaatcccagcactttgggaggccaaggygggcagatcatgaggtcaggagtttgagatcagcctggccaatatggtgaaactccatctctactaaaatacacaaattagttgggcatggtggcgtgcacctgtagtcccagctgctggggaggctaaggcagaggagtcgtttgaacccaggaggtagaggttgcagtgagcggagatcgcaccactgcactccagcctgagtgacagagcgagactccatctcaaaaaaaaagaaaaagaaaaagaaaatgtggtgtatacatatatataccwtggaatactactcagccataaagaggaaagaaataatggcattcacagcaacatggatggagttggagaccgttattcttttttgtttgttttgttttttttgtttgtttttgagacagagtcttgctctgttgcccaggctggagtacagtggtacgatctccactatctacaacctccgcctcctgggttcaagcaattctcctgcctcaacctcccgagtagctagggctacagatgtgcgccaccatgcccagctaatttttgtatttttagtagagacagggtttcaccatgttggccaggctggtctcaaactcctgacctcaggtgatctgcccacctcggcctcccaaagtactgggattacaggcatgagccaccacgcccagtttggagaccgttattctaaatgaagtaactcaggaatggaaaaccaaatattgtataacttataagtgggagctatgctatgagaatgcaaaggaaaagaataatataatggacttcggggacttgtggggaagggtaggaatggggtgagggattaaaaagctacacattaggtacagtgtacactacccaggtcatgggtgcaccaaaatctcagaaagcaccactaaataacttatccatgtaaccaaaaaccacctgttccccaaaaactattgaaagaaattttaatatgaatgtctttttctcacaccatgaatttaagttatcyaaattaatccttaaaaatatcttctaccttggacattatcattattattcaatgtctgaagaggcaacacatttaagagatgaagcaatttgcccaaggttaatttgttcagatgaaattggcccatatagctaaatagtttctaaaataattcttatgattttgcattctctgctgtctctctccatctctgctttccttaatgtactatttgatggcagaaggagcatgactgagagaagagattttagtgcagacggtagaagtggacagatttggagaataaacacagtttatttgctctacgataatcacaaagccatttaatgattttccagaataagccagtgcaggtgttaatttgccccagagagagatttgaaaaaccactccactctcacggctagcttgagcttttatttggcaagagcaaaaacacttctatttgggagacactggtatgtgaattgaatcactcggctaattgattaaatgcaaagttatactaaatcactccactcaaagtaaggttgactagtaaatgctccctgaggtaattagtgactaggctcatccaatcaacagaaaaaacaattcagacttgggcaacagtgggtggcaggaaatctggaagatcggcatttaacaaaccctttgggtaattccatcttactcagattttctgagcattaacagctatagctcaaacctcaagcacggttttgtgaaaatggttacacatgggcagtgttcctatgaaaaagaaaccacatatttaactcctgtacatcttccaaggtctgttcaggtgccacctcccccaaagaccatttcccaggtcatccagtaagaaatttctttcttgaacactcttaagactttatccacacttgacggcaagccagytctcttttattctgaattagggtgccagaggtcatatttgcccttctgaactgtaacgtagttgaggctgagatctttaccttattcatctaggtcttccacaacatgtagctcaaagcctagaakgcaaacaggtgctaaattcctgaatcttcccctggaagcagctacattagcctttgttctatcttgttacataaaacaagctacttgaaagatactatctattcttcctttagaaactcttttgaagcagaactcctgaaaggtagcactttcctggcagaaaaaaaaaaaaaaagcaacatattaaagaatttgcactcatgcatattctaattcacttttataaatgaaccaccgatgacacatcctcccaactacttaacactaagacactgtcagtcaaggagaagtatagtttcaaactctcagatctcctctgagtaccactcaaagcaaagcagaggtgttccaaaatgatttttgaaaatctaatgctggtgtttagaatrgttttcaacttaaatatctgtgccagccttacccatagacactcattcttttcccggcaccatcgctaatttgttgctaaatttggtctaaagttgcctccttgtaagtttggcctagaggtttttctatacatagtgaactgaaacctaactggatgtgtaaacagactgtaacatactcttaaaccaatcattgagttttagccaaccaaaggcagccaactgtttaaacagtgtttaaataaagcaaatgccaagctataaacaattcagctatttccatacctcacttttgttttatgtatatcactttcttttttctgtctgtaaatcctctccaaccacgtgacagtactagacttattctggttgtttggagttgaggagggtggctgttcaattcacaaattattctttgcttaaacttcattaaatgtaatttttctaaagttattgtgacagtgtcagatgacaaaaaataaatggtaagatgtagaccaaaaaaattgagtagtatttttattacttcataatcaggcacaaacaaaacatwagtccactccttacaacctataataggttaaaaaatgaaaaacattaccaaaggctttccctcttctagatagacatcatttattaggtcccttttggcatagtttaaaataaatgtggcaataatgttaaatatatccctctgcagcaaaagcagtgttaagaagaaggcttatagcactaaaggcctaccttaaaaagttagaaagatctcacatcaatgatctaacatcacacccagagtaacaagacaaaaatgaccccaaacctagtgtttttcacwcctagaaaaagaaaaaactaaccccaaagctagcagaagaaaataaataactaaaataagagcagaactgaaagaaattaagactcaaaagtccacccaaagaatcaatgaaaccaaaagttgggtatttgaaagtataaacaagatcaatagagcactagctagattaacaaggaaaaaagaatatccaaaaaagcacaatcagaaacaacaaaggtgacatttcaaccaatcccccagaaatacaaaagatcctcagagactactatacacatctctatgcacacaaaccagaaaatctatccagaaatggataaattcctggaaacacgtaacttctcatgattgaaccaagaaggaattgaacccctgaacaaaccaatatcaacttctgagattgaataagtaattttaaaaaatcctatctaccaaaaaaaaagcccaggccagatggattcacagccaaattctaccagatgtacaaagaaaagctggtaccaattccactgaaactattgtgaaaaattgaagagggaggactccttcctaactcattctacgaagccagcatcaccctgttatcaaaaaacaaagacacaatgaaaaactaaaactataagccaacatccctaccctaatgaacatagacacaaaattcttcaacaaaatacgagcaaacagaatccagtagcacatcaaaaagttaaytcatcatgatcaagtagggatgtaatcaacatacacaaatcaataaatgtsattcaccacataaagaaaactaaaacagaaaccatatgatcatccaaataggcacagaaaaagcttttgataaaatccaacgtctctttatgataaaaaccctcaagaaactaaacatcaaaggaacatacctcaaaataataaaagtcatctatgcaaacccatagccaccatcgtattggacaggcaaaagctgggagcattccccttgagaaatggaacaggcaaagatgtctactttcaccactcctattcaacacagtactggaagtgctagtcagaccaattaggcaacaggaagacattaaaggcatccaaataggaaaagaaaaagtccaaatatccctcttcactgatgatatgattctctacctagaaaaccctgaagactatgccaaaaggttcctggaactcataaacgacttcagtaaactttcaggagagaaaatcaatgtataaaaatcagtaayrtttttayataacagtaacgttcaagctgagagccaagtcaaggacacagtcccatttataatataygcacaaaaaaataaaatacctagaaacacacctaacaatggaggtgaaagctctctacaaggagaactataaaacactgctaaaggaaactatagatgacacaagtaaatgaagaaacsttccatgttcatggattagaagaatcactatcattaaaatgaccatataatccaaagcaatctatggattcaacacaactcctataaaactaccaatgtcatttttcatakaattaaaaaaaaacctacactaaaatgtatgtggatccaaaaaagagctgacataaccaaaacaatcttaagcagaaagagcattaccccacagaaacatcacattaccccacttctatattttctattaccaaactatactataaggctacagtaacctacagtaaacagcatrgtattagtacaaaaacaagcacatagaccaatagaacagaatagagaatccagaaataaaaccacacgcctacaaccatctgatctttactaaatggacaaagataagtgatggggaaaggaccccctattcaataaatggtgctgggataactgaccagccatatacagaagaatgaaaatagactcctgtctctcactatatgcaaaaattaactcaagatggattaaagatttaaatataagacctcaaactataaaaatcctagaagaaaacccagaaaataccattctggacaacagctttgacaaagaatttatggctagtacctcaaaagcaatcacaagaaaaacaaaaattaacaaggaggacctaggcttcagatgatcaaactactccgagctacaggaggaaattcaaaccaaaggcaaagaagttgaaaactttgaaaaaaatttagacgaatgtataactagaataaccaatacagagaagtgcttaaaggagctgatggagctgaaagccaaggcttgagaactaygtgaagaatgcagagcctcaggagcccatgcaatcaactggaagagagggtatcagtgatggaagatgaaaygaatgaaatgaagcgagaagggaagtttagagaaaaaagaataaaaagaaacgaacaaagcctccaagaaatatgggactatgtgaaaagaccaaatctgcgtctgattggtgtacctgaaagtgacggggagaatggaaccaagttggaaaacactctgcaggatactatccaagagaacttccccaatctagcaaggcaggccaacattcagattcaggaaatacagagaacgccacaaagatactcctcgagaagagcaactccaagacacataattgtcagattcaccaaagttgaaatgaaggaaaaaatgttaagggcagccagagagaaaggtcgggttaccctcaaagggaarcccatcagactaacagcggatctctcggcagaaactctacaagccagaaaagagtgggggccaatattcaacgttcttaaagaaaagaattttcaacccagaatttcatatccagccaaactaagcttcataagtgaaggagaaataaaatactttacagacaagcaaatgctgagagattttgtcaacccaggcctgccctaaaagagctcctgaaggaagcactaaatgtggaaaggcacaaccggtaccagctgctgcaaaatcatgccaaaatgtaaagaccatcgagactaggaagaaactgcatcaactaacaagcaaaataaccagctaacatcataatgacaggatcaaattcacatacracaatattagctttaaatgtaaatggactaaatgctccagttaaaagacacagactggcaagttggataaagagtcaagacccatcagtgtgctgtattcaggaaacccatctcacgtgcagagacacacrtaggctcaaaataaaaggatggaggaagatctaccaagcaaatggaaaacaaaaaaaggcaggggttgcaatcctagtctctgataaaacagactttaaaccaacaaagatcaaaagagacaaagaaggccattatataatggtaaagggatcaattcaamaagaagagctaactatcctaaatatatatgcacccaatacaggagcacccagattcataaagcaagtcctgaatgacccacaaagagacttagactcccacgcattaataatgggagactttaacaccccactgtcaacattagacagatcaacgasacagaaagttaacaagtatacccgggaattgaactcagctctgcactaagcggacctaatagacatctacagaactttccaccccaaatcaacaaaatatacattcttctcagcaccacatcacacttattccaaaattgaccacatagttggaagtaaagcactcctcagcaaatgtaaaagaacagaaactataacaaactgtctctcagaccacagtgyaatcaaactagaactcaggattaagaaactcactcaaaaccrctcaactacatggaaactgaacaacctgctcctgaatgactactgggtacataasgaaatgaaggcagaaataaagatgttctttgaaaccaacgagaacaaagacacaacataccagaatctctgggacacattcaaagcagtgtggagagggaaatttatagcactaaatgcccacaagagaaagcaggaaagacccaaaattgacaccctaacatcacaattaaaagaactagagaagcaagagcaaacacattcaaaagctagcagaaggcaagaaataaataaaatcagagcagaactgaaggaaatagagacaaaaaaaaacccttcaaaaaattaatgaatccaggagctggttttttgaaaggatcaacaaaattcataaactgctagcaagactaataaagaaaaaaagagagaagaatcaaatagacacaataaaaaatgataaaggggatatcaccaccgatcccacagaaatacaaactaccatcagagaatactacaaacacctctatgcaaataaactagaaaatctagaagaaatggataaattcctcgacacatacactctcccaagactaaaccaggaagaagttgaatctctgaatagaccaataacaggatctgaaattgtggcaataatcaataccttaccaaccaaaaagagtccaggacccgatggattcatggccgaattctaccagaggtacaaggaggaactggtaccattccttctgaaactattccaatcaatagaaaaagagggaatcctccctaactcgtttkatgaggccagcatcatcctgataccaaagccggtcagagacacaaccaaaaaagagaattttagaccaatatccttgatgracattgatgcaaaaatcctcaataaaatactggcaaaccaaatccagcagcacatcaaaaagcttatccaccatgatcaagttggcttcatccctgggatgcaaggctggttcaatatatgcaaatcaataaatgtaatccagcatacaaacagaaccaaagacaaaaaccacacgattatctcaataaatgcaraaaaggccttcgacaaaattcaacaacccttcatgctaaaaacgctcaataaattaggtattgatgggacgtatctcaaaataataagagctatctatgacaaacccacagccaatatcatactgaatgggcaaaaactggaagcattctgtttgaaaactggtacaagacagggatgccctctctcaccactcctattcaacatagtgttggaagttctggccagggcaatcaggcaggagaaggaaataaagggtattcaattaggaaaagaggaagtcaaattttccctgtttgcagatgacatgattgcatatctagaaaacgccattgtctcagcccaaaatctccttaagctgataagcaacttcagcaaagtctcaggatacaaaatcaatgtacaaaaatcacaagcattcttatacaccaataacagacaaacagagaaccaaatcatgagtgaactcccattcacaattgcttcaaagagaataaaatacttaggaatccaacttaaaagggacgtgaaggacctcttcaaggagaactacaaaccactgctcaatgaaacaaaagaggacacaaayaaatggaagaacattccatgctcatgggtaggaagaatcaatatcgtgaaaatggccatactgcccaaggtaatttacagattcaatgccatccccatcaagctaccaatgactttcttcacagaattggaaaaaactactttaaagttcatatggaaccaaaaaagagcccacatcgccgagtcaatcctaagccaaaagaacaaagctggaggcatcatgctacctgacttcaaactatgctacaaggctacggtaaccaaaacagcatggtactggtaccaaaacagagatatagatcaatggaacagaacagagccctcagaaagaacgccacatatctacaactatctgatctttgacaaacctgacaaaaacaagcaatggggaaaggattccctatttaataaatggtgctgggaaaactggctagccatatgtagaaagctgaaactggatcccttccttacaccttatacaaaaatgaattcaagatggattaaagacttaaacattagacctaaaaccataaaaaccctagaagaaaacccaggcatcaccattcaggacataggcatgggcaaggacttcatgtctaaaacaccaaaagcaatggcaacaaaagccaaagttgacaaatgggatctaattaaactaaagagcttctgcacagcaaaagaaactaccaacagagtgaacaggcaacctacagaatgggagaaaattttcacaacctactcatctgacaaagggctaatatccagaatctgcaatgaactccaacaaattcacaagaaaaaaacaaccccatcaaaaagtgggcaaaggatatgaacagacacttctcaaaagaagacatttatgcagccagaagacacatgaaaaaatgctcatcatcactggccatcagagaaatgcaaatcaaaaccacaatgagatgccatctcacaccagttagaatggctatcattaaaaagtcaggaaacaacaggtgctggagaggatgtagagaaataggaacacttttacactgttggtgggactgtaaactagttcaaccattgtggaagtcagtgtggcgattcctcagggatctagaactagaaataccatttgacccagccatcccattactgagtatatacccaaaggactataaatcatgctgctatcaagacacacgcacacgtatgtttattgcggcactattcacaatagcaaagacttggaaccaacccaaatgtccaaaaatgatagactggattaagaaaatgtggcacatatacaccatggaatactatgcagccataaaaaatgatgagttcatgtcctttgtagggacatggatgcaattggaaatcatcattctcagtaaactatcgcaaggacaaaaaaccaaacaccgcatgttctcactcatagatgggaattgaacaatgagaacacatggacacaggaaggggaacatcacactctggggactgttgtggggtggggggaggggggagggatagcattaggagatatgcctaatgctaaatgatgagttaatgggtgcagcacaccagcatgacacatgtatacctatgtaactaaccagcacattgtgcacatgtaccctaaaacttaaagtataataataataaaaaataaaaaataaaaaaagggcttctgcatagtaaaagaagactatcaacagagtaaacaggcagcatacacaatgagagaaaatatttgcaaactatgcatccaacaaaggtctaagaccagaatctataaggaacttaaacaattgaacaagcaaaaaccaaataacaatattaaaaagtgagcaaatgacatgaacaaacacttttcaaaagaagaaagaagacatataagcggccaataagcatatgaaaaaacgctccacatcactcatcattagagagatgcaaatccaaaccacaaagagataccatctcacacctgtcagaatggctattactaaagagtcaaaatacaatggatgttcaaaagagtcaaaatacamcagatgttcgtgaggctgcagagaaaaggaaacacttatacactgttggtgggaatgtgaatgagtgcagccagtctggaaagcagtttggagatttctcaaagaactgaaacagaaccaccattgactcacaatcccatcactgggtatataatacatatatccaaaagtaaataaatcattctaccaaaaaacacatgtactcgtatgtttgttgcagcactattcacaatagcaaagacatgcaatcaatctaggtggccattaatggtggattggatraagaaaatgtggtatatatgtatataccaaggaatatcacacagccataaaaagaaacaatgaaatcatgttctttgcagcaacatggatgcagctggaggccattatcctaagcaaattaatgcagaaacagaaaatcaaatactacaggttctcacttataagtgggagctaaacattggataaacatgaacataaagatggcagctacagacactgggaactacgagagggggaagatattgatgggtaagggttgaaaaaccactgggtactatccttactacctgggtaaccagatcaattatacaccaaacctcagcatcacacaatatacccaagtaacaaatctgcacatgtaccctctgaatctaaaataaaagttgaaattatttttaaaagcaaagagaaaacttttttaatttaaaaaataaaaaaaaagttctctctcatagtagcctctataacaaattctactacgaaaactatggttacacaatggacttctttaaattctcttactaaaagtatactaaataaaataaataatttactttaaattgcatacttattaaacaggaaaaaaaatctgtatggttagtgatacttcttgttacacattaagcattatagggattcaattatacgagattaataaaacagactacttagttaaaacaaatagtctgtctaacttattctttgacctatttaattttagttagagwaggccaggcatggtggctcatgcctgtaatcccagaactttgggaggccgaagtggacagatcagttgaggtcaggagttcgagascagcctggccaacatggtgaaaccctgtctctactaaaaatacaaaaaattagctgggtgtggtagtgagcacctgtaatcccagctactcaggaggctgaggtaggagaatcgcttgaacccaggaggcggaggttgcagtgagcagagactgtgccactgcactacaacttgggtgacagagcaaaactgtcacggaaaaaaaaaaaaatttagtttagttcataaagaccttaaccaaaaaacatactccatattcttaacattatyttcctaatattcataataccaatctccctggcatactacattctcccaaaaattgtaaatgtttatacatagccattcataaaatgtcaaatagtctgtcttctactgaaactacaaaaactcaataaacaaaaatacatagtcataaagacaccayatgacatatgacatactgagaccaaaaattcaaaataataacaaaaatagcactgaagtccttagttttggtcacactcatctacattaatatctgaccattattacacattgtatgcctatatcaaaatattcaataccacatgtaataatgtactcataaaaattaaataataagaaaaaatctcactaaaagaattattaaaattacgagaggccttcttttagacaaaactcatatactagtccccaagagaccagatcagatcaaaccaaaatgaagtcactcatactaaatataacataatcaaactaaaaatttgaaaaaaaaaaaaagrgagagagagagatcccaaaacagaccagatgtttttttctctcctgaaaacaggagattccagmataaaagggacccctctactctaacctctatwaaaaaaaaaaaaaaactgaagcccctatacacacatgttctactatttcccagtgatatttgagaccaactaaatatatttacaataatgacagagtcacttcaatgcctagagttttggtcagcttctctacttggagagggcactgaaaggggagaattgttaaattaagtttagcctaaagcytcctccttgtaaattccacctgaaagtttctccatacatagtaaactgtaacctaactgggtggtgtaaacagactgtaacctactcatattgatcaccgagtttcagccacagtggccaaatgttcgaacaaggcaaatgccaagctacaacaaattcagctgtttgtgtaccacacctccttccattttttgtacatcactttcccttttttgtccataaatcctctccaaccacccggcagtgacagtctctctgaacctattctggttccgggggctgcctgattcacgaatcattctttgctcaattaaattctgttaaatttaatttgtctaaagtttttcttttaacaccctaaaaaaatttatttcaagcaagaagaaaataaaaatcttacttactcaattctttgtgctctacaaagacagcagtaacaaagataactcaaaagctggctagccccaaaataaatgctaccaggctttgcaattggtactgtagaaatgttcccagttaagtgaggtttctatttaaatgtatcgatattattaayaggctagcactgaaatgaaggttttcattctctgaacacacaattcacagctggacatcagatggtgaaatattaggagaaataaaaataaatgaaggaaagaataatgaactgttttttttttacactttgcacttttgaagtgctttcccataygtagtcattgaattcttatcagtctttttattcgtcccatttccagacaaggaaactgaggcttgaatacattaagagacgtatccactgtcacccttaaatactgcctcaaaatacttccatttactcattgataaaagggggtaataatagtacctattttatatcatagtagtgaggatgaaataaattaaaacaaaaaatgctgattttaatcttctgcccttccccagtcttctgctttttccactatcctaatctacttctgggttaaaatctgacatcaataaygcataaggcagaygatacacatgagggaaaaaaagccaaagctataccctattactttaaaatgtatagactcaagtttaacgagagctcaccaccaagtactgttcgagcactttgtatgtattatttcaccctcactacaaccatatatagtaggcactattattacccccaccttatcagtgagtaaatggaagtactttgagatggagagcttaagtagcttgatagttgctatcatacattaaccttaaagtacaggatttttgaagtcygcctatattaacagagctgtggtgaaacagtaaaatttctgagcatctccagatctgtactgtctaatatggtaacccctagccacaaaaagcaaytgagcacatgaaatatggctagtgtggctgaggaaatgaattttcaattttgcataattttaattaattttaatttagatttatagtgaatatttgatgaaactacagttttcaagacactagccatcagtcaatgaagggcagtgatccttcagagacgggatacaaaagagatgagccctataattaccatagcttactgctctgagggagtttccaggcatagcataggaaggcagaactcaggcaatctccttgagttgaggagagaaagctgaagtctggggagaccaaggcacctagatttcacaggacagtayacacaagagaagatagcagcacaaagacggaaacacagatctacccaaaatcagtattcagctgagtactgacctgtgcatacatgttagaaaattacccaaggacaggaaagacccacccaaaaggcaacagtatccagcatacacgagggccagaaatagtacctatttccaccagtcaaactggaaaatcccatgacttatcagtcactgggtagagtaygctgaaggatcttgcctcagtgatggtaaataattagttctaccctaactactagcactagcacttctctgggcccatctaacaaacctttaaagtaggatctaaaagaattgaattgtgtcccagttactagaacaaaactcaaaggtatttataaaaatacacaaaagctcagtaccaaagacggtaaaattcacaatgactggccattaatcaaaaattaagaggcatgcaaggaagaagtaatgaggagaaaaatcagtcaatcaaaattggcccagcactgatacaattattagaattttcgattaacaacattaaaacagttattagaactgtattcatatattcaaagagttaggtagagacatggaagattttttacacagtcaaactgaacttacagakttaaagctacaatatatgaggtaaaaaatacactaagtgatagtaatgacagataatacagaagtttcgtaaccttgaaggcataacaatggaaatgatcaaaaattatacacagagagaaaaaagaataatgttttaaatttttttaatttaatttttagtctttttaaaataatttttgttttattttttgtagagatgagggtctcactatgttgcccaggctggtcttgaattcctggactcaagcaatcctcctgcctcaaacctcccaaagtattgggattacaggtgtgagcccccatacctggccttagtaaatattttaaataaatataatatcaattagttatggaacacctttaagcagtcaaatatatacatgtaattgtagtcactacagaaaaaaaaaaaaaagaacgaacagaaaaaatatttgaagacataatggccaaatttttcccaagttcagtagatctcatatgcaagaaacatgacaaaaaccacaccagggacatcataataaaatagctcaaaatcagtgataaagagaaagtcttaaaagcagggaaaaatacttgtctccagagggacaaaaatataataacaacagacttcttgttggaaacaatataagtgaaaagacatctttaaagaatggggacaaaaacctgtcggcacagaattttatacttagcaaagatatatttcaaaaataaaagcaaaataaagacttttgcagatgtacaaaatctaaaagaattcatcaccagcagacctgcactataagaaatattagtgaagaaagaaatgttaaatgttaaagaaagtccttcaggcaggatgaaaataatatcgggtggaaatataaagttacacaaaagaacaaagaacacagaaaacagaaacggcaagagcacagacacagatgggaaaaatagacactgaggactacttccagcgggagagtgggagggagtttgtgggctgaaacactacctatagggaattatgctcactacctgggtgatgggatcrtttgtataccaaacctcagcaacacataatttacccatataacaaatctggacaggtaccccctgaacctaaaacaaaagttggggaaaaaaagaaactacatgagttaaacgtataattgattttattatctaaatctgcttaaaagataattgactcattaaataaaaataacaatgtagtcaggagtttataaactaaatagcaaaacaaagagttatagctaataagccaacaaagataaaacaaaattgtaaaaaatattcaattaatccaaaagaagacataaagaggggaaagggaacaaagaatacatggaacaggtaggaaacaaatcacgagaagatagatttaaatataatcatgtcaataatcacattaaatgtaaatagtctaaatacgctgatgaaaaaacacaaattattttattggtttaaataaaaagttagcctccaactatatattgcctgtaagaaaagcactttacatgctgcaatatgtataaatctcaaaatacccataatgagtaaaagaatccagaccaaaaaagcacatactgtatgattctatttatataaaattctagaaaatgcaaattagtgtatagtcacagaaagcagatcaataattgcctagaagtggaggttgggagaggtaagtgggaggaattataaaagaaaaaaggtaaactttttgggtgataactatgttcatttttcttgattgtgatgatggctgcacaggtatatttgtatattaaaattaccaagttgtatattttgaatacacagtttattataatataattatacctcaataaacctgtttaattttttaatctaataattgtctgtacagaataatttgatgaatctacrtttttaactttaaattttatgaaatcaacatacatatcaatyactacaaattaaaaatttagcatgcaaatcggaatgtgttttaagtgtaaaataccaattaattttgaaggccttgttttttaaaaaaagtaaaatatcttattaatatatttttgggttgaccatacgttgaaataatattttttatatgttgggttaaataaaatatataattacttttatctgtttctttttacttttttaatgtggctcttacagatgttacaattaaagatgcagcgcacaatacatttcgattggaccatactgcactagaaaaaggaagatttaattgtagtactcaggaaacatcattatgttcatatttatgcccaacaatgcttagccattctatgatagaataatgggccccaaaagatattcatattttaatccccagaacctgttaatatgtcawcttatatggcaaaaaaagattttgcagatgtgattaaattatgaatcttgagatgagaatacttagattacctgggtggttccaacataatcacaagatttcttataagggaaaatggaaggcagaaggtcaatatcagagaagataatatgatgacagaatcaaagagaaggaaatgtgacaacagaagtcgaccttggactgatgcagccatgagccaaggaatgtggcaatttctggaagctccaacaggcaatgaactgaatgaatattcagtagagcttccagaaagaacacagccctactaacaccttggttttagccccataaatctcttttttgaacttatgacctctagaagtataagataataaatttattttaagtcactaaatttgtagaaatttgttatagcaccagtaagaaaccaatgcaaactttaggtaactggaagtggggtgctgctgtaacaaatacctaaaaatgtggaagaggcttcggcattggataataggctggaaaatttttaaggagcttggtagaaaaggccagttgccttcaacagggagttaaaaataaatatagatgttaaaagtggtcccagcaaagacataaaaggaaatgagggacatattattgaatgaatacccaaagatggaggatccttgttacatgatgccagaaagcttatctgcattttgtcctgtagttatgtggaaagtaaaataaacttggatatttaggtgaggagatttccaagcaaagtgttgaagttacagtctgatttcttcttgctatttatggcaaaatgtgagagaaaagtaagggattgagagaagagctgttaagcaaaaaggagtcaggacttgataattcagagagttctcagcctatccagattgcaaaacacaataaaaggagacacactatcaggaaagcctgctctagagccacgttgtggytaaacaactttttgagagtgccttggaaggatcaaaagatcaaaatattcaatcacctagaggcctctttgtagagatcagtatgtgaatcatggattcccttcagccatctcagtagtagtcaggaatagagacagcattatctaggacagatctgtggataagctgcttgtctagtggacaggagaccttcaagattcttgagaatactataccaacagaaaccctgccaatttggactgaagaagactgagagaggacacaatgaaagatgtctgacaaaccaccaaaactttacaggcaggaaacaagctgattaaactactcaactgcaaacaaatgctatccttcatgaaaaatgaacgatgtctcagaggaatgagccacaagccagaagacagagccaaaaccaaagaggattatttctaagacttgaacccaacggagtttgcactgctgaatttcacaattgtctgggaccagtgactcctttcttctttccatttccttcctttggaacagaaatatctataactggtatcttatgcctgtcccgccattgtattttggaagcagattacctgttttccagtttcataagaccacaataragagaaatttttcccccaaaatggattatacccactgtctcacccatatctgatttagattacttaatgagatgtagaatttttcagctgagattaagggagatttcaatctttgagttgttgctatgatggattaagactttttgagatactgcgatggggtgaatgtattttgcatgtgggacagacatgaatccttgggatctagagggcagactttgtggcaaacaaaataatggctccccaaaaatgtccaggtgctaattgacagaatctataattatgttaccttacatgacagaagggatttgcagatgtgattaagttactgatattgagatgggggagattatcctgaatttctaggtgagccgaatataatcacaggggatataagcgaaaggccttctctgtcaaagttccataaaaaagttactcttcccaccaaagaagctgaaaatccctcccagttgttgtagccgggcagacaacacagagatggttgccaaaacagagaatgcacagattagaaagtagagttccagcccaggggacctacacttgtggaatgaatagtagtaactaaagcaagcagtaagttttttataaggtacatagtacaaaagaaattttaattccattcaaaatgtttattgatcacctactgtgtttcatgcacagtaggtggccctgaggatctaggagtatctaggtcagcaggactcctgccctcttgaagcttacagaccagccaggtttccatagcaactttgtttataaagtatcagcatgagttgttgctatgatggattaagactcagatcaagaaaggtatggactctcaacagtgactggccagatatagcacaatgcaaaaacaaagtaattcagtcwacccttttaaccatgcccagcttacatacttcaccaattcattagtaaggagtaagtgaaaattagtatgtccatagtcttgttacatataattacataataactctagatttgctacatatcactaacaagtcttaagttatctgcactgtaaatatgtaaatctcattctattatgttggttcagccatgctaaaataatccttttgttatcatcataaaaggctgagttaaaagaaccctgccagacattttcgtagaggaatatccaggctgccttactatggtatctggtcagttcatttccctgtttaaacctctacaaaggccccacttctctgagagtaaagcacaaagctgttaastggcctatgggcaagagtaatacttaaaacaggtaacaaaaagtacatggcatcccacctatcaaaatggacactgaccataaatcatcagtacacccaaacccacacatatcagcagaatatcagctctgacaacagggtcccatgtaacctagtctctgtctacccctctagacattcaccacccttccgccatgcgaaagtctttttgttggcttttgccttacctttatatatactatttcctctattcagaatgctgtgagaccccatcccttcctataccaggctttttatccattttttaagtatctgttgacctatcactttgctgatttgaatatctgtgtcccaccaaaattcatattaaaacttaatccctagtgcattaagaggtggggcctttagacagtgattaaattatgaagtctttgccctygtgaatggattagtgtctttagaaaggaaactagctagttatttttctgcctttccatcccttccaccatttgaggacacagcattccacaggacacagtaacaaggcatcatcttggaagcagacagagccagcccccactaagtaccaaatctgctgatgccttattcttggacttcacagcctccagaattgtgagaaacaccatgcttctaagaaccacaccatgttttctctataaatgcttgctgaatgatttaatgaattgtggtccygcttatagtgggcagaactgagtaagctctacctcaaggagaatgcagccataagttttcctctgttcttatggcctatccactagatgaaagatgtaaatataggtataggtgtaagtacaggcaaagatattgataacagctagagaaatgtcctgtaacaataatatagatggtcaatggctttcaagtatgttataaatycatcccactttagatcctcaccaaaatcaaggaaatatttcactgccaaaccaaatattttaccaccatgatctctaatgcctccctcctgccctcagaataataccccctgcatatctaaacactcaagacagcaacacaagagaaatagcaaaggcgatctccagacaaacacacaacaaatgagcactccccagacagaccctcctccccaacctctgccaccatgcaagaaaggaggtgcctttaccttgaaataaaaatgctttgctggcattgtgcattccagacacctgagcaactccaagggtggtgttcacaaggtcaagctcggtgacgatatccatctgaaggtcagggtccatcccaaagcccaccactggaaaggaacaaagagttgtttgggcttaaaatgcagactgttactagcattcagaggttacagagtcggggagtggcaggsaatacaaggaagccaatgatgagtgcttggagagtctttgtctatggagggaaaagaaaagcaaatctttgctcccttmccccgctaatactgtagtttctttgttccttcccccaaccccacccccaattatggattgataatttcttatccaaaactcctggggttaaatatagttcagaattcagaaggtgccatgtgttagaaaggtaatatggcctatatactacattttatgtaacatttttagcaaagtctaactcagaaccccataatcaagtacaacatttctgaagcaaaaagtatgacatacttctctaattggcataaataaagattataaataggttgatatcagtttagatcaagtcttgccatgaaatgagttcaactcaggataggttttgctgtcagatgagttatgaagaaactgggtttccaagctttatagaggtggtgactgcsgatacaagattgtggccctgatccacctgcctcagagactgatgcagtagcaaaatctgacccaccaccaccagtaaacacctccacaaagtgttccctaattaatcagtcacaatcacctgtgttaaggaggaaaaaagtggaaaaggaccctgtccctgttgaagaagsgtggcagagggactggccaggaaggagaatccctggaataatggatatatatttccatccaaggggattcctggatggaaagccagataccctgataactctttttagagaaccttaatgcagagaaatacagccgtgagcctcctcttcccttgtttgagaaagacaaatccctaaagatgcctctcacccatggggtgctctgagcaatgattcattcatgattgcaaagtgatttccaactatatgtattaataaggctagtgatcactctaaggggctatgtttaagccattcataaaggctgtgtctatctacacataccatctcaatagtgcaattttgactgtgctgttggaaatgttttaatcagcaacagctgtcaactctcatctgayggtaatgcagtcactgagacaagatttggagggcttgtacccactgcgtgaatgttcaccgggacatcataagctatcaccacctcacctgtcctcccaccttaacccctggtcctacagccttggagaaggaaatctactctttccttactcttttcctgttaggaaacaggacctgctaggcttctgtcaacagacggttggtcaggaaggcctctttagagctgaaaccggttattgccaaggcagacaaaatgtctataactgccttctcagtttctatcagacttccccttgtcccctgaactgaagatttaagttttccccttccagttgacccaaagatgtcttccttccattcactctgcattcattcatttcataattttttcaacaggtattactgagtgcttactatatagcacacacatggagctcgcattcctgtgggttaggttgggggagggcaaaaaataaacaaatgaataagataatctgagatggcaataaacaccatgaagaaaatagagtaatgggatagaaagcaacttggatgggggggtcctactttagaaaggggggttgaaaagkttctttcaagctgaaacttgaatgactagaaaaggcaagatgggaggaagctttccacatgcagagaagggtgcatgcaaacgaggaacaaactgggagtgtcctaagaacagaaaaaaggctagcatggcagaaactgaatgggccaggggtagagaagtagaaaatgaggccaaccaggcacggtggctcacacctgtaattctaacactttgggaggctgaggcaggaggactgtttgagctcaggagtttgaggccagcctgggcaacatagggagaccatgtctctacaaaaagatcaaaaaattagccgggcatggtggcgtacacctatggtcccagttaattaggaggatcacctgcacccaggaagcagatcctgcagcaccactgcactccagcctgggtgccagagtgaaactctgtatcaaaaaaaaagaaaagaaaakaaaaaagaagagaggccaaagtgggagagagagaagggccagatcatataagccctgtgacccaaaaggagcttggatgttattctaattctgagatataattggagggttctaaggtttatgcttaagggcagaaattaaatttcaggggacctccaagttggtgtttctctggccaggaatttggaatgtggtctggggaacgtgcccttcaccagacgcaagaagaaggaagcacccctgtcgcccaagtgcctttcacaggcctggacagatggcaggcaggctctcaacttaagacctgattatctaatgagttgatgcatgatcaatactttgggtgcaatgaactctgagcaatatgcatatctggggatagtatgagatgacggatgacatgcaagcccaggaaactttccaaaaggacagtggttgactgaacattggccttaaatctttacccctctcatatccacagcctttactgagtggctttgcagttccttccactacaatgggagtaaacctccccatctcttgattttgaggcaagccatgtaacttgttttggccattgggatgttagtaacattattcaggcagcgacttgaatatgcttgtgcagtggggtttgttctcgtctacttccacatcatgakaagaacatgtcccggctggtccactggtccaaggagacctagacatgtggagcgggcagcctacctgagtttgaaaccaagcccagccaaatgcagcctagataagccaaccccaaacacaatttacagatatgtgaaccaaaatcaatggtttgctttaagccactgagtttggggttatttgttatacaaaattattatgacaatattgaccgatgcagggactaaagaccttctacgatggcatccttaagacgctcaaatctcccagactaagagccctgcaattaattgggcaaggcttcaaccacccaaacaaactctgtagaactagcagaacaccccaatggtatccttgaatccccacccccaaatgagaacacagtgccctcaatccagaaagtattgtggaaacaacactaaactgagatccagtttcagtccagtctcttccctctactaaccctgtgcccttaagaaaagcattcatttatcaagcctcagtttcctcatccataaaataggaacgttaatacctgcctccctgaagggattgctgaagcagagacttcaraactctagttctccatatcagcgataacacgggtggcttcatatcttctgctgtaggaaatttcatgttttgggttaccgtgtgtaaaaagatactggtacctgttacaccagactcatgaggactcggggaaactatattcacacttcaacagctccatctggcacataggtggtgcccagctgggggttgtttcatctgtctttaataagaccagttctccagaccactccagctccctggtcctcaattccactggaatcataaaaaaggtacagatggcccctttcctcccagcccttmtccatgcccaagtgacttagaagggcctctcaygctgggtttgctagtaaaatccatatatgacatgtatrttcgctccccaactccctgcccgcaactcaaaagtgaaggagcttctctggctttaagataagtgtattgcttttattatgaaaacacctcataaaaacagagccaaaaaaagagaaatcaattaggcttctggatagttttcttctctgcctttaattggtccccaccaggatgaaaatgcctcgtgcccatagcaggatgtataaaggatagcattttgcatactgcctagggaatcagaaaacctattaataaggcagcattgacatgggctgtcttgaaccttatgtagtgtgagtgtggtctcataaaaaaaaaaaaatgtattgtttctgcttcttgtccaagcrtggagctcctgccctttcctaggaaactcaattaaagttctctactttggacataacggctctacaaatggctaaaattgggaattacaattaagcaagatgaaaagctcctggggaagaaatattttaaaaacctggaaggcagcatgtcaatgtcacagaggcacttgaggcctgactaggattcagaaactccaccctaacaaagatacctgctgctactgctgctattggctgctcctcacccccacccagggaatgctcgggcccacagcccactcagttcacctttggggtcccagacataggctttccagcaaatcctcctgggtctggctgactttaaatttactcctgctcattgtccatggtggaagctgttttcctctggaccatgcagactaaaaaaatgctccaagagctcatttaaccacagaatttcacaaccacttaatcaggtttgggcccctgggcacctacgaaggtccttaataccccaaaagcaattttcttgaagaatatgctctatgcctgttccaagctggccagtattttccatgatccttggaggctgggggctcatgttcacagttccattattcaattcataattaatgatccacctgagagttccttccaaaagaaaatctcttggccaggcgcagtggctcacacctgtaatctcagcactttgggaagccgaggcgggcagatcacctgaggtcaggagttcgagaccagcctgaccaatatgaagaaactccatctctactaaaaatacaaaattagctaggcgtggtggtgcatgcctgtaatcccagctactcggcgtgggggctgaggcagragaatcacttaaacccaggaggcagaggttgtggtgagccgagatcatgtcgctgcactccagcctgggcaacaagagcaaaactccatctcaaaaaaaaaaaaaaaaaattctctcctttccagcaggtggcagcaaaagacattcacttggtcagtaggggctttgcaggtgtaggtactcccttcaccctctgccctggtgaccaaaacaaactggaaagcaatgtgggaataattattgagttttcaattattcacactgccaaagcattggtgaaaactcatagagatagtgtgttattactgctattattgtagccttctaaattttcattattagtgatgtacctgaaaatctctgaattatttctcaaccagaaataacaagaactggagaatggcacctcccgtcttgactccactttgcactctaaaacaagttctctgaacaaggcagatttaagcagctcctcatgacacctatcattagatcttttcatatgcaactgtgtctgcactgcagtcttgctttaattaaaatgtgcctgatatcatctactcagttccattaaaagccggtgatatctgagcagctcactaagtgaaccacatgtttatttcatctaggactgttaacagcccagacaacaattgtcccacttgacaaagaaactttcaacgcagctgtttggatgctgataatcacaagccagcctttgttacctaagaagagggtggatggatgatgtggaaatgatttctgcacagaatcagagggctgcctccagaaagctaccgcttataccctctcaagctacaagatactttaagtgtacaaattgagaggtaattcccccgtctctctgattcttccgataatgtgtgtagaagaaatatgcggcctctagtgttcaaatagtgccaagtgacattgagaacccaagctccctaggcaacagccacaaccagtgggtcagatccttccatgcttccctgcctttgctgaatctgctccctctgccaagaatgccttcccactttgtccacctggaaaactccctagaaagccttgaaggtacatctctcaaatccctgaccaccactcctccctagaattaattcaaactgtctctcctccacatttccttaatacaaacttatactcctacctctccaccacccccccccatcaatctgtaaaattaaaatgcctgccagtttctatctagattcccagctgagctttaagttcctagaagtcaaggactgtcatttcctctttgcataagaaatcctggcacccagcaagacatcgtttgttgaatgagtaaagacatgaatgaatcttcccctacaacgaaatttttacaagatttaaaggggattggaagtggaaagagggaaaatacctgttcttaaagaccccttccacaagcaatgaaccctgaaacacgttccattccgtgataagggtactttggcgacttttcaaaggagtaatgagaacaaaggatttaggcatattccgtagtgatgtgcacttagggatgtgaactcactaacgggttgccccctccctacctagcttcttcctgtctgcggttcctctgtaagatgtccacgagcaccagactctcgcgctcagagccagtagcccacgctctgcactagtcttgcctgtcctgatcttcctggggtgcgcgcactccttcagcgtgtcctggttttaaaagactaacccatccggatgggcctgaactcaagaagcaactattctaagctagactgagccttggcgtctccgcagcctgggaagctcggatagaggtaaggaacggaatgggagrtttcttttgtcccttgagaaatccatattcaacattcttaaccagacgaaagccgctgcctgctcagtcctggggaagtgggaagggccctctgaaagctcctagacgctagatcttccagcgggctaactgccaaagaggggcgcctgggcgcaagcggagggaacttttgagccaaccaagtgcagacgccccttcttagccctctccagatgaacttgctctttggcctagagagaaggccacgcctctaaagaaggaaataaggatggtaaaggggggagaataaagggaaagggaatgaccacacagattctggggtgcagcgcgtamggaggatggctgggtaggattgcaaacctccgacactccccccagttgacaggccctatttttgccaatttcctacatctcaccccacctcacctcaccccagtctccccgcatctacyactagctctttgaagaaggcggctgcaagccagtctccgaaccccaggggacttttgggcaagggagccggtggaagcagaaggaagaagatgcgctgagagtcctcacaactgcgtctccggaggcagaacgaagtggggacttcagacaatcaagcgtcatccttgctccccctccccacacggaaccctgcgattatggcaagagaaaactggtttgagcttgagaaaatttccccagattgtctccactgctctatttccctcagataattgttcgcccagcccttgggagcaaagacaggcggaggagaatactcctggagttctcctgggtagtcaggaaggcacaggaggagatcgcgggatcccagggttctcccgcagctctctgccctcgccgcaccgcgccctcccgggccccggccgcgcccgccagccggaagcgctccctctgcgggtgcgactcccgcagctaccccttcccagcctggcgggggtcggcgagagtggtttccacagcaccttacaagttcgggaacwcggggcacgcgggcccgccctgctgcgggtttcgactccctgggacggaaagccggttactagcagcaagagggtgcgcccactcggccgcgcccctcactcctgcgcccctgaggccgggtcccctgagaaggggcactcaacggggacatcttcaagcccgtgagtccctattttcaccctgtcactccgagcagggcaaagagatcccaggaaccggtccacgctaccgccgttccccagaccagcgcaaagctcggctccaggtctccccacgccgccgtggtctgtgggcacccccatttcccggatccctctaaccgccacagtcatgcttacctgtcctggcagtgcacacacagaaccacacaactaaaatcaaatccatcggcatcgctctcgagggtccccgcctagcagggggcaccgaagctaggtggaagcaaatgagcctggatcctgaggcgcgcctggcttggagccgccaaacttgctagcgggcggcgggggaggtggctcggcagcgccgggtgctgcgctcgcatatgcgccggggaaggcagccccggccgccccgcccccagcccgccccccaccgctggcgcggcggcggcggcgtggggctcggggcccggccccccgctgcggctgcgttcgtctgggagcccgggcaggagcgcggggtttggctactgtggcttgttgcgctccccactgggggccgattccgttcgcctccttcgcccgcagaactgcgaggatctggactgcaggcgccgcagccgctatcacccggagcaccgaagtcggagtcccaggacctgcggccgaaacgagagagcgggaggcgcacggcgcccccacggcttcacgcgctccagcccctccgagccgcagtcgccaatgttgccctctttacttccgcaccgcggtgggggctgccgaagttgccacagttcatccccgccgagtcgaaaagccgccgagccctcgcgggtgggtatttttcctcgggggaacccagaccgaggcggcgccaccgagcgcgcacggaccccctcggaaaacaattactcgggattcgctctgtcaactgggtggggagggacctgagggggatgatggctgagttcctgctcaccgcctgtaccttctgtctcctctctcctgttgaacccctatgactgagtactctctttgtgggtgcaggaagagggcgctgaggtgggggtgcagaaaaggggtcctcgaggcggagcgagctgtggttggggtttgggaagtctatttgcaaaccttctcattctgcagggcagatgctgccacataggggtaattcctaaccatctttttttctttcttgcgtgattttcttaatggtattatcaaaagcccactcttctttcatagtcacattttggccccatgtgcaattcctccgggacctccaccttcttttccctctcccaccacaacattctctggagagaaaagctgggctgggctttgttttctacttgccggcaagaagagaatgggtcctctcccctctctgcgaccctttcaggacctgaccttccctatgaagatcccccaaatttgagacttctgtcccacttcctatttgtcctactaacacctaggaatgttatttataactggatatgtagagtcatgaaatctgaaatgacagcctctgatttataccaaatgaactccacttagcttgctcagtcttcccactctctctgaagcccccgctccccctcaccagcagtactcctttgatattcacaacagggatcccagaggagtccaaggaaacctcagaacagccgtccctcgtttcctggaaaccaattccaacgtttcagaatcctcttcactaataagaacgtgcccttctcacttgcacccactttcacttcctatatccttaacccctacacaactttgaccccaggagccccagtgaagttcaccaaatcagcgcagcttattaagagagaaggctttactagcatgctcttctggtctctgccctatttttctggatatttctgtgtgcaagccactgtcccatttggccctttatgttgtggtcctttggcagatgaaaaagaaagtgaacaagcaggtaaattccagctcaagaagtctactgcacaatccagaagttgagctgaatgattaagaggtaaactgatgtcagctgactccaactcagattcggctaagacccaaaggaaatctgtctgccttgactctgtattttcactaacagagtccacgtgtttttccttccacccggagcgtgttgcatttaaagctaacattaaaatcacacatcttgaagagaataggatttcccaagtcttgttgggccttgtggacaaggacaccatacaccatgttgtattataagagccatttcctgtctctcctctgcagtctttaagtacacctcagcaggaacagccttgagttgctttggactgttgtttccaaggcccttttattgatttcagaaagcccagaatccttaaaagtacagtgaccccagcaaggggaaaaggtggtctgggtaagatcttcagagctctctatctttaaagtctctgtgtaattagctggtcctgtgggatgggacttttagcttgttccattaaaaaataaagcaagacatatgttctgtcatagctttgcagcataacatccattaacagtaacaagagttaatctcaacaaggtcataaatcttttctagataactaagtactgcaatctcctcctataagtgcaacccttgagtggggattttgagtgtgtaggtctgttaagctaaggtgaccttcatagaatgggcccagcaagtttctctagtgacaatgaagggacacatggctatgtatgtacttggtggtggaatgttacagtgagacctgtgttcggtggaagccacactgaaacatcttacctgatgccagatcccaagtccaccctccccttcaggatggcctacctccatgggttcttcaggagccagtagttgtctttgattatccctctgcctcttcttcctgacctctaaatgttggagagccccaggactcactcctcaacccttcccttcccgccacactccctccctattaagctcatcccacctcatggatttaaatatctgtgcagggatgactctcaaatatgcatctctatccccagcctctattttgaaccccaggcctacatctctaactacctattagacatcttgaatataatatggccacatcatcaaaattaaaaacatttgcacttcaaagtacaccatcaatgaagtaaaaaaaacaaccgatggaaaagtatctttgcaagacatatctgattggaacttgtatctactaaaaaactattacaactagataatacaagacaataaaaggtccaatttgcaaataggcaaaagatctgaatagatattactccaaagtatatatacaagcggccaataaagacatgagaagatgttcgacatcattagccatctgggaaatgcaagtcaaaactacagtgagatatcacttcacatccactaggacggctagaataaaatagataataaatgttggtgaggatgtggagaaattggaactcatatactgctagttagaatgtaaagtgttctttaaacagttaaacatagagttgctgtacagcaactctatccctaatatccacacaaggtaaatgaaaacatatgtccatatactaacttgtacataaatgtttagagcattattcaaaatagccaaaaagtaggaacaacctaaatgtccattgacaaataagtggataaataaaatgtggtatgcctatataatggaatattattcagcaataaaaagacatgaagcattgacacatactacaacattgaccttgaaaacctcacactaagtgaaaaaaagcctgtcacaagggaccatatattatacaatttcatttctatgaaaagtcaggaggcaaatatatagagacaaaacatctgattagtggttgtctagggcttggggccagggaggtaggattagggggtaatggctcaaaagtgtaggggctatttttgaggtaatgaaaaggctctaaatttgattgtggtgatggatgtaaaactctcacatatattcacaatatagtaaaaaccattgaattgtatactttaaatgggtggattgtatggtatgtgaattatatctcaagctgttttttaaaatactttaatgatcatgacaaaaaattgtaatatggccaactaaggacttttgacttttcccttgtcttaaatttccactgctgacttctacggacatggcatgagccttcaccaagtgctccagctacataacccagggtcatccttgacttgcttgcccttagcccccacacacaaggcatcaagccctgtcagtataccttaaagaaaaatccccagtcaaatttctcttctcaccaggtctcctcccaccttcctccaacccatcattatctctcccatagcctacagctatagactctcaatgcttctctctgcctccattcttgccccgtataattcagtcacctccaccttcagcagtcatagtctgtgttttgtaacatgtatcatatcacactcccttgctcaaaactcctcctggagttttccatcatattttagtaaaatccaaacatcttatatcacccctgcttctcctcccaggtccctctctccccattctccccctaactcactccagtgtttcttgttccttaaacattccaagttcataccatcctcatgatctttgcacttgctgtcccctctacctggaaggttcacttttcactgactcaaatctcgtctcaatgtcagctctttgaggagaccttgcctaaagaagcttctcactttactcccaacattctctgcctccttaccctgctttattttttagagtgcttgttattgtctaaaataatatgatttatatgtttacttattcgttctgtcccccccacacacacaatataatgcaagctccacaagaataggaattttgtctttcttgttcaccaacgtatatttccacctagaacagtgcctagcacattttaggagctcattaaatgttgttgaatgaatgaatcaatgcatgttctgccaggaagcagcatggagaatgaactcttctcattggctgtcagcatggcaacagtcagaaggccttgtctctctgtcccccagagttgctccactgctgactctatgtggggcagcagatcccatagaggaagagtaagaaggactcctttttagtatccaaactaaacgtgcaagctaaaagcagttccaagcatgagaaaccctctattgtatttactgccttatgaattcccctcccgaagccactcttctttgtccaaacagcctttcaactatcttcacaactaccttcacattgtggacacataataagtttatacaacttattataaacacaataagtttataaaacaagaggaaatgagaaagtagcactgtgacagattggattctataccttccctctgctctaaagaataagttgaagtcctaacccctggtacctgtgaatgtgagcttatttggaaattgggtttttgcagatgtaataacttaagatgaggtcgttagtataggccctaatgcagtgtgactgatatccttataagagaaaaataccatgggaagacagagacacaggaagaatgccatgtgaccatggatgcagagattatagtgttgtagtagctgtgctatggtttgactatttgtcccctgcaaaaattatgttgaagtttaactcccgtgtggcagtattgaaagagcctctaagaggtgatcagatcatgagggcagaaattaatgggttaatgggttaatggattaatggattatcatgggaggggaactggtggctttacaagaagaagaagaaggacctgagtgaacatgttagcatgctcagcaccctcaccatgacatcctgtgccactctattctagagtccccactagcaagaaggttctcaccagatgcagaccctcgacctgggacctttccatctccacaactgtaagaaatagatattttttctttaaaaattatgcagtttcaggtattctgttaaaagcaacagaagtccaggcactgtggctcacgcgtgtaatgccagcactttgggaagctgaggcgggcagattgcctgagctcaggagttcacaaccagcctgggcaacatggtgaaaccccatcactaataaaatacaaaaaattagccggccatggcagcatgcgcctgtagtcccagctacttggaaggctgaggtaggagaattgcttgaacccgggaggtggaggttacagtgagccaagattgcgccactgcactccagcctgggcaacagagtgagactccatctcaaaaaaaaaaaaaaaaaagagaaaatgaagacaagctaca

SEQ ID NO: 96695 - DNA, 52745 bp, Homo sapiens
gtgcgtctagggctgcttgaggtcaagttgacactgctccacgtgctgcacaagttccggttccaagcctgccctgagacccaggtgaggcccccctgctcagaggcaggggcaggggcaggggtgggagggccaccccagttctctgcgtgagagcaggccagcctgggggcaacatcaggctctgcctccgtgagcttgggcaagctccttaacctctctcggcctcagtttcttgattcgtaaagtgggggtgataataataacaccctctacctctcaacatcctgtgaggatccagtgagttcacacagcgctcaggtaagccctggcaagccaacccgagcacgtgttaaccattgttattagtattgttctctgcacaccagggctggacctcaccttgctgtagctcttcccacttccacaaagggcacacagacaatggcatttgcagttgtgacatgtgcctgcctttgcggggtggggggtgcatggcttgtcctacagaaggtggggacacttcctctggctcctcctgacagagcaaggtgctgtctgcttggaggggaagctgaagggtttcagctccttgaagggtacccccagctttgccttccccccttgtgcagacactcacgtgtccccatggccacagcctggtccctctcacaggtggtgacacagcctcttcccaacaacatatgccttcattcctgaggtcctagactggtgcacagaccctgtcctcacccagagagctgagctctcctgaaatggggcctcacccacttttccagccctatctcccccccacatcacacactccagaaccagcagaccaattcctcaacaggtcagggagcttatatcccctgctttcacactcacagcaaccctgcagagtaggagtgactattcccattctttagatgaggaatcaaagctcagagaggttaaataacttgcctaaggccacacagcaggactgcaggcttcgtgatggcagggacccagtctgtcatattcattgttggactttccagcatctagcttaatgccaggcgcatgacaggtgctcactcattcattcaacaaacattaatgagcaaatggataagcagccagagatgagagaaacgggggtcctcacccagatcctgcccactcccaagctctccctccttcctgacatctggctacgtctctgcacagcgttagctattccctgcctatcctgaccactgctgtcccctgcacctatcctcatgcttgtcctgccacccggaacccactgttcagctgcagacctggacaggcaggcataggaaggcataaggacacagttgacagatagcaacaattctagattgagacaggcagtgcctctgacagagaacctgggaccagctgctggtcctggaggaataatgagcttggatgggggacatagagtctgagatactgaaagtgaacgcatccacatactctgggctggagacagggaggggcagatcggcagagcagagccaaaccaagtgaggtcaaggggcagacggaggagcagccccactgcatcggggcttccacgtgtgcggggcttgtctcacttccccacgatctcaacatacagtacagcagccagaccagtctcccaaaacgctgcttatgcctggcactccccggcttaagaaccagccaggagtcaagggctccccgttcttccttgtctgctcagacaagtgctggggcctgcagctttttcagatgcctttgagggctatggctcccacaggagacacgtacagccccaagcactaagaccctggtgactctttgctgtcacattagccactggctcatcattttactcagctccagaggaaacccaactcctcgagtaattctttggtttttcttcaaagtccccagtccaccactggctctgccttttaagctggacataggaaagctttctggatgtcagtgaggccagaccacagcacacatgagcaggaacagcatgaagctgctttccccagagcccctgggccagagggcattgctcagttactggccagaactggagagtgagatggggaggatcagcagggacggctggagtcactgaaagataggtttggggctttgctctctgctttcttcttgtgtgaccttggacaacggacttggccttcttgaacctccaagtcttcatttgtacagtgagatgctactatctctttgacaaatattttaattttctctattttaggtaccgctgcagctagaatccaaatctgccctaggtccaaaaaatggtgtctatatcaagatcgtatcccgctgacacagaaggctgccgggtggggggagggcacccccaaattcaaagaaaaccctaagtgtggatgttcagaattttggaaaaatgtcactgaagtgattgaaagagtgcctggcatgcaaggataagaggttctttacataacatttcctaaatgcttaataaacgtttgttgcacttggttttgacattgccaatggggtttgaaccagtgctctctctaaatgaagaattgctgataaataagtgaaaatgtagttttgacaaaacaactgagaatgtggggttttaaaggaagtcccaggcttgtgctgaaaggaatccatggtgcagggcacatgaggacccccaggtaagcctgtcctgatggcactagctcgtggctctttcagcttctcgtgcattgtggagttgtagagaatgacatttatcgaaagttcaacctcagcagtggttccaaagctttattatgctttgattttcctaggtagggtagtaccaactttacagtcaagtttcaatcgacagaaaaatgagagtctgaaaaatgatatactttttcttttaaagaacactgtatcggccgggcacggtggctcacacctgtaatcccagcactttgggaggctgaggcaggtggattgcctgaggtcaggagttcaagaccagtctggccaacatggtgaaaccccatatctattaaaaatacaaaaaaattagccaggctgtggtggcgggcacctgcaatcccaggtacttgggaggctgaggcaggggaattgcttgaaccagcgaggtggaggttgcagtgagccaagatcgcgccactgcacgccagcctgggtgacagagtgagactccatctcaaaaaaaacaaaaacaaaacaaaaaacactgtatattaattttgatcaaagaatcaaaatatagaggtgattttttttgtaaaaataagtattgtgttgctaagcagttcacattcaaccaagcacttgcaaggtcagtctcacgatcagccaccagcagctgcgcattcatggctgctggtgaagagccgtatcacctccctgtgcctcagagacctcttctgtaaaataaggaggctggcctcgatcaaaagaccacttgtcctctagttgacacctgagcagctttaagaggttgaatgttgtatagagaacgatcttgtagaaatctgtaagccccttatgtgacacccagatgctgacgacccacctttagaaacttcaggccattttgggagagttggcagaatgagtttccacatattcactgctgggactgctgcttccactgtttggtggtcccccatccccttcagccaggagcacccactgtatccctcaaaatcccccttggggggccccttctcttattctctggccctccaggcaggaagaggacaccccagctgcccagcactgggccaggcctgtgagtgactgctgcctcaaggtgtagggctgtcctgtggccctccccacacccttgttgccaccacctgcccttctccatcacctggcccctctgcaatgcccagcctgggactcagactcactggagaaaaccatccacccctgggaacctgtcggcctccctgcctgtcccacaatccctgacctccccacggctgccgccaccatagaacctcagcctgcagacaggcccaatggcgcactcagctccctgcttggagcacagccccacaacctgagtcctcccttgggacctccggccccgccccccggcctgtcagctccatccagcttccctcgccttcccagctcagttggtcaccaccttcagacacagtggtagaggcttcctcatgtgctggggtcactggactccagtccttctactgtgtgaggccaccaaccccacctctgcttaaatcccactgttcacatccaacaccaggtatcacagggcagggaaccgcaccgcctggtcctccaaaaaaccctcttgctagattcccaactgagtcctcacaaagattctggccaatcccacacacatacacccatgtcccagaccctaccacctcttggcaccaaacatcttgagagtcacagtcatttccaccccttcccatcacaatgcccaccctttctgcaccggcaggaacggctccctccccgtcatcaagcaatctggccatgtggctcccaccctccctagcattgctggtccaaggagttgctcttcctaacctgctttcttccaggtcacccagccatggctgccagagtcttcacagctcagtggacttttccggagcaactgagcatctcccaccggatccctctggccgccctccccatctacacccccagtgaaccagttctgctccccaaatctccccagctcccagatgattcagaagcatagaatcagttcacttacatgcaagaccttagcaacagacatgcatctgatttaatggttttctctgacacctctttgcccctgcccaactacaccatagcaggaccaatgacttaatgaaaaagcaatgagtgaaatggcaggatcagtcaggctgtgaggaaatttggagggggttctgaaaatcataccatgggcaaccatgtggctgacccagctgctgggtgaagctgtgttgttcttgctgttcctctggtcatttaccttggctctcctccagcttgactgcacttgcctgtgttaaggtttcagatcactccaaagatggaaaaatgggttcatattcaccttggacctgagaaatacaggcaagccaactgaagcccaagcagcaagtcgccagcagacacacgtcctcaggaaggtggaggctgggcaaaaagcatgtagtgaggaccgagtagggagggctgacagcctggtgacaccagtggccccgccagcccctctgccaacagggccagaaccagccaaagcccagaagggaggctcctgtaaactgccacgtgtgagggacacacacaacactctctccacatgcacagcacattgctcagtggtgaacctgggtcttacggggcctgaaacttatctacgaattggaggaaagagaaaaaaaaagtgtaacatttgcaaattttatcaaaacctatgaccatgtgaccatattgctagggtccctcctagggcctggggaggggctccagcaagtgaggggccctgaaccttcagcttcactgtcttcttaataaatccatacgtagctcaccaagccgtgtcatcagctctgtcacagccctgataacggtctgaatgttacgacccccaaaattccaatgttgaaatcctcacccctgaggtgatagtatttaaagtagaggtgattagaccaccagggcggagccctcatgaatgagattcagtgcctttataaaagaggcccttccaccgcgtagggttacagtgagaagactgaatctatgaggaagcaggaggttgcactttatagactccaaacccggtaaataaacatctgctgttgatgagccgtccagtcaatggtgttttgttacagaagtccaaatgaacaaaggcaatccctgactctcagaaaaacgcctggcactcagtaggtgctcaatcaatagacgcagaaaaatgagcttcagtcttcatccacttcggataaattttcttttatttccatactcttttgtgacatgtgtgrcacaagtattcaatctcacagggatgttaaaacccacactcgaagggtktccagtgtgcttaggaaatgtgggtttgcgcaatcacaggccaagcctgggggtcctcggggaagctactcctccaggtcacctgccaggkggatgyacttccttgggcaatgggtgaccctcccaggacaaggggaaccagcagggactcgatggcaccacacagcagccacctgttctgacaatgtgacacagaccaactaatgccagagcccaggagaagccacagcagagctgcctgggttggtgtcagagcaacaggcagaagtgactgtgccgcccgtgggctgtcatccaccggtggctactgtgtcattctggaaaaactatgatgccatgagactctgagaaaccgaatcactgcagagacaaactcataaaaattaaaaccaatccataaaattgtatctagaaactctgtccctggtgccaataagcagcaaagtcaacaaagagtaaaaactaaaacttcaacrcattattaaaaagcaaaactggactcaactacaatcacttctggttartccactagtgaacccaaaagtgacttaaaagtaaaaatcattattagcaagagattaagaacataacttcattgagagrtcaatgttaagagaacagttcattaraagtttctgtttaaaaagaaaaggaaaggcccaaatagccatttcaaggcagagcaggtgaaaggcctggaacactcctgtgcrctcactgtcggctgctgaacagggagcccaaggccagcaggatggagggtgtgaccgagggcttggaggaggtggtgtactggatgacatactctgggtagacctggtgtttctcaaagatcacaaagatggaggggtcggacacactgttcacgcagctatcatagaaggcgttgctccagccctccttggccggbggacggacaaaggaggcattgcccctgacgaactcgcccaccagcacccggrccaggaacatcgtgtgggtctgcgtgtcggatttgctgtagtggtgggaatatgcagcatctcgggcaaagtagctccctgaaatgacacacgagggctcagctggtggaggggcctgcagccaggaagggtcascacactgcgaatagcgtcctggtgatgtgcaacgccagggcctctactcttccaccccgcatctccctccctccctctgtgccatgtctccactctccctcatgaagtcacatgcatcagtgataccaacacccttctgagtggcagcatctgaggagttaccaaactgagatagcaaattcctttcaagttccggatctgccccacgaaacctaaaggcctgtggacacgtcactacttaatcccccaaacctcagattcctcaggcataaaatggggctgttcagcccaaccttacagggttggcatggaaaatgaatgagatcccatatacggaagcagtctgtagactctggcagcccaatgtatagaattatgagccttgtcaaatggaaatctgagttagaagctgtcacctgtacatttaaatccacaagtctaccactggctgctgtccatcttgaccccttgccatcgctgcctcagacggaaactgactaacaaagaactgatggacccggaacatggactgctgggcagaaaatgttctcaacttggtaagcatattgtggttacagaagataatgtcctgttcttgggatgtgttaaagggtgaaaggagacaatatatgccacctacctgaaaatggtgcagaaagagagagggagagagaaagagagaagtggcagcatgttaaaaccaatgaacgcaggtaaaatttacccaaagaggttttttttaattattattattccaattttcttgaatttcgatttccaaagaaatagtattttaaaattttctttggcaagtttaaaaataacagacaagaaaacactcagataactcacgtgatagctagaatacatgtttacatgagtatctctgagggtttctggtttctattctaaggaaatcaatagtaaaggcacagtcagggacttcatcagggctgggaaggtatcccctctcctctcccgtctctgtcaccatctcccagggcctctgctccacagggaagcaacaccccagcctaggcaggccaccctgcccacacctggggccaagctcctgaccatgcccagaggagcaagagcaaggatgtgactggtagctgtgcccaggtaccaccacacatggagtctgaacctgctcatcagctcaggctggtcccctcatgccctctagcagtctgttcctatgcaggggcaaagcaacatgggttttgctggtggaggccagtcatgccttacccttgccgtaggaagtgccatgaacaccacagacccgccagtcaaagttctgctggcagatggcgtccacaaaaatggcgctggtgccgtggaacagctgccgctcgtccacggccttccctccgttctgcttctgcatctgtcctttttgcctagaatcacagaagaatgtgtgctgggggcagagtgtgccggccaccaaatacagccrgcytgatgcaaaacaacacatttttccaaaattccaaaagtgtcctgggaccaagagacgcaggtcacaggctaccctgactaggcctgtaaggctccagccacaagccagggtgtggaaaagaagggggatcgtgggagctgggtgaaaaccctccctccacagctccagacagcagcggttccctggactccaaaagcagagcagcccttggaaaatgggtaccatttcccccaaccccacccccaccttgctcctgcrtggagctgagccctgggatgctgtaggaattttcaggctgctggtcagtgggtgcccatccttctcccctctcccattcccagacttcatcactgtgcacagagtacacattacactaccccaaccccatctggggacaggtcagcaagacccagcctgccatggtgacctattgtaggattcctccccacatagacaggtgagtgggtgctcaaggacaagccagtcctcatgtatgaacctgagacccctgctgtctagccacagccttatgttcctggggctaatggtgtggtgggctgtactgacccatcccactggtctccaggaaggcagaatggacaagtgagagtgctagctttgccaccactcatgaacgggaccaggtggtatgctccaggaagcctcggtgccctcatctctacaatgggatgtgctaccacactgccctgggggagcggacgaaggagagcagacacacagctcccagcacatggcagccctaactgccgctctgcttttcctggaaacccgggccacatgtggcaaccagccagtggtgtgaagggacagagycaccagcccaccaagagcgagccccaacgcaccactggtagacttcccagagggccaggttctgtactcgctcaatcttctgaacaaagtaraaaggcagcgtgcggttaaagaggttccagaccttctgatactcttccgaggaagaactaagggtgatcttctgcaaggggcaaatgtttttaatgcattaccatcaacgtgcagaatataaatcagtcccttcccaaagcttcttgtaaacactagaaccgcagaagcacaaaagcccagagagcagtgacmacattctcctgtggtttctccaggcacaggagacaatcggtcctcatgaaatgtcattgataggttcttggaaactgcaattttaagtaaaacaacaaacctcttgtttatgtcagttagcatatgggaaattggtttcgttagacagtatgttgtgccactttaagtcagtttccaagaacctactgatgatgttgaggatttactatgtttgcaaattgtagtcactttgctcctcatcactgtgaaaccaatctaaaggacagacacgtgatgcttaagccaccatcgagggtatcccctggatgtccctgccttttttttttcttgtcccacacaggycaaagacacaggttggactacatggtccaaggaccacagagtcgtctagacaaacatgttgaacccctttaggtccttagcacttcttgcctgcactgttggcatctgcatgtgccttatacaagctcaataagtcctcccaggacagggaccgtcacgttttaaagctgagttagacagtgctcggcagccggccagctggcagacatcagcccaggtgcagacgggcagcctcagatgttagtctgcgtactctcctgcactcagcacagctcccactggtcagagcccctcaacaagctgccaaattgactgtccattctcctgtctgctagtcgtgaatgccttccctcctgacagtaaccccattccaaaygtccatcggactcaggtcctccccaggctgcttctccttttctcgcttaataaaattggtatttattggttaagcccagcccataaactcatttctgccctttctagcaaatttcacgctcatcctcctccctccacaagacaacccctcccctcagagccacagccaactcctgggtggtgaaaaaacaaaaccctctgcaaaaaacaaaaacaaaaataaagcccacatctgtcactgccctcctgccccaattagccccagccttacagcttcttcagtgttgaggaatggcacagtctgttcacacacacccacttctacagaacaccttcctgtccagccccaggcgcatgcgtcccctacctgaaagcctgggtctggcagggcagaggagtcccaatagtctgggatgctcttcgggcctggaaacttggtattgctacaaaaatgtaaacaaaaacacgtagacattttattcttacacaaagcaaatataccataggtggtctctgctagccaatatcaccagtcttgmgtctcagcacatcatatttcaagagcaggtagaaggcaaggaagaatgttagcacratattcacaacatgagagcacttttatctttgcctatgtagccaaactccaaacagtcctgagagatctatttctygcctgtgtcccaactaccacacaaaagggataaaagggatggagtacatggttaaaggagcacacacacagccataaacctttatccacaattctgaaattctaagagctctaaagacatttttttaaggcctcgatgaggtataattgacattttaaaactttttatacagctcaggaaaagcaggagaaaatatgaaataaaacattttttgaaaaacataaaagtgacatcaaaagtcatttggcagtagaaatttgactgaagttagtaagaggccactgtgatctgtatctatccttcttaaactgactatgcatattgtttactgcagaaatattaatgtgctaaaatacagagtgtcacgtgatacaagcatcacattatctttctaaaaattaaataaaagcagttcaaaagacatatggatcaagggttcaggaacaaggactgtgaaactataattacaaatcattcctattaagtttcagaatacactgttctttctaaatagatctaccttctgtttctgctggcatgaaacatataccttcatcctaagcctcaaagaactcccacaaataactttcctgggaaaatggcacagttcgaaaataactaagcaaggtcctaccagcaagaatcagccaaaaacagacccacaaagacttaagatgctgaaattatcagagagattacaaaacaattattcttcctatgtttaaaggaaaaaaaaagacaaactttaaaaacatatgcaaggaacaggaaactataaaaagacctggaagatctaaaaaagaaccaaatagaacttacagaattaagtacaatctttaataataaaagtgtagtggacaggcttaatagcagattagaccagctggaggaagaatcagtgagctgaaacatatgtgaaatgaaattgtccagaatgtggcccacagcaacaaggaaatggaaaatgcaggaaagaagttgagacatggagaacagtgagaacttgaatatgatcagaacctaagtgaagctctaggagaggagagacaagacagtggaggcgattttcaaagagaactgatgagatgcacctatccgcagcttaagaascccaaagaatctcaaccatgataaataaaagcacatacttagatacactttagtgaggatgcctacctccaagacaaacagaagctcttaaaagtagccaaaggaaaaaagagtgattactgtcaaagaagcacctgttagaccaacaggcaatttctcaaaagcaacagtggaagccagaatacagtggagtgatcatcacaatgatccaagagaaaatccctacaacccaaaattctatacccagtgaaaatttccttcaagattgatggcaaaataaatacatgttggccaggcgcagtggcccacgcctgtaatcccagcactttgggaggccgaggtgggcagatcacttgagatcaggagttcaagaccagcctgaccaacataatgaaaccccatctccaccaaaaatacaaaaattagccgggcatggtggcgcacgccagtagtccaagctactcaggaggctgagacaggagaatcgcttgaactcaagaggcggaggttgcagtgagccaagatcatgccactgcactctggcctgggcgacagtgcgactccatctcaaaatacatacatacatacatgcatacatacatacgtacatacatattcagacaaaccaaaaacagttttccaacaaatcttcatcgaaggcagccttgtccaasctgcagcccgcaggctgcatgtaacccaggacagctttgaatgtgacccaacacaaatctgtaaactttcttaaaacattatgagattttcttgtggtttttattcttttagttcagctatcgttagtgttagtgtattttatgtgtggaccaattctttttcctctaatgtggcctgggaaagccaaaagattggacacccctgatctaaggtaatctgaaaggacaaagtggtaaaaatgtgagtaaatttaatgaaactttcagagtataaaataatggtgcctcttgaggtttaaaaaaagttgagaggaaggcaaatggaagaaaagataggagggcaaagatattgatttacttgtacttaagtgaagaacatgtagtttctaccatagcctttaaaatatacatatacacaaaagaaggtaagaaaagaaaaaataagacccaatcacatgaatgaaacattttcatagaggatgggcaacatggtgagaccctgtctccacaacaaataaaaaaattagctgggcatggtggcgcatgcctgtggtcccaactacttgggatgctgaggtgggaggattgcttgagcccgggaggtggaaggtgcaataagccgtgatcaggtcactgcattccatcctgggtgacagagtgagaccctgtctcataaataaataaataaataaatacataaataaattttacatgacactcctgtattatgacttctgaatatggacattacattttatgacctcattaattgtgtaaacagaaaagttgtttctgaaagtgatctaccctcagattcccaattggccatgcaggcccaggcagacttgcttactggagttaatgacaaccagctgctggcacatgggtcagagagaagaactgaacacttcatctgtgtgaacagtgtgtgacactccgcttacaggagaccccaaatcacccatatcttagtctgaatcacttttagtttggacatttggcatcttcttgtggccccctaaaaactaaattagaataagagagatctactctcagaaagcagagagacttttccaaaccttgtctagggtaggctttgtataggaaaagaataaaaaatgacttccagaaataggagggtcataatcaaccaaaactctaaatccagaatcagtaagacactgatacatttaactaaaataataagaratatatatttatggtaaaatacttcacaggcaaagtcaaaaggcaaacaacaaactaagagaaaatatttgccatttatataacaaaacgagggccaacctccctaatagataaaaggctcttgatatttaagaaaaataccagaaagttgatagaaaaatggataaaaagaccaacagtccacagaaaaagaagcaaaaatggcacttacatgttagaaataatattcaacctcactcctaagagagagcaaactgaagtccactgacccatctttacccctgagaaatgcaaaagcccaagagcctgacaactcactctgtggcatctcatgcgtcctagtgggtgtgcataatgattcaagcccatggaaaggaatttggtttacttcctacgactctgacctaacagtcgacctccaaaatttgttttttttaattaaaaaaaaaaagagacagggtctcgctatgttgcccaggttggtctcaaactcctgggctcaagcgatccttccatcttggcctcccaaagtgctgggattataggtgtgcaccaccgcacctggccatacctccaaaatttgaaacagcacatacatcaaatggttcatcacgacattatactttttaatagcaaaagactgaaaacaacacaaacatccatgaaaaggggacatattaagtaaactatggtacatacatattacagagaaccaggaaagaagaaacggattgaggaagttaatgaattgaaacaaagtgattatcatgatctatttttaagtgaaaacaaaaaagggtatagaacagtatagatagcatgttcccttttgtgcaagaagaaaatacttttatatgtatgtatgcaaatgcttatttttgcaaagagaaacataaaaaagagaaaccggaaactaatgttacccacagtgggaacagggtagagataacagggaggaagttacagtctacagaggataccattttatataggtttgacttttaatcacgtgaaggttttacacatagtcaaaaacaataataataataattattatttttgagacgggtctcactctgtcacccaggctggagtgcagtggtgtgatcttggctcactacggccttgacctccctgggctcaggtgtctctcccacctcagtctcctgagtagctgggactacaggcgcacaggctggtctcgaactcctgggctcaagcaatctacccgcctcggcctcttgaactgttgggattacaggtgtgagtcactgcacccagcgcaaaaataaattttaatttaaaaaggaaaaagtaaggcacattcccaggaaattactttgctaggtctgactcacaaggcagtttcgtggactgataatacctttctcctctatcttgtaccaaactcatttaaaaacgacctttgcatgcttcacaaaacaaaagaaccaaaagagacattgttggttctccataaaatagacacaagccagacctctcaggcgaacagaaggtgcagccagctaccagtaacactgcctaaagtcccagcactggctctggcaagcccaaactgtatgggcactgtggtccctctccaccatgcaggccaccttcccccaatatgtggctgtgtggtttggagaacactgaccccttcctctcagttccaatcccatcccacctccccaagcctaaaataacaccagaggttgagatagggtctgatcagtacaaagcacaagaatttcccctcatctgctataggaggtttctctcctcccttctaggggctcacaggccacaggctaacctggtggctcctggcagccatcttgggactgaaagaaactcaccctgacgaagctcgcccattagtgactgcaatatctgtttttagagttttggtattccgtgatattcaaatactaaaatacatgagtttttattggtgtaattccatcattatttcattatttcaacatttaaaaaattcaagtctatgactcaatgattccacagaaaagacaaacggatgggttggcttcaagtctagactcgccttcagagtctgtcttctccagagaatcatcgcagatcacaacaggcagccttctaattatgcatcacgaagcttctacccacagggtaattcccactctggtccaactagtagaagacaaacgataacagagtgtgggagcacttcgttgtacaagccaacggtgcccgggtgctgtctgaggcaggttttctgtcaccactgcagagcacaccccagctgattacatcctaagtaccaagccccccactgcaacctaccaggtttgcatggtcgtcacatcctggggagacaygtatttgggtctgcggcaaacctttttagttgtgccatagaccaggtttttctgaacgaaggctgaaaaaaaacataaccagtgaaaaaatatacatatacatatacatacacacaggatggcaatgttttataaacacaaattagatagatttgaaagcttatccaaatgtgtaaaacccagaatcagtctgttaaaaatagggccattttacacatttcaaatattcataaagaaaayaggtatccttaggagactgggtttaatgaatagaggaatgattagtaattgacatatcaattayacatgagtgcttttaaattgttccttccaatcttgtttaaaccattattttgcttggcaatttttcccagcttggatataaaaaagcctcagcccagcctgagatcaaactaccatgtcttgagttagtgggattcagagttaatgtaagttttatgactttgttttagttaaactatggcagtattcatcaacctttctaaaccaataatatctttaataaacaaatttcttgcttccccaccctcaagaatcccatactcatcctgaggatttggggttgggggaactggcccctcaagttgaaaaatgacaaatacctagmagtgtttgttctgtccttgcctgccaggaaaaccctctcaagtcttacattttttttaagagatggggtcttttgctttgttgctcaagtggaccttgaactcaccagctcaagtaatcctcccacctcagcctcccaagtagctgggactacaggtttgtgacaccatgcccaactaattttgttttcatttacaaaacattttaatattaaaaattataggtgtccagaattagccttattgcagttgagcataaactggatggttatccaagtgtgtgtctcttaggttgcagctgagatggtcactattcctggaggtccatccacattctcattcagagcccatgatccagatgcagcaaccatgaccccttctgttacccactactcagccgcccatcaagaccattctcactggcatatttaaatgggtgttactggcctactggccatctgtgatgaatcttaaatggctttcactggtgaaattaaaagtgagctaagatacgtggactggctaaatgtgtgtcagacacattccctacccttctatggacacagtaaagtgaggtcttttccctaatttacccttccagaggataccctaggctacagcctgtctttggggaattctgccccgtcagacaccacctaacaggatgctagaattctgcctctggaatcctggcatttgccttgagtgaatcatttatgacaagagtccctaaaagggcagaactgaatcatccctaaaccttcagaacaactcatttgggctcttttgtgtgttttaaatgtacttgcttcctaataaacagctaataaatatgtgtggcagtttgctttgagacttgctttatacttagaagtgaagttgtgggggaagaagccaattcatctcaagcttcttttatggatactggtatctaccaaaagraggaggaggaagaggaggaggagggggaagaggaagaggaggaggaagaggaagaggaggaggacgaggaggaggacaaggaggaggacaaggaggaggaggaggaggaggaggacgaggaggaggaggaggacgaggaggaggaggaggaggaggaggaggagaaggaggagaaggaggagaaggaggagaaggaggagaaggaggagaaggaggagaaggaggagaaggaggagaaggaggagaaggagaagaattgtgcccactcaaatgggcttcggtcagtctgcaggaatcataaactgcacgtgtgtgctcttccccatccctattatgaggttctgttatgtccccagggtgtggcctaggttgggaatgatcaaggtagtatctgacatttctatctgttttgatattttccagatatttaaaagaaatattccagattgctgtcagcagcagtcagatgtatgcttgccacacagtcctgaccttcagggcagtcctgatttgattaacgtctatgctctcactggtcccctctcatgcactggtgtgtgtcaggccgtggaaagcaaaccagaccacacgtggctggcgctctccagcagaggcagttcgcactctagaggagaaaaacttcaccgtaaagggcatgtcaagggggtagtgatctaccctaagcaaaaccacaagtgccacgaaaccacaagcaaaaccaaggccagaaacagacagccaaagtggttttaggataattcaccagacacttcactatactccacatagaataaacgtctgcaaaaataaagaaaaccataaactgtgtttaaaggaaggcccacttactcccttataaaatgctgaacattcagaaggactcagagtttaaaatgtgaaatacaggcaaaacggaactgaataaagctggaccgatacactcatgaggaaatggcttaagagaaactacacaaaattaaaacttaaaaaaaaaaaaattctcacacatcagccacttggaggaactggccaaagggtggcctatttctctctgtaaggcaaccaggatgaaacatttcagccccagcctcaggacaccatgagtgcacgaaaatctgcttctcagggactttcaattactctgtgtcctaccatccgttaaacccatcaactccaaagtcgcctacagaaaagatagcagcaggccaggcgcggtggctcatgcctgaaatcccagcaaactgggaggccaaggtgggtagaacgcttgaggacaggaattcaagaccagtctggccaacatgatgaaaccccgtctctatgaaaaatacaaaaaattagccaggtgtgacggctcatgactgtaattccagctacttgggaggctgaagcacgagaatcacttgaacccgggaggcggaggttgcagtgagccaagatcacgccattgcactccagcctgggtgacagagcgagactccgtctcaaaaaaaagatgacagcagcactgctgcagcagggagtgaaaggcagacactgcacgacggagctgctcggacacctgtcagggactcaggttagtcctcggatacagcaggacaaccatgctacatgcatgctgaccctgcttgtcctccacacttggggctcctgcccctcctggggtccattctcctcacatccttgatgcagttcttcctccactgyacagggccagtgtcatctgtctccaggtctaccttggacctggtaccttgcttttctttcctgtacccacccaggcyctcagtatgtgcacacggctcctccagggttaaggtgtagggacagagccaacacaggcaggctctgctgggcgagggcagggcacaggatacctttgaaatctaactcgtagttgtgctttccggcctggaacttcaaggtggctgcctggccgtcagaccccggtgtacagtaggccaggtaggccttctccacgtcgctactgctgacagtggtcacagggtgcaccgtgccctgcgatggaaagccagacactttatgaaggcaagaaactgcgtgatgaggaaaaacgctggtggcacccacgccacatttcagaggtgctcctggtggacagtcctgtggtggggaagatggaggccagggagcatggtatggcaggagagagaggcacagaatggaggcaacatgactgtctcctgaagctgccctagcaaacacaatgcagtaaatatgggtcctgctgagcaggaagacagggatgggagcaacggagaggagggcactcaagtcacctaggacagaggacacggcagccattcaaatgccggcagaacagcaacagcgacttctggagtgctgcttgactgggcagcccaagccaggctggtcttacccgtctattcacgttgcaaccatcctttaatcagagctcggtcctcttccttgcggttttctttttctggtccctaggagcattcatctattttttaaattatccatttcaatccctatccttccacaattacctacaggaaatctcgtagcttcagctggagtgagtttgaattctggctcccaaacctgctggctctataactttggcaagttatcttaacctccctgagcctccgttatctcaagcttataatatgaataatagtacttaggccatattcatccctttatacaacaggactatattgtcctcacagggctggagaratcatttaaataaggcatgtggagcacttagtacagtgcccagaacaaaacatactcaataaatgttactattatcatcaccgttcttattaaatttgagattacactgacaactaaaattaaagttattcaacctataaccaactaactccctctgtccctgtcaattttcctgctccccctactgctaccatcctagttctcctgggtcacaagctttaggtgttactaacagaacaaaagtgagacaagacaagagtcacccatgcctctgcgcaactgagtccagcaatggagaaggggaaaaaaaagtacccagatatttcaaagcctcaagcacaaggtcccacacaggtctcacgggtgctctagacgctgagatgggtaactaagaatgaccaaggaagggtgagacccagcaaaggtttcttggaagaaaaagatgcctgagccaaggcccaagcccgagggatgacatgagttggccccatgaggaccataaggggcgggtgtaagaggtataatggtttgtaaagcagcctcctagtttacggtctcatagcggcgcctaagtttctctctctgaagtctgtcttccttcaaaaccaagccattagactagagtccgggaggaagaggatgtggcataaaaatccctttctgacaacaagaggaaaggaaaagaaaacaatccctcccctttgggcctgaggaaatgaagctctgagtcagggaaacagagaggagaagcagcagtcagatgcaggcgtcctgccccgacccaggcctccagtcaaaatccctgcagatggatggtcacagagggagggaagatgcaggtggatgagcagaaagcaaaaagcaaagagtttttttgccctcagtgggaggtttggaaggagaaaccaacaatggcagccatattatgtgttaagctgagaaaggtctcggtttagcacctggaggcaccaagtgagatgtggaaggaatgacagattcccacatgtcctgtggcaggaccagcaggtgtctgattttgacatgaaatgttggagtacttcttgagctcagacagaaaaaacttagcttttctgggaatcaagagaaaactgttttgaagtggcaattaacagaaaactaaaaaagaaacctaaatgtggggttataccagaaacgtgtaggaaagggaggacaagacaaaccagatcatcctaggctgtccagcctgaagccaccaagcctacatgtgtttctacgcccccactagcacgtggcatatcaataacatccacacgcggttcatccccagacattctcaaactgctcgccatgagtttctgcactgccacagaggaagaggagcacaggaaagaaaggggcacgctccaggtgttggctgactggaggagaccggccccaacaaccagagctgtgatgagacaccaccggggaaccctacttttgcatgggttgcccagagccctgtgtcatctcattcagcaaccagcggtctcctccgagaagccggacagatccccaaacagaatgaacgtgatggtcacatctgctaagtgtgttgcgcctgccatctgtccctccatctccaggagagccgggattcccggagcatgattgggcagtcatcctctccccctcctccatgtcacgccagcctcttcccctcacgctcctgaccaaacccagagagcttatctggatgagtcccacagggcaggtcagagagagtcccaggtcgcccacgacgggagggagacaggtgggaaaggcaggcagggcagagcagcaagcaaggagaggctggtgctggcaagaggggagcaggggaggagaggggaaaggaagtagtgcaaggcagcaaggccatcgctgagagtgaccatctccagctgaccaacagacactgtcagtaacaccctcctccttccatcagccaatgtctatttcctgaggactggctatgcatcattccacacacgggatacgatggggcaaaagaaaagacaaaagtccctgccctcatggagcttacattagagcatcaccagagttaaagggcattctgagtgcagttaagaataagaaactaaagcttcaatatagcctcttgaaacccagaagagtacaaaatacctatcgattttcattttggagggtgagttctttatcaatggtgccttccctaaacttgtacttgagacggaatctcgctctttcgcccaggctggagtacagtggtgtgatctctgctcactgcaacctctgcctcccgggttcaagtgattctcattcatacctcagtctcccgagtagctgggaccacaggcatacgccaccacacctggccaatttttgtatttttagtagagatggggtttcaccatgttggccaggctggtcttgaactcctgacctcaactgatctgcccacctcggcctcccaaagtgctgggattgtaggcatgagccaccacgcccggcctaaacttgtatttctataagtgaccaggggactccctttaatctgacccatccacaaacacctgcgaagaattgacagcaactattttttgttatttggcttggattccaaacctatacatgatataaatcaattttcttatatttgcctaccttctgtaaagttgcagaaatggcagacaaccagtttgaaaagcctttacctctatatcacagctacacaaacacacttgcacacataggcaccagctgtggggttaagttacctgttcaacaagagaaacatctttctatcccatttaataaaaccaatgaagaaacttgatctcactacaaatttgtcattcagttctcatgagccaacagatggaagctcttcaaagatgaaagctcatacaaataaattccaacttatctagttttgccataattctcccaaagcaagtgagccacactggcacctggggatcctcagctctctcaaggatgcccctggcaacaatatgggggctcttatttggctcctctcttacagatcctcaggacaaaacattcaccctctttccatcacacttacctgtcttccatattcctgccaagaaccaaactcatcactccagtaccaaatccagtcagtggtgaggatgaagtgtggaggtttggtgacagaggaggccgtggagaggcggcgagcctgggtagcaccgtaagtcatggcgttaaagttcagacaatgagagtgaaaggtactggctgactcagagcacaggatcctacagaagaaaaacagcagcagactgaaaatcccaccagccaagcagacacaggtccctcagcttgagaacatatagctgggagatgcgaatagtaaatgtggcatgcacattttagaaaaagttcccagaggtagaggaaactgctttttcagatcagttttgaggtataaaaatatcaaaatcaagataatgtgggagactagttatgacgaaaattcctctcagtacaaaatgccgaagatgctggtgaaatcattcttttttaaaattcactgctgagctggcaagaaagggaagtcctcagaagccaaaaataacaatagttaacatatactgagtgtttactgtgtgagccagaccctgcattaagcactttatatgtattaggcgatgacattttcacaaccctatgaggttgagactattatctccacttcacagacgggaaaacagaagctcaggaaggtgaagaaacctgttcaaggtcaaacagctagtcagcgggcgagctgggctttcaggtgggcaggtgggctgcacagcctgcacctgagccaccaggacacgctccctttctaaacgcagtactgcctaaagaccaaaggaaggtacgaaactggagagcggagaggagggcgagagccagcagctatcccagggcagtatcgatgagtaacgacagagagcctgggctttggccgcaaaagggaagcaggaaacaaatgtagggtctgagtacggcaggaggctgaatctcaaaagagatacctctgcgtaaaaccaggaccctaaaagatgacccaccttagtaaagggggactggagaggggacttgccttgcaaagacatctggcaaggaaacctgcctgtattaatgttggttctggataaaggaggaaaaaattcctctgagaactcataaaccactcaagcctcacagaagttttagactgattcacattttgggagaattagctgcaaagaccacccagggtagcagttctcagagaagcaaacacacatcccctctggagaaattcaccttcaactcaggcctcaaaagaatttcttggccgggcatggtggctcacgcctgtaatcccagcactttgggaggccaaggcaggtggatcatgaggtcaggagatcgagaccatcctggctaacacagtgaaaccccgtctctactaaaaatacaaaaactagccgggagtggtggcgggcacctgtagtcccagctactcaggaggctgaggcaggagaatggcatgaacccaggaggcggagcttgcagtgagctgagaccgcaccactgcgctccaacttgggcgacagagtgagactccatctcaaaaaaaaagaatttccaaagaaatttccatcaaatcaaacatgagctcaaaatcgatcacaaaatgtggaaacaaagacactatgagcaaaagttaacaaaaacaaaatcagaccaccctgaactataaacattagtattctcagatgcagatatacgtgatatgttttttaaaaaggaattgagcatcaaaagtatgagtaagaatcaagagactataaaaactgactgggtaaatttaaggaaaaaaacagaacttttactattcattattcttttctttctcctccactccctccaaaactttttttcttttccttttttactacttttttttaattttttattttttgagacagagtctcaccctgtcacccaggctggagtgcagtggcatcatctcagctcatcgtgatctccgcctcccggattcaagcgattctcctgtctcaccctcccgaggagtagctgggattacaggcatgcaccaccacgcccagctaatttttgtatttttttgtgcagacagagtttcaccatgttggccaggctggtcttgaactcctggcctcaagccatccgccctcctcagcctcccaaagtgctgggattacacgcgtgagccactgctcccgaccttagaacttttaaacataattaaattaactgaaatttaaaaatcatacttcgatgggacacactgcatctcagaagagtctgaactaatgaactgagagcctgagaggaagaaatgtggcagagtttagaaagagaataaaagagaagttagaagacataaaagataaagtgagaagacttcaccatatatctaatgagaattccagagaaggaatacttaaggagatcatggctgaggaaatcagaaagcacagcaaaatatgagtagcataaatttttttaaatccacacacagattttagtgaaactgcacagcaccaaagaatgacaagatattaaaaacagccagagagaaaaaaacagactatctattatactggattgaattgtgtccccaagaagatatgctgaaggtctaatccctggtacccatgaatgcgatcttatttggaaatagggtctttgcagatataatcaagttaagatgaggtcatattggattcgggtgggccctaatccaaaactgatgtccttttaagacgagggaaatttgaacacagacacatggggaaatgcctgtgacaatggaggctgagattggagtgacgcgtctacaagccaaggcatgccaaggatttctaagcatcagaatcctggaggaggcaagaaaggatcctcctgtaaagccttcagacagagcaaggccctgctaacaccttcagtttggacttctagcctccagaaccgagaaaataaatttctgttgtttgaagccatcaagttcatggtaatttgttacagcagccctaagaagtgaactaataccacctcgatttaggctgatagctaacttctaagtagaagcaatggaatccagacaacaatgaaatagtctttgaagaactgagggaaaatacccagtaaaactatctttcaagaatgagaagggaataaaaaccctttcagactaacaaaatacacaattacctccagactctcattaaagcaacctccaacagaggaacttaaagaaagaaaatgataaacaaggagaagtgtgagcaaaggaatggtgagtaagaaacaaaatggtaattgtgtaagcttaaacaaatactgactgcctaaaacaatacgaatttctaacctctaggattaaaaatattatakcagcaatacatacagtgcatctttttcttttttttttttttaatagagacaagatctagctctgtcacccagactggagtgtagtgacacaatcatagctcactgcagcatcaaactcctgggctcaaatggtgctccctctgcagcttcctgagtagctgggactacaggcacgcgccaccatgctcagctaatttttttaaaaatttttgtagagacaaggtctctttatgttgcccaggctagttgtgtattcccagcctctagcaatcctcccacttcagcctcccaaagcactgggataacaggtatgagctgctgcgctcgacccacatcttatgtgcctggcagtgatctgagtgttttatgcatattaactcatttaattctcaaaataaccttgtgacgtagaaactattattttgtctacctaacatatagtaaagctgaggtaaaatgagattaagtaatctggccaaatttatataattagtaaataagtttgaatgaaactagtcagaattcaagtgtccaaggttctttcattgtttgacagaatgacaaaaggcactgattggcttaagctcagctaaaagtctgttaagataaagagtctgtttagatttccagagcagccactgaaaaaataaaaattcagtatataacgtccaaactagtaaagggaaaaaaccaagtgaggaaaaaaatctacaagaagatcaaaaagagaaaagaaatatacaaaaagtgggtcacagtgacaattataatgagtggcagaaataaatccagatccacgttattggccacctgtgcttcctctgccgggaagtgtctgaccttgtagtttgcccatttggagggtgaagaatttgagtgaaagaggccagacacaacagtacataccacacggttctatttatatgaggttcaagaacaggcaagacagagatctatggtgacagaggtcagaacggtggtgaacgatrggagtaggcactgactggaaggagatggggtgaggaaaatgatccgtatctcaatcagaatgctggctacacaagtgtatgtatttgtcaaaactcactgaactgtatgcttaatatctaggctcttcgctgtgtgtaaattttgcctcaaaaagaaagattggggtggtatgtgaaccatttaatcctcctaacaggagtaattggtttcacatactttaccaatagcaatttgcacgtaattgtactctaagtgcaaatttattttacacactcaaaaagcaggctcaaattctcttcttggcaacatatttcagcaagttcaatgaaaaatatgttaagtatctgaaaagaaggctatccgggaatcccctatttactctgaactaactaagggaaaatactaggacatgcttggggaaaaaaaaagttaaaggttaaaccataaacagcagttcagcggtatggctgtataggccaaaggccaaaatttcacaaatagaaattatcacctctcgcttttctgtaataatgagtatagatgtacatgatcaatcccagcaccaaacaattgagaacttaatacttggtcttggtaccatcttctcctttccccattgctcctgtctgaaaggagagggaggtgggagaacaaagccaccaaactgccagtatgaacgctgactttcgattccagcccaccttctacctccagactaggtggctcacagtgtgtgtgtgtgtgtgtgtgtgtgtgtgtgtgtgtcacacacagaagcccaggcacctccagactaggctgctcacagtgtgtgtgtgtgtgtgtgtgtgtgtgtgtgtgtcacacacagaagcccaggcacaaagcagagacaagggacatatttcctacctttctattttgggattgcaatatgcctcttcaataagttccatgttgtccaaatcctcccatttgcctctatccaagaattgccatcgatacggcaaatggaaatgaaytctatggcacttatctgaaataaaaacataaaggagtaagatagctgggcaatacacagcatgccctagccttgtggttgtcaacaggtgtggtgctgcccactgacctgggaacattctgaaatgtgtggtggagtctgttttttcagtgccggcatgcctgagcatttagatacagaaacactttttgcattttattatatacattgctatgatttaaatgtctgtcccttctaaaactcttgttacaacttaatcgccaatgtgatagtattgagcggtaaggcctttaagaggtgactgggtcatagataaatggattaatgggtgtatgggttatcatgagagtggaactggtggctttataagaggaagcgagacctgagctagcatggtcagcccccttgccatgtgatgccctgcagcacctcaggactctgcagtccccaccagcaagaaggccctcatcagatgcaggcccttgacaacctggacttctcagcctccatataggtaagacataaattccttttctttataaattatccagtttcaggtactctgttataagcaacaaaatggactaagacatacatcttccttctttatgtctcactttttaacaggaccttacttttttttttgagacagggtctcactgtcacccaggctggggtatagtggcacaatcacggctcactgcagcctcaacctcccaggctcaggtgatcctcccatctcagcctcctcagtagctgggattacaggtgtgcaccaccacacagctaatttttgtattttttgtagagacaaggtttcaccatgttggccaggctagtctcgaacttctggcctcaagtgatccacccatcttggcctcccaaagtgctgggattacaagtgtgagccaccacacctggcaattttttagaaatatgtatgttgatggtttatatcatctatgaactttatttaatgagagtaagaagctgattatgcgaaggtcaaaggtctcatcactgcagggggcagtctgactcctcaatatcactctctgtgtggcaggtggacgggcagagatcacagcaaagatggagccagattcatccctaccagaaatccatcccaacccaacacgtccaactgaaggcaggtcagcagcatggttacaggctccttgcatctcttctggctaacaacatgctcactccttccctgacactctcccaccaacatccacacaatggcccagacctatgggttccggtgagctgctcccctcaccaaccccatgttcctcctgggcagccagatcctcacttctctcatcactccaagcacacgctgcctgccctgtctttgctggtgcctgccaccaccgggaacgccacccacaccctctccctacctgtcaacagcctatgtgaggttctgctatatccacacagagaagtgtcatgagaggacagggagaaaggagagaaaaagaatgagaagctctttgcactgtgacatgcagctagctacctctgagatatttgctctaaggcaggaagatagagaacaaggtgcagaatgcctctatttgggtaaaaaatagaaaaaaaagtaagtttagacatattctaactaaacacacacacatgcacatattatttcttgcagagggaacctggtaactggagacaaagttataagcaaagacttctgtcattttggcatgttttgaactttgaaccacaagaagatataatatattccaaaaattatacatctaattaagtgaaaaaggtagaaagccatgctagcgtgcctgtgtaaggaaactgaacagacacatacccttgtacacgtatacagtctcgatgaaaggatattcaaagaatggataattatggctgtttcttggaggggacttgagttctggagaaaactggtgtgagggsgacttatttcttactgagtgtcctttgtacatttttaatttgtatttcaaaataataatgaaactagctaatttgatacttgaaaaaaattaaaattttctaaaattgtgtgcattctttcaggcacatctcaatgccacttctttcccaggctctgcaaaagcacctggtgggggaagtcccatggaggagggtgggagggtgcctgggattgtgtgatcaggtatggggccgagcagacagggcagaagagagtgccaggctgagaggactgagggaacaaggtggggacacccaagcaaggaaactcctctaagttcaacaaggctgaaaacagccacaccagggactgaagatctcctaacttgtccagtttgaacatggacagctcactaggtcaggaacctcttgaactctctcaagcaggtgtgtacacaacagataattaaagggctgggccaggaaagacaaatagctatggtccaaggtcacaaccaaccagttcctgttccctccctgaaaggcattagaggaaatgatcagggatgagagcagaaggccaccccagggcatcccagtagtcaaatgctatacctacaaaccccargcacaggtgtactatggacagcctgagacaggatctccctgcaaacaggcacatcctggggaaggtgcactccttagggccctccaggctgatgcttcctcaggaaggacatgggggccaggggaatgcactataatcaaacagcaggcctgaggcttccgttctgaaacaaagctgagctatagaccacactgttcacagctggaaggtgcccaggacaggaggcaccaggtaagccactgcagccacagcagctggtgagagcctagtcccagcacagcggtagagacataaggtcctttcccttgtcctggtcttcctgtcccctttctcaacttcttttcccgccttctaatgttccctacctcacgttggcattccaggggctttctaggacgtgagtcatagaaatcaaatcaatttggcagacaaaacaccacatccaccccagcccttcctccctatagtccttgaaataacaggccagagagaataataaatccaaaagcactggaaaacaataaaaaataccatcaaaagaccagaattattcaagaattgctaaaactatggagcaatgagaatcaaatagatataaaaagaagagagaaaaatgcagacaaaatgtgcagaacataccacagaagtagaaaagatctggggtcatcacagattcagagtcagatgaagccaggagcaagaacgatacccaggccaatcccaatgagaacaatgggagcccctggcagaggcactcccttcccctaacttgcttgtgtgaaggaagcttgctgtgcacttcctagttaaactaagtgtgaatataagggttagagcaagagaaaagcaaatgagacggccaccaaagcccccgtcccagtcctaggctacatgccagcctcccacctcaccaagcaggaccttctgcctcttccccaccatcactagaatgagggcctggaatccaaatcagccccatggaaatcaaccaacaggtatacgggattctcaagcaccaacgtgacagacaaccaagagtcgctcaacacatgaaggaaaacaattcaaagagaggcagcaactcacacagaaacagcgatacctaaggacagaatgatcagagttaagagaacaagtattcacagctagacttcaacctaaaagcctagcccctgaaacttctaggaaaacaccataagagaaaacattctgtaggcttagaataggcaaatatttttaggatacaaaaaacacaaaccataaaagaaaaaaaatattatctggacaccactattaaaatacctgtacactataaaggaaataaacatgaaagactggaaggatatatcttcagtataaatcatatacaaaacacaactcawtaagagatcaaataacccaataaaaatgggtataactgtcactaaagaccaatactgtatgattccatttatatgaaatattcaagcaaatctatagagatggaaccttcatctgtagtcatcaggagctggggggagggaagactgctaatgaagacggggttactttgggggtgttgaaaatgttttcatattgcctatgatgatggctgcccaattctgtgttaatattacatatgtaagtggacttcaaaaagttcatggaaaacggaattaaaagataaaaaatataaactttatttctcaatataagctccatcaagttcaggacacttttgtaaaagacgataccagccatttagtccacccataaagaaccaagggtcctaggaatttaaccatgtcaatccagtcttttttctacattattaactgaagaaaaatgggtgccctttaaagattttttttcttttttttttttagacagagtttcactctgtcgcccaggctggagtgcagtggcacggtctcggctcaccgcaacctccacctcccgggttcaagtgactttcctgcctcatcctcccaagtagctgtgattacaggtatgtgccaccacacccrgctaatttttgtatttttagtagagacagggtttcaccatgttggccaggcgggtctcaaactcctgacctcaagtgatccacctgcctcggcctctcaaagtgctgagattacaggcatgagccaccatgaccgacctaaagatttttaagattagaaaacaaaaagaagtcagaaagagccaaatcaggactgtaaagtgaatgcctacagatttcccattgaaactcttgcaaaattgcccttgattgatgaggaatgagcagcagccttgtggtggtggagaaggaccctctggtgaagctttctgggcatttttttgctaaagttttggctttctcaagacactctcatcataagcagatgttattgctctttggccctctagaaagccaacaagtaaaatgtcttcagcatctcaaaaaactgttgctgtgacttctgctcctgatcacttctgctgtgactgggccacttcccccttttaggagccattgctttgtctccaggatcctactggtaaagccatgttccatctcctgttacaactcttcagagaaatgcttcaggatcttgataccacttgtttaaaatttccattcaaagttctgctcttgtctgcagctgatccaggcagaatggttttggcactcatagagtggaaagtttgctcaaatttaatttttaatttttctggcagactgtataaactgaactaatcaagatgtctggtgtcagttactgtttgtgctgttaatcactggtcttcaattaaggaacaaacaacattaattttttttctcacaaattgatgtgcatagctccatctttaacattctctcatcccttcttaaaatgacttactcatttataaactgatttctttgggacattgtcctcataaacttttttgtaaagcatcaatgattttgtcattctgccacccaagagtcaccattaatttgatatttgttcttgcttcaactgcagcaaaattcatgttgctttgataggggctctttccaaattgatgtcttatccttcttagtgcctcaaactagatcctcttcagatatgttattacaagttagtatgaatttattttggtgcaaaacttttgaactccatgcataattttttcataatatgcattttccacaaactttctgaagaccccttttgtgtgtgtgtgtgtgtgtgtgtgtgtgtgtgtgtgtgtgtaaagctgttwtataaaaaataggcaaaagatttgagtagatacttcacagaaaatatacagatgccccaaaagtacatgtaaataaaagttaaacatcattaatcatcagggaaatgcaaattaaaaccacgagacatcatcactcactgattagaatggctaaaacttaaaagacaatgccaagtgttagcaagaatatacaataactgaaactctcacacgttgctggtgggaacataaaatattattatctattttggaagacagtttggcagtttcttacaaagtcaatcacatgacataacccagtaactatgtctaagtcttttacccaagagaaatggaaacatatatccacatgaaaacttatacataaatatttatagaagttgtatttgtaaaagccaaaaactggcaacaacccaaatgttcatcaacatatgaatggataaacaaattgcagtcaatcatgcaatggaatactactgtgcaataaaaagaaacaaatgatcgatatgccagcatgactgaatctcaaaaacatgctgatgagagaagccaggcacaagataatacactgtatgattccatgtatgtgaaattctagaaaaggcaaatctaatctatagtgacaaaaagtagatcaggggtttcctgggcgtgacaaactagggggtgaggattaattataaaggagcataaaacaatgtttttggagggggttccatatcttgatggtagagatggttacatgagcatatatacttatcaaaactcagtatacatttaaaatggtacactttagcttgtgtaaactatagctcagtaatattgctttcagaatacacatatatatgtgtgtrtatatatatatagctcatattccttgacctatcattccattccccagaatctatctatggaaatactcacatatatgtacttcaatgctcaatggaacatcattataatcaactactacacacttgtttttaaaatgaggtggactttcacatactgacatggaaaaaaaatcyccaagatacaatgttaagatgcagattgaataataacattatcacatgctcctatctgtttaaaaacatataaaacaaatatcacaaccacacgggaagtgtttacctttgggcaaagacgatggaggacttcatgcttcactctgtattactgaactgttttacagagtgaaagtattcattaattgcttgggtaatttttaaaaactgaaaatgaaacaagaagtttggtggttgtcaaggggagtcaccaaatttgagaacaaacctttcttcagtcaaagcccaggacagcatttaagaagaaaacaaaggtttagtgaaaatacagacacgcacatgcacaccagaattgctgcttctgataaaaaagagatcactggattgttcactggatcaatacagaaaaaaaaccccaatttaaacaactactcatcctccaagagctaacacaagtgtttccttcgcagtgaggtcctttccagtttctaagggagctctcagcctatcatcacccttatctttgttcccaccaggctgagcagttccctgtcctgtgcaggtctgtgacctcatgctaagctgaccaaggctcaatacttgacactcatttggtgcatgaaccagttatgttcccaaaaatgatccacatttaatttctgaaaactcaaagaattgctaccatcttcaactccccaacaaaataccttcagaattggtttggccaaagtgccaagccctgatcctctccggatggggtagaggtttggtagggggtgacttcagagcacagctctgggaatgacaagcagttacccctcccacaagtggaatgaaggagcctcytccaacttaccttgaaagctacaacttttccggatatggtacaaacagatctgatcaccctcctcctggctaagagtgtttggggacacagaacctgaactgtcttttctttctgcaaagaaacaccacaaagatatgtcagcttctgatatggggtataaaagagagttaaagaggattcattcagttctctgcacaaaagtgggcaacgcaagctcacaaagccctatcgtgtttggggtgaaagtgctcctacacaggtggatccwctactttttagtgacaggctggcagcctgacgccacatggctgcttgccagatccaggactccatgaaggggactcctttctcaactctcgctgtccaytcaattcactaggagacccatttaaaaacacaagtgcctgattctgccctagactgacttcactccagactgactgaatcagaacctccaggggtgggacttgggacacttttgtaataaggggagaaccattgtcttacatgttgaggcatcttacaattccttctatgcctaaggttgtgatgacccctgagggcaaacagagggctaattttataaactagatttgaagctatatagcaaacattcattaatgaactatcagaattgggtactaataccaagacaagagtaataaaaagaaagtccacatttcaaaatgaagcccctttaattaattttaggttaattatcaggatcttaatataaaaagggcacataaatcctttctattttacctttactagcaccatgccaatgagtctttacctatgacatttaccctcacccagctaaccccaatgagcacataaaattaatttgcmatccctatttagtgtcacctgtcgttattcatcttcccttttctttttataagcccctgagatacttcactcaaaatctaggtctatgggaccccgaaggtcatctccctctctcccgacgatggtgactgctcttgcagctgacatcactggcagtggatccctcctccctttctgacaaggctataatccaactgtattcaaggctgtaagatactcctaaagatctatttaatacaaaacctgtctacttctaggattcctacaactgaaagaaatcaacaaaacataattgaagacaatgtaaagaaaaaacaaattcaaaagacaacttttaaatataaaagtcaggtacaattagagtggtgcttttgtttgcaggtagtcctggcatgcaactgacattctaggaagtgctctattaaaattgtagccaccactacagctgagagggtttgattctgctctgaggggaggcatgtctcagcttcgccaaggaataaccagcacccaagacagcgcccagcatgtggcaagcacacaaaggtgctgaatgaaagagtgggtaacagaatggccagccaatggctgatactgtgaaatccaatgaatgccagtgtatcatcatctccctgacagaccacattattcatctgccccacaagaggtactcaagaaatgcttattaaataaaaatctctgttcaaaatctgcctgtcactaaacctgacrgtcttttttaaaaaataagtatcctagcacactcattcattcaacaaatgtcagagtacctactgtgggccaggcactgtctaggtgctggagatgagcagggaacaaagcaaatttacaatggctcaaaaactctacttaytgatgtcaggaatacagccaatgccataattaaggtatgcttctttcactcattttgtaaaatcagaatacaacacaaggaatgctccccagagctgtgcagcacagcattcctaactttgggttcctccctgaagagcatgctctcgtgggggtgaagataggggtgactgcacagggggaggagccaagtctcccatttcagtgcagactaggcccatccagaattcactcaccatcaataccaattcacatttgtctaggatggcatgcttgatcatgtctatgatttcaacttatcctcacccccgcactccctgccttgttaggaaagcatcatcaactccattttactaaaagcagcaccagacttgcccaaagtcacacattccatgtaatggctagctggaatccgggaacccccagcccaggacctcccgtgctccccaccagccttaccactccccaccagccttaccagaagtcccctgtgggacaaaaagaggaggcactctgctgggggcagagctcttattcttgatgtcatgtgcatttctataaatggtaggcagcctgctcaccaggtctgagctcatacccaacttctccaatttttccagattctcagaattagagaaatcatgggatctcttacagctagtgccaaacttgcattccccctgtaaaaaatactggcagatatggagcttgatgcactgcttttgaaaggcacaagagccgtggggtccatctcctttgttgtaatgttggcaaatctgttgacagagagggaaaaaaccaccagttcaggaaggtctcacacgacaccacctccccagtggccagtccactggtgagaaaggggcttcacaagctgtgattccatcatccacacagaacacagctattacatccctcactctagatgacggctgctaacaaatgcccttggctaaaakgggaacgaaatggaaaggagactgcacagaatcagcccctccactgggaaaatccaagaacttcaaagtgactagagctgctcctttcacatgagacaatgcaaatcaaatggctacatcctaaggacctctacaatctacctatactcttcccacactgactcatcaactctcccttccccaagccccagttttctctgagctctcttttctacaattcaaagtcaaagaggctctgagggcttaaagcatcttagagaaggccaaataccaccctttcatttctcaatggagcacactgagaggctcagagaagttaaagaatcagccctagtcgcmcagctatccatggcatctgtgtgatgtttgtggaactgggttgttggcaaagctggcccttgaacttcactgctccttctgctccacattccaaatttctgcaggtggaaaccagaccagagatcaccaagggcccacccattccactcccagtcattacatttcccaagacacaggaatgtccccagggagctgtggaacccagacttcccctggcactcacttctggcaaaagcmaggggtcgttctgaaacaagagttggcatagctcattatagctcaggtggtcaacgccatgagttctcagcacactcaggttgtgttcggttgtcaagctgtgactattcctacagttcttcctgcaaagaagcagagctggtgttatatgtcgaattgagtctcctcaaaatttctatgttggagtcctaactcccasgacctcaggatatggctctatttggaaagaaggtctctaaagaggtaattaagttaaaaagaggtccayagggtgggccccaaacccacaagactactgtccttataagaagagatttggctaagcacggtggctcatgccygtaatcccagcactttgggaggccgaggcaggaggatcacgaggtcaggagattgagaccatcctggctaacacagtgaaacyccgtctctactaaaaatataaaaaattagcggggcgtggtggtgagcgcatgtagtcccagctactctggaggctgaggcagaagaatggcatgaacccgagaggcggagcttgcagtgagccactgcactccagcctgggcaacagagtgagactcagtctcaaaaaaaaaaaaaagaagagattggggcacagacacacacagagggaagaccatgcgaggacatggtgagaaggtggccatctacaagccaaggagaggggcctcagaagaaatcaaccctgccaccttgatctcagacttctagcctccagaactgtgacaaaatcgatttctgtygtttaagcctcctagtctatggtactttgttatggcagcgctggcaaactgaaagctgataaaatcagtcttcatgacaatttttcagaaacacttcctgacagtatttacaagcaccagagaaaaaccagcatgtagsctgggtatggtggctcacgcctataatcccaggactctaggaggccagggtggatggatcacttgaggtcgggagttcgagactagcctggccaacatgaagaaaacctgtatctactaaaaatacaaaattagccgggcgaggtggtgcatgcctgtaatcccagctactcaggaggctgaggcaggacaatcgcttgaacccaggaggtggaggccgtggtgagccaagattgcgccattgcactccagcctgggcaacaggagcgagactctgtctcaaaaaaaaaaaaaagaaagaaaaaaagaaaaaccagcatgtctacatgacaacaacaaaaaatccaatgtgtatttaccaaggaggagatggggccttgcaaggtctaaggcccaggacagcgcctctgaacaagcatttgatgagaatgacaaagaggagttgctgcacagcagtcagtcggtaagcagttagccacaggctgaatcaatgagcatggcatcttatcattataggttacatatgtgcatgcgtgcaggcgtgtatacacacacacacacacacacacacagagccctgaacctagctcttttttttttttttgctctcttcctccattctttccatccacaagcgtctgataagcaccagggtgagccagacattggcaccatgccctgagaacccaaagataaacctttaaatgactgcctgagtcaccaggacccagaagagtcaggccaacagcatttgtttgactctggcactgccatgcctcctatgccacatctcaggagaatgccaaaccctgatccaccccaaacctgcaccttttacagaatcccccagctcagtaaaaggcaacttccctctcccactgcacagaccaaaaaccctgaagccatccttgcctgctctctttccctcatctagcggaggtgacagacatagaggagactctgatacggagtggaaagtgcaacgtcagctgttgtcagaatctgtcagcgcagagcggaagggcacctgagccagtcagggctgggagagaactggggaagaaatcaggggagcatgctggatggcataaagcctgagtggaatacttaaagggtgaggaggagacagcaagagaaaggaagaacattccagaagaggggcaaataatttggtgctgccagagccaaatatatctaataagtgtaacgatgactgatggtaacaatgataatgactactaaaatttattgagcaactgccaaatatcggggattgccaaaatgttttatgagttaatcattcagtcctcaaccagcctgtgagggtagtaatatcattaactccactttgcagatgagggaactgagacctggaggtaaagtcacttgccygaagccaycagctagcaaggagcagagcccaggttgaaacaaggtgggctggatcttgggactgtgccctagaccaccaggctcaatgcctcctgagtagaggactaagagtcaggcacccaggactccgtaccagctctgcagcaggactgatgagctatttctaaaagaactgaccctgcggttcaggaagacaagcagagtcacaggggaagcagaaaagtgcagccaaccacacccactctccctaaagtgagtcagaaatggaaggttcaagaaactcacctgtgtaaaccacaaggaaaagagaaaactgaagaaagaagaaaactcaaggtcatctgagccagtaaatatcacactacagatttccgagacaagtcagacctgaccccacattttgggaactagcttaagaacagggctgccatctttattttaccaaatatgaacatgaaacagatctaccagttacccccatgagtggctctatccagccaccatttgctgtgtgccttcctcctcgtgggctgttgttccctgctstyccctggactgcctcatccctgaaggctgatttccccagagttccaccctcagcctcttttcaggcctcagacgctacctcagatctgatccactcctggggctgcaactacaacatacaccgcccaatatctcccaaaccagcccagcgcattggggccctggccttcctcccaagcttctgacctgaacagctgcctcctgggcatgcttccaaactaaaaccctctcttgctctctcagtgaacaacacccaggccaccgcaggaacagagactgaagagtcgtcacctctcacatatcctctcatcacaccgtcaccagctatcccaaatttctcacacacatagcccttggaaagctctaatctagatacttccagacagctgcttcctagaggcatttcccagtcaccctgcatctagacagggtcacgagacagcttctggtcaakgggatgtgggtgaaaggaaatccaccacttctagacctggcccacaaaaacctcccatgcatccctcttttcgatcagccccctcgaacttgataacctaggctggcctcaagagccatgtgctgaggggcacagagcggaggtcagtcagcctgcatccctgaatgactgtatggatcaaggcccccaccccatgctcactactgggcctgacatgagcaagaaatatctactctattaagacaaacatacacacacacacacaaaacagggagcaagcaagaaaggagggagcaggggaggaaggaattctccttgatgactagcttcccagtggttcccccacaacatcctcccttaaattggcacccacaccactaccttagacttcctaaaacgcaaacctgatggttgctctctcctgccattttacccgccccatcacctccagggtgaggccyaaattctttagcataaacctcagcaatcccttccacacatcccactggccacatgctatgcacagaacatggacgctaagtgctggggagacagctggagcctctgccctcagggagtttctattctactggcagctgggtgccatgaggaaaataaacagttccctgtgaccaagagtaaggggaggaaaaatcctcaaatgggatgtgatctttaggttgaggcctgaaggattaacaaatagggccaaccaagagcaagaagggcattccaggcagagcaaagactcccagaaatgcccaggctcccagaaatgcccgggggggggggggtgttccagtcacagaagggtcctgggtgggcagggaccagtgccccaggaccttgtgggcgatggcagggagtctgcattttccagtttgtaagcagattaatagggttgaactgggtttaaagatctctaccagctgctgggcagagaaaaccttcattgtctggcctcaaagctggcaaggggcgacccgcggcgtcgtggagttcccctaagccgccgcctccctccctccccaccccacacggccacacccgggtgttccacccggcactaccatgctctatgtaaatcactctctccccccaggcgtctagaggaccccactcgaccctgagtccctcgcactgtgccaggtactccgcaggtgctcattaaacgctcgctttagtgaatgacggtgcgaggtcagggcagagccaccgaattgtctgctcaaacttcaagtaggacccccaagcgggctggaagtgcgtgrgggcgcgcrggacctccgcccgccgtcgctcccggcgcggcgccttacccggctctcaggaacttgcaggcgccgtagaccatgaacctgcagaggtggagctgcgcgcagagccccacgcagcccggcttggagccctggtgcgcgcgacacaggcgcagcggcgaggcggccagcaccacgcgctccggggccgcggctgcgccgcccgcccgcaccgccaccacgaagcgcccacgctgccgcagcagccgctccagcgcgtcggcgctcaagcccatccgcaagcggcgccgcagctcgggcaactccagggcgcccccggccgcgcacagcacctgggtgacctcaccgacgacgccggcctgggccatggccgctgggcctgctcccgtcggaccgcgggtggcgcgacgcggacggcggcggacgctggctggcgggcggctctcgcagggtggagacgccggcgggaaacgaaaccgaaagcggccccgggccggcgaaaaacagaacctgtgcgccctcgccacgcccccggtccgcagctgagcggctgcgccttccgcctcagggcccccagctgtgaggccgccgcccgacggaagctcgggagctcttgagctcgggcgttcggcccggagcgcgggctgtggctgtggcggctcgcgggggtcagtacctagtccctgaaaatggcttccctggatgtttgagggaccaggagcccctaatgccgcgatgctcagcgcgccttcagtcagagggagcctcgagggcggcggcagcgctggcggagccggctggacgccgccggttaaagccgctcagcgtcgcccaggccaagcccgggcttcgtagacggctcacagaaacagggacaactgacgggagctctcacccctcgaacaagtgacaaaagcgatcactccgcatagaagacgcacttaattaaaggttcctttcgcctcggtgcatcaatgagttccttcatttaaacataaaagggtatgtcctttaaaagagcaaatccgtgagccgagattgcgcgactgcactccagcctgggcgacagagcgagactccgtctcaaaaaataaaataaaataaaataaaatccgttactcccagcccctgctaagtaaygattgaacaaatattttagaagacccttcagagcaaaggaccctctcacacgctgagagcaatgcgagttgttagagccctttgargaggtaatccaggaatagctattaaaattgraaacacgtgtgacctttgacccagcaatctttcctctcggaatcttccagaagtaaaaggaacagtaaataagttatgtgtgaaagtgttactgggggaaccctacctgggaggtagggttacgtgggaacagtgtggttgatctttaaagactattacgaaggctgtttaacaagcatgcgttagagctccgtgtgcggatgtagaggggcagacagccatgatgtggtggtaaacgagaaaagatggctgtacagaaatgtctaaataatcaagttgaatgatcaagaattaatttttttaaatgtctgaataacaaaaagagaagcctgtgtgtgtgtgtgtgtggcaggatatttttgaataagcacggagaaagatgaagaaacacacaagggtagttgagaggaggcagtaggaggtattaggaaaatggaaaagggaagatgagaggcagaaagattgtggggggagagtacttacggtatacggtataacattcactaaaaatgaatataaaaatcttaactataggccaggcacagtggctcacgcctgtaatcccagcactttgggaggtcaaggcgggcggatcacttgaggtcagtagtttgagaccagcctggccaacgtggtgaaaccccgtctctgctaaaaatgtaaaaattagccgggcgtggtaacgggcgccagtaatcccagctactcgggagacaggcaggagaatcgcttgaatccgggaggcagagattgcagtgagcggagatcatgacactgcactccagcctgggcgacagagtgagactccatctttaaaaaaaaaaaaaaaattacctgtactattactacaaaaatgtaaataataagtgtatggataaagactagatagtaacatggacaaatgaaaatgaatttatttaattaggaaattgaatgaagggttttctcttggattttaattgtgattttaatgttttcattgtataaaatgttaattttgtttttgttattgttttagagacaaggtcttggtctgtcacccaggctgtagtataatggtacagtcatagctcactacaacctggaacttctgggctcaagcgaaccttccaccttagcctcccaagtagctgggcctagaggcacgtgccaccatgcccagataatttttatatttttttgtagagacactgtctcatttgttgcccaggctgatcttgaactcctggcctcaagcagtcctcccacctcagattcctaaagtgctgggattacagtgagccaccacgcctagcctaaaatgttaatttttaatttaaaatgttaggcagagtgcagtggctcacgcatgtaatcccagcattttgggaggccgaggtgggtggatcacttgaggtcaggagttcaagaccagcctggccaacttggtgaaaccccatctctcctaaaaatacaaaaattagccaggtgtgatggtgtgtgcctgtaatcccagctacctgggaggctgaggcaggaaaatagtttgaaccagggaggcggaggttgcagtgagtcaagatcgcaccgttgcactccagcctgggcaacagagcaagactccgtctcaaaaaaaaagttaattttagttgtggtttccatatttttttgcaataaaataacatttttaaaaaaagaaaggaagagtgatgtcagtgaaaatggtggattaagtatcccagcaagtttgcccttccataaaggaagcaaggaaagaactgacaaaaattgtcagaatcaactttcttagagccctagaaattagtcacaggtttgcagcaacccatctggcatttagtcaggaaaaacagcaaactctcagtaagaacagcaatatttatagtattttaatttaccctagtcctatcgcacccccatctctagttccatggcagccttgaaaacttacagcccacgttcctagtacctgtaccagagggaggagacagggctggagctacttcaaagtctcattcccaaagaagagtcattatttaacctatctagtgggtccctggaaaaaaatcctgaaaagggttgtctttattcaacctctttggaactagctcagtcctaaaggtttttccacctgaagagggagtgatttgtcaaatattttaacattgtaactggctgaggcaataggtaacggtaggggcaaacaatagactaacaaagaaatgtaaaaggaaacgttgaaggaagagatgtccataggggctttgaaaagctccagtatattttcaggaatttagaaggccatgtgcatgtgtagggctgtgcacatgctctgttaacacctgagaagatcctaacctctcactactagctgacactgaggctctgtgctagcaggaaataaaagctatgcagagttgcaaactgcctaatgaaaattgaagacataccccaaagtgcatacagagccccttggcaaagactaggagacatattggttccaggtgtttaaggaaatctccatctaatcattagttgaccaagtagagacttcaatagtcacacacaatgaagatacacactttaaaaaattagttcaaaaaagttactaaacagcaactattaggttggtgcaaaccgcaattatttttgcaccaacctaatactaaaataagcacaatcaaaccctgaggagagaggagtatctgactttgagagttggcacattgtttgaaatgtccaattttcaactaaaaattatgtgacttgcaaagaaacaagaaagtaagacccatacaaaggaaataagagcaatcaataaaaactgttcctaagaaaacccagatgctgaactttgtagacaaagagtgtaaatcagctatttttgatatgttcaaagagctaaaggaaaccatctctaaaaatgtaaaagaaaggatgagaatgatgccttgccaaacagaatattaataaagacacagaaattataataaggaaccaataaaggttctggagccaaaaagtacaataactgaaatgttaaattcactagaagggttcagcagcagatttgagcatgcgaaagaaaaaaaaaatcagcaaacttgaagatagatcaattgatgattatctggtctgtggaacagaaacgaaaaagaaaaatgaaaagagcctcagagacctgtgggacaccatcagatataccaataacacaaaatggaagtcttagaaggagaagagagagagagaaaggaaagcgagaatatatgaagaaattttggctaaaatttctcagatttgatgaaaaacattaatctacacatccaagaagcttaatgaattccaagtaggaaaaactcaaatagatctacacctagacacatcataatcaaacttttgaaaacaaagagaatcttgaaagcagcaagaaagtagcaactcatcatgcacaaggaatcaacaataaaataaaaacagttaacttctcatcaaaaaccatgcatgcagagggtagtgtgatgatgtattcaaaatgtgaaaagaatcaaccaagaattttatatccagcaaaactatctttcagaaatgaaggagaaattaagatattcccagataaactaaagctgagcccgttagttgctagcactgggagaaacactaaagagagtcttttgggctgaaagtgaaagacactaaacagcaactggaattctcatgaagaaagaaaagcaccagtaaaggtaactacacaggtaaatgaaaaagacagtataaacgtattttttgtttgtaacccccatcatctgatttaagacaactacataatgcagtaattacaaatataagttgatggacaatgttttgaagatgtaatttgtgacaataacagcagaaggaaatggggaaggaaagtgaagccatagagaagcagtttttatattctgtggaaattaaattggtattaatccaaactggatttttataaattaagatgttgctggtaattcctagtgcaaccaataaccaataaaatacatgaggccggacacagtggctcacgcctgtaatccctgcattttgggaggccgaggcgggtggatcacctgaggtcaggagttcgagaccagcctggccaacatggtgaaaccccatctctactaaaaatacaaaaaattagccaggtgtggtggcaggcacctgtaatcccagctactcaggaggctgaggcaggagaatcgcttgaacccaggaggtggaggttatagtgagccaagatcgtatcactgcactccagcctgggcaacagagtgagactccatctcaataaaaaaaaagaaagaaagaaaaaaaaagaaatgataagataatttaagtggcacactggcaaatatctatttaatacaaaagaaggcagtactagaggagttgaaaaacaaaaaaaaagacaaaagacgtagaaaaaatagaaaaatggcagacaaatcctaccttattagtaattacattaaatgtaaatggattaagctttccaattaaaaaatagagatgggcataatggaccaaaacaaacaacaaaaatagaaaacatgacctaactgtatgctgcattcaaaagatacattttggattcaaagacaaacagattgaaagtaaaaggatggaaaaaatataccatacaaatggtaaccaaaagagggccggagtggttatactaatgtcagacaaaatagacataagataaaaattcttactagagataaagaaggacattttataatgatcaaagaatctaccaaaaatatataataaatataaattaaatgcacttaacaacagagtcccaaaacacatgaagcaaaaactgacagaactgaaggaagaaatagacaattcaacaataatagttggaggctttaatatctactttcaataatgaataaaaaaccagacaaaatatcagcaaggatatagaagggcaatactataatccaagtagacctgaaagacatctatagaactcttcacccaacaagagcagaacacatattcttctcaagtgtacatggaaaatactccaggatataccagatgctaggctataaaacaagtctcaagaatcgtaaaataaattatatgaagtatgttctcttgccataatggaataaaagtagaagtcaataacagaaatttgaaaaattcacaaatatgtaaaattagaaaatatacttctaaataataagtcaaataagaaatcacaagagaaattagaaaatacttttgagatagatgaaaatgaaaacaaatttatgagatgtagtgaaagcattgtttcaaggaaaatatgtctctgtgaatgcctacatgaaaaaggatctcaaatcaatatcctaacattccatcttagaaactagaaaaataagagcaaactaagcccaaaaggaaggaaataataaagattagagtagaaacacaatagagaatttaaaaagaatacaaagaataaaaccaaaagttggttctttgataagatagaaaatttataattctttgcctacagtgaccaaaaaaagaaaaaagaagaagactaaaattactaacatcaggaataaaagaggagtcattactactgactttacagaaatagaaaggattatcaagtgtaataatcacattttctagtttctatatttgatgctttgacatcttggggccttctcgacactagaaggactacgtgtcccagggctagctaattcctagatacagctaacaagtcacctctgagctttcctttcataggcaaaccaaccaacccagagtccatacttccaatcacctccttcatcagggttctcctggggctgtcatactgtaggccagtattctcttttcctaattgccccaggtccatgtaccagacaactggggacagcccctataaccccagagtctactgaactaattaaaactagcctatgctaagcttgcttaccctgcctcaacccaggaaccacaacaaaggctcttggctatgttttctcctcactgtctctgtctcctgacatgtactggtgcctctccgtgtggccctctgtggcatgctctgctttcctgtttctagagatctgtgagtataaaaacttatttcatcatagtcatttctgtgtctgtgtgtcttggtatacctgattaaaacaaatcctagggttgggtgcggtggctcacgcctgtaatcccaacactttgggagtccgaggcagatggatcacttgaggccaggaggtcgagaccagcttggccaacatggcgaaaccccatctttactaaaaaattagctgggcagggtggcatgtgcctgtaatcccagctgctcaggagactgacacatgggaatcatttgaacccgggaggcagaggttgcagtgagttgagatggtgccactgcactccagcctgggtgacagagctagactgtctcaaaacaacaacaaaaaaaatgctgggtacccttttaaaacataggttataaaggattttaaggcagaaagatagttagaagatacctataaaaacatacaagtggaaaaatacccagaagacattggatctgtgagtctgacatttatagaagacgtcagtactagagttacgaacatacagatggtatttaaacctacgggactggatgagaccaccctagaagagagtgtaaatgagaactccaaggacctgcccctctgaaagagaagg

SEQ ID NO: 96696 - DNA, 216929 bp, Homo sapiens
  misc_feature (1)...(216929): n = A,T,C or G
atatatacctttagtattgcctttctagaattaactataagcaagaaaaacttattttttaaagaagaaaagaatactttttcactcttacttataagagctggttgtagcagcactactaaagctagttggtatgctggaaagaaatctaaaaggaattctatgaatcaaaagaaactctccagagattttctctaaaaatcaaacgaattctgccccttttgcctaaatccaactcaggagccccctctttgcacagtcctttagctgagtcccacggtgcatgggatggcacagggtgatgctgtgtaaaggcctttctttgctcagacatgcaggagacagctgtggctaatggctgcaagctcagttctggagctgggcagactcaggttcaagccctcctcgcccctcaagagttgtgtggctctgggcagtttccttggctgtagggggactaatattgccgatctcacagggctacggagaagatgaaacaggacaacccatgagcaattcccagcacagtgtgtggcatgcaggaagcgggagtatcactaaatggttcatagaaatatgaggccacgcattgctattaattaaaaaaagttaaaagattaaaaatcacatctcaggaagggcctgatgaacaaaaaagggaaccttggggattctggcccatcactgctttatccttccttcaacacctgccacttctcagagcatccggtcagctcccttatctataaatgggggctgttatccccctccctgtgggatggctgttggggccccttgagacaacgctcataaaggccttagcccgggagtcatgaaagcattcaacaaatgttggctattatttacttgagagatattgcaaattttaacaaataagggacagtcagtgtcatgttcaacacagggatctgagatgaggggctcccagaggcttgggcaagtccagcggggggcatcgggaagaccctctctggtgctggtgttctgggacgggagccctgcagggggcacttctctgcaaactctcactgggtttgagggaagaacggcctggagttcttttttgaacttttcagaagctgcaacaagagaaacctctactatgctgggtccctctagtgagccacggtgccaaaagcctccaataggttttttttgcatttaaatcctgtttcaccgccttccattctctagtggcctgagattttactgagtctggtctgtggagatgagaagtgagagttctaaggcatcaaagtggaaaagtactgctattccgagcccagcccccgcgtgctctacgcccttgatgcaactgaactcctggcagccctgctttgctctctcccatggtggcctgggattagtcaagcccacgtattggtatggcaccttgtctcccgatagcagcagcatcgaaggggtcacctccactcctcttaaaagaatagcacagttttgaaataaatgcattttttttttttaaaaaaaaggacagagaggaaagagaaagacaaatagaattgcatcactaatgatgtcattattgcctggaaaggaacgaagggaaggccattttgtccatttctggaggcgtctttgagaagggttctttggctaaagaaaggaacagtttcaccttcctttccaatttggtaaggacatctctggcctgctcaagtttgaagcttccccatcagaagtctgtaaaacacaccagaaggaaaagacacagacagggaatgaagcctgcaaagtccctggggctggaatgtcttgtggccaagtcactcctgctggcgctgtggagtcccaggctggcctgcagaaggaacccttacctctcctcaattctctctgctagttgagagcaccgagccatttccttctttccattttctgtcctagggtctacttgacaggccaacaagagtggtggtcccacaccccaccctgccctcagcatcagacaaagagaacctgggacaaaagctggggcgagctgggtccccacgtcgctctctcaaccatgagccatcagtaatacttcccgaagcctcctcatctcctccctccagtttccaagaaagtttgttccactcactcacacatgctcacacggcctaaatcttccaccccaagcttgttccaatatgagtgtttgccattcccaaggtccaaccaagggaaatcgttctgtcagcagttgggctaatctccccttcccttcctgatgtccatccgtctcacacgttggtgtctgggcgggctgagtcttctaggttgaagaggacaaaggtcagctggctcccccagcccgtgaacacctcagccaccaggaagactagaaaggctaacagtccaggagatgaatgccgctttgctccaacccttctttttcctctgaattccactgaccgcacgctccacttcacagtattaactggcatcaagcctcgactctcccaccccttgatctgctcacccacttcccttggaaacatccaaaacatcatgaagaggccctaagcacagagacatgggggcccacgtccagacgggccagtcagaacccagtgagcagaagcaaattgccctgcggttcaccaggctccagttaaacactcctccgtgacctgacatttcaaatcttcccctcttcctctgaacaatgtctcttcaaatgggaaggagggagcccacaaaagactagaggatgctctagatgattcgtgggctaagtaaggactaggttggcatccctctgcttgagagcttggtcctagtgacagcagcctatttgctaaggtgactcaatggcagattcggccaggtatgcaattgggcatccagggagctggcctctcctgcagggagcttctcttggggcttctgatgtggcagctccatgcatgggggtagaggaggccattgggtgaggactaggagaatgtgcactaatgtttgctgagcgtctgtggggctggcatcgcccaatacttcccttcccttcccttcggtgaagctggctatttcacccctttcttcaactggggcctagcactttgtgggtctggggacagcgtgtgagcacccagcgcacacagcacagtgcactgaagatgtggccggagcccagtggggatgctttcagagggggtgcagcctgtgatgcctgagcagccgcccagctttgttcagggtttctctggcctcctgctgtccctccacccacttccagctggctagaattgggtgctgggggcatgcatcacagggggagggggcaggctgaggaactgggtggtgtggtgaaatttcctggggaaggtaccacctgccagtcactcttacgccacctcactgtgcccagcagcttctgggagggggcaaatgtccctgcattgaagaacctaagccacgccccaggtgcgccgatggcaaaaggatggattgtggggaagcggatggggtcacctctgggagggaattttcttgcttaaataccagaggcaagccaaagatttagttaacagatttcagaagcacaggagagctctgaggatgtgggagagaagctggctaagggctggacagtcagtgactcgacattccccgagcccatgagatgccacctgacgtcgcatcccaggcctctgggatctagaaaatgacaaccttgatggtgaccatgttgtcagaagcccaatcaaggctttgattcttctttaaacttttgttctgtggtggatctttcttgacgtctcttgttgggatagagatgacagaaacaattttcctacttcctaagtctttcctttttttttttgcctgacaaaactggacatctggatgtccctccagtctacttatatactcacagagagaataagtttaaatattaaagagaaaacacaaagatacttggaataaatgtgcatttaaaaccctgactaaaatatcaacataatgatcataattacaatggtaataaaaataattagtacaataatattatctttatgagcagcatggaaatttcattcctgatctggaagaataaaaggaaagaaaatgtcaggtgaaagagtaagtagcctccaacttaagcagacagaataattttctttaaaatgaaaagaacattttaagctgtctttccccctaaaagatcagatctagaaagggctggaaatgaactgtgcccaggaatctgggggtgctctccagtaaggcgaactgaggctcatttgcagccaagacttggaactcgggatgagacctaatgggctattgctgccatctggctgccaaaaagtccctaatagatggattttccaggctgacccagctgtggggcgggggggggtcctctggcttctgtgtcctctgaagcgtttgctgccctcaccctctctgaactgaccattgtcctgctgtctcagagggctgcgcttccccacctccagataaagacagtattgataatggcccgagggaagggaatctccttgctgcaggcctcttgccggcacagcctccagcaggcacttggcaagactgcccggctgtgcccagcatggagcagtcatggtgtccttccttctcgctgaggcctggactaagctgtttccagtttggggacctgtttctttataagtaagaatttatggttggggtggggaagtttccagagttatttcacagctaagagctaagtaacgacttcgttactgagttaggttggatatcactacaaacacacctttcacagtagatccttgagggagactgcacagtgaggaagtaaagggagggaggatgaggatggggccgctgactcgggaaagatctctttgcaccttggaaacctgcctgtggggtcagctaaagactcaacatcagaagcaaacaattagaaccacccttttcggccccatccttggccagattctcctgccattcacattcacatatttcagagttatttactatgaagagagggaactccccacttctccacacctccatccccagaagtgtccaaagcctgagaaaacttccagaatgtatcaaaggtgcaaagagggcaaagggcagatttctttggaaattcaactgtgtgagtttttccaaagtgcagcgtcagacccccggccaccctcataagtgtccctccaaccttctgcccactagaaccctcagaaaccaaaaccaaaatcatgtcttgagcagacctgggtaatgtgaggagagaattcaacagcaaacagaggttggtggttgtctacagagggagggatctggcaagatcgttagagcaaaacagcccagggagccggaggagagagtggagccccgggcgaggctgagagctccaggctctcgtggaggcgggagggactgggggatgccgcctggggcgggagacggctgcctggcgaggccaacagtccggaaacctctggcctcacaaatggcggaactggggacagagtggggcaggggtgaagggtggggagtctctctgggcctccgcccacaaattacaactcaactactgccacaactcaactcccgccgtccccatctccagacgcacccgccgggcatctgtctcccatatttctttcgagatccacggactctctcctagctcctgctggcttccctggcatccttccgctagcaaacagcccaggaaagacaacgggcattaacattttaaaaagaaaaagaaaaagaaaaaaaaaaggccagcgtaaactgttacaacagcacaacagaagagctgagattgtgtctgactagcctcagtttcttggagtaccagtggaagtaaaccctcacgccgcgtctgtcgctcggtaaggcactaggagggaaggatgcagtgtcaagactgcgccagctagggtggcggcgccgagggccacgcggggagggcggcgcgtgcacacccacacgtgctcgctcacccgcacacctgcaccgccacattggttacatgcctatgttatatcgcttttttttgtgcaattacattgaggaatattctattggtatcattggagttgaacacaaggtaggagacaagggtgctgagtgctacattctactagggtgtctgtgacgaccgctagccctacgctacgcgactaggggtggattcaaagagaaaatacattttcagaaaagaaaaaaacctaaagtttgcaacacacattattaatgacatttgagaaacaacgttgcttagggatttatccagagtgctcagaaaaagaaaactcgccccgcgcccccgggggccttccagcagcctggccgtcccccgtctttcctgactagggagcccggactgggcttcgccaatcccacaccagctccaaacatcagcctcctcaggctgcagcccgacattctggagggctgttgaccctttcgagttctggaaaaatccctaaatcttatgttcaattaattaaaaatctatttgatttccatatcaggtgtccctgacagcagtcttccgtatcacttgctgccatatgaaaataatctttgaaaagttcataaagttcttcaaaaactggggccccccgtttctggaatcttcctgttgctctcttctcctttccagtttggcgtagaatgggttcttgagctgggttttttgttattgactttttttttttcctttttcttttttaaaataaaaaccatagatttcccaccctctttaatcccttccttttaaaaatgttctcttctctgctctacgtcctcccacttcccggttcaagtttcactggtgtcccgacccgtccccctgccctctgccccccccccccccgcccctgccccgtttgcattgtttgtgtgcggcatcttcagtataaaaggccagcgcccacggtcccaggagcgcctccctccttctctccctcctccctcgggccattctctccctccctccctccctccctcccctccagtgtttatatgtaagggtactggttgaccttggcggggctcagtgggtatccagtgtagacggtggaggctggcgaggcgctgatgtaggtctggtgggcaaattgggctggatactgactcgggtggatggtgggcgagggcaggacccgggggcccatgctcacggggacctggtggacgatgctggctgggtaggcagtgtgctgcacggtgtggcgcgcagagccttgcgaggccaccaggtgggccacggtgccggtggagcccagggccgccggcgcagtgtaggtgtagaggtggggctgggtggggaggtgggcagcggcagcggctgcagccagatgcgggtgcacagtgccgtggctggggctgttgtgcgggaaggagtacggagcctgggccatggtgggagtgatgtaggcctgctgccttcggtggctcccagtgcggtccgtggtgatgtgctgctgagcctggggaggagaggcaccaagagagacgtcaggggccgacacatggggaggaaggaatgggaggaggggcaggagggcagggaggaggaagagaagggaaagactccagaagtaatagaaggggcttccctctgtgtgttgagaaagtaaaaatttacttgggacctggcgcagtggctcacgcctgtaatctcagcactttgggaggcagaggtgggcggatcacctgaggtctagagttcgagaccagcctggccaatatggtgaaaccccgtctctactaaaatacaaaaaaattagccgggcayggtggcacgtgccttgtctgtagtcccagctattcggtgggctgaggcacaagaatcacttgaacctgggaggtagaggttgcagtgagctgagatcacgcgagtgcactccagcctgggtgacagagtgaaactctgtctcaaaaaaaaaaaaaaaatttacttggactgagaaaatcccgacttggcctgccactcactgggctgggatgatacacggataaagccagctgcaaagttataggagaacatatttctcccaaggacgtacagaagctgtgaagtatcaggatgccccaggctggagtgcagtggcatgaacctagctcactgtagccttgaactcctggcctagaatgatccccccgccttgggctcccgagaagctgggactacaggcgtgagccaccgcacccggccaggacamtctctttgagcagcagttgctttcttactcactgtaaaatcttgttctcaaaattattggmtctcacaacatctctacaaaaaattttgaaaattagctgggtgtggtggctcatgcctgtagtctcagctactcgggaggctaaggtggaggattacttgagtccaggaggcagaggctgcagtgagagccatgacagtgccactgcacttgagcctgggtgacagaacaagaccctgtcttaaaaaaaaaaagttggctctcagaagcgttgctgtttgaagttctgtcagtccaaataaaatagccctcttctacctggtgaacctaagtcacgtgacagagacacgggctccactgatgacctggggcagcacttcagatgaggggctctgaacacaaacaccccatttatctcactttgtttctagagaaacagggccctgagtccaccacgtgagtcaggcctgatgccgagcccttgacacagacagccctgcacccacagaaactcaggtcactcacatttcacctcaacccaccccccttcctccaggtcctgggacaaatcttacccttgacttgggggctgtggtgtgcgggccctccctgcaatgagtcggatgcaggtctgtccctgatgtcccaggccgacagggccgggacacagtgctctaccctttgctgggttgaaacagcagtatgtgggccatcctatttttaagctctggcaccatgtcactaagggctttgtaacattagacaagtcgctttgctttgggccagcactctgtgcactggtgatatcaacttccccaagggtgacctgtggtagaaaaagccaccagaggtcaccaagggcatgtgctgccacccgtggccaggactgcagccctgtgaggtgggtgaggggccgccacagcaatcctctctgaagcggaaggatgaggggatgggggccctgcctggcctggggcgccagctgtggggcttacctggctgagattgagtggctgctgctgctggaagtggrggcccggccgctgctgccggtaggtgatggctccagatgagctccctgaagagtgaccgctggtggaggtcacgttgctggaggacttggacttgtaggaggacgagtggtgactggtgttgactgyggcgggaggagaaagaggtcagatcagtggcagggtcccagctgcccagaagatgctaccccaccagagaacagtggtcttccaggaagaaacatgtgcctgaggccgggcagtaacaaatcagcctcatctcccccggacccactaggactttgccttgactctggatgcagtggggctctggctcactccctcggctgggagggtggtcggggctgcatgagggaatgaagcaagggaaagcggaaaagaatcaggagaggcaaggtgggctggtggcctaaggccaggcccagtgccgttcctctgggaggtgttaytttcagcatctggaaaatgggtaggagagatctgctataatttgaatgtgttccccaaagttcttgtgttagaaacttagtccccagtgcaagtgtttagggtggggccagtaagggatgttaggtcctgagggcagagccctcatgagtgtatgagttcatcagtgcattaatattatctcgggagtgggttagctattgagagattggcttttttgatgaaaacaagtctggccccctcaccctcatgctcttttgtccttctgcctcctgtgctaggaagatgcagcacaaaggtccttgccagatgctggcatcctgttcttggacttccagtcttcagaatcgtgagccaaataaacttctattgattataaattacccagtctcaggtactctgttacagcaacacaaaatagactaagacaggatccctgcttggtccccaccatgggtgactatgagtatcagaggagacagtgtctgtggtgggacctaataaactactagaagctaaaataaccctcagagtcacctggtccagttacctgcctctaggcaggatgagactaaatcatccggggaatggccctgtgagccaaacatggccaagcacaaaactgcctccatgttattgccaagggggctgaagagtggaaaaaacactgcaaccctccagaggtgacctcatggtcagcaggtggctccatcaacagttctcaaatgtaattcctgcatcttgttcagtgcagactctggccagcagctctggggggcccgagcacctgcatttctgacaagctcccagggggtgccagtgctgctgcttgggggaccacgctctgagtagccaggggctctgagagaggtgggttaaaccctgagctggatggcttccatgttacccagccagagagccaggggagccaggagcctcttcagagcccagtggttttaactcatccaagtattttctgagctcctgccctgtgctaaggacggtgactgtgtaccaccagggacgggggtggcagggagaaggctgagagcgtgaataaggaggaggcatcacagatcacgcagatgaggtggcgaggccagaggataaaccagatgaagacgctgacagtcagggacagcccaagtccaagaaggctgatggaacaggacagggcaggacagggcatgagtgtccagcccagcaggggcaagagccccagagggcgggagctctgctgccgagtgggggccatctccccaccccagcttggggagttctgcagacaggaccatcaccccttgataaaagcagaagagatgctttactagccccccatgtccctgtgcctcagctctcctccaggagagggctgcctaacacacagtgcagtattaatacacacctaaatgaaatttccaatcaaatgcacccagatgcaccagtcatagccattcattaaatgcaagcacttttgtaatggcaaaagcaacaaacagacccagactagtgagaagatactgggcttcctttttttttttttttttttttttttgagatggagtttcactcttgttgcccaggctggagtgcaatggtgcgatctcggctcactgcaacctctgcctctcaggttcaagtgattctcctgcctcagcctcccaagtagctgggattacaggcacccggcaccacgcctggctaacttttttgtatttttagtagagacagggtttcaccatgttggccaggctggtctcaaactcctgacctcaggtgatccacctgcccttggcctcccaaagtgctgggattacaggcgtgagccaccgcgctgggccaacactgggcttctttaggagcaaactgcataatggcctaggaaagtgtgggaggcagaaaattccagatacctttctctaacttcaatgacaacggaagcagaaaaagaggggtttagtaagtgaaggctacgacaaagcagcctgaagactgtgtggtttgtgttgtatagttagaaaccatagttacaacaagcattgcttctgttccttaaacgctaaagaacagtagagttaatggagaagaaaacatcttccaggtggaaagacaggcagatggtcccccaccaagaagggcagggcagaccagggaatgaacaagagcctggcgctggggctgggggctgtcctgcctccttgggcaaccagtcctgctggggtgagatgtgcacagaaacaatactgatttttttttttgagatggagtcttgctctgtctcccaggctggagcgcagtggtgtgatcttggctcactgcaacctctgcctcccaggtttaagtgattctcgtgcctcaacctcccaagtagctgggattacaggcatgcaccaccacgcccagctaattttttttttgagacagagtctcgctctgtcgcccaggctggagtacggtggcgtgatctcagctcactgcagcctccgcctcccgggttcaagtgattctcctgcctcagcctcccgagtagctgggactacaggcgcccactgccacacccagctaatttttgtatttttagtagagacggggtttcaccatattggccaggctggtctcgaattcctgaccttgtgatccacctgccttggcctcccaaactgctgggattataggcatgagccaccgcgcccagctgctaatttttgtatttttggtagagacagagtttgaccatgttagccaggctggtcgtgaactcctgacctcaagtgatttgcctgcctcagcctcccaaagtgttgggattacaggcgtgagccactgtgcccagccatggtactgattcttagtctaagaaccagactgaggaagactttgcccaggaaaaagggagcgcattttwagagagaaaggtaatgagtaacctcctttccgccatcctttgttgatttgagcacttcatgtgttgtatcttgtactcagttatttttcttcattaagtttctggaatgtgcttgaaatatttttatcaccttgactttctatggaggacagctaaattcctttttttattttgaggtggagtcttgctctgtcgctcaggttggagtgcagtggtgcaatctcgactcactgcaacctctgcctcccaggttcaagtgatcctccagcctcagccttccgagtagctgggattacaggtgtgtgccaccaaacctggctattttttgtattttttagtagagatggggttttgccatgttggccaggctggtctcgaactcctgatctcaggtgatctgccccacccttggcctcccaaagtgctgggattataggcgtgagccaccgtgccggacagctatatttctgtgatttatattttttggaaaccttgctggactttaggattactgcctggtgacactgaaaagcgtaaggaagccctaggagaggaaagatgaaataactgagtatgggaaagagctttggccagggaatccagtcattcgccaaaatrcggtgctattgttccacagagccccaactctaaagcagtccacatttgaggaaggtgcccaaagtaggggtgttcaaaggacgaatcaggtaaaatgtttcatatgaagggagaggcagcaagaacatattgcaagatgtccaaagacagatctacacctcacgttcagaagcaagaattcggagcattcattttggggcctgagcatcttaggtgaactggaaggctcatactgtctcaatgaagtatcctatgggtggttagtgtaaaaggagagaatctggtcattcttggggcagaggtgctaaatattaatgagccatgcatggaaacgaccaggcccttgattgaattcgrttggatcaattctattacaaatcccagggcgatgaaatcaaagtcaaagaggagacgcctgaggctggagccagcaagaaagaatgctgattaattgttgatgaagagagaaatgtgcctctagaggtctcagcctctcaagaaggtcaaaggaaaaccggaaacctggggacagaagtttctggtgctcactacaggtggaagggggccttcctgaccycaaaactcagagccccctgccctaagtgaagggtgagctgccgcagtggggatgggggcagtgggtgctattcagaggccgcaaatccaaccgtgcatttgcgcctggggcccctcccaccccatccactgaatcggaatccctcgagtaggtacgggagatccggaatcagtattcttagcaagcttcccaggacaccagagcctcctggccctggctgaacagacctgcatttgggaatcagggccttgcgacccaacactgtgcccaagccaaacccattagactcaaaggtcccccaaaacctgagggatggagggatttttgtggactcaatgtagaaaagaaaaatagaaagctgcaaacattggctctgcagagcctgcttcttgccttctgcagccacaatgtggctgtgttgggggaagcctccttcttgctctgcggcgggtcacagactgtgctgggccccgctgtgcatgtcacctacttcttctattccaacttcctgggcattttgtggtaatgatatttgagggagaaacactgagctcgagggatcagtgaaggggttagggaatgttagatgaaatgggcgtaatgcagccctgatgctaccatcatcatggggacaggagatgggggttgagtcagagcttgccaagctctcagaggacgagagccccgagtaagggaggacgtcctgaaggggaccaagagattaaagtataacagtaactcctcctgtggcgatggacaaagcgacaatgggctaatgctggtcaacctcctaatgtatactttggaacagtgaggaaacattctagagttttccagtcatgccttgtccagctactctccgtgatctcctgtcctgagaacagccacagtggccctgtctacactaggtgagttggcaggggtgcttacagcacagataagctccagggccagacctctgggaggcccagccacatggctctgggaaggctggtcaacccctctgtgcctccatttttaacctgggaaactgggaagatcatggcagctccatgtagggctgtgatgaggattaaatgagttaacaagtgtagaatgcttagtatctggcatctaagggcttaagtattgagtatctggcatttacgtacttagtgttagctattgttggtgtcattattgaactctgtctcctggttaaagctgaggctcaaaaaaaggtgtcttggccgggcatggtggcttatgcctgtaatcccakcactttgggaggctgaggcgggtggattgcctgaactcaggagttcgagaccagcctggctaacgcggtgaaaccccatctctaccgaaatacaaaaagttagccgggcgtggtggtgcatgccggtagtcccagctatttgggaggctgagacagcagaattgcttgaacccgggaagtagaggttgcagtaagccgagatcgcgccactgcactccagcctgggtgacacagcgagactcctctccggaaaaaaaagcaacgacaagtgtctctccaagctgggacaatcaattctggtctcctggaaatgggacaccaggagcctgggagctgctgtcggtgagtcgggtgaaggcagcttcagagagcaggcatctggcccccagggctcaggtccccggggttctggctcctgccctgcctgggacttagttgttgaactttcccttagccctgcatccttccaataagttgtttgtcttaagccagtgtagagttcattctgttgcttccaaaagaaacttcactaaccccaacctgagaaggactgaaagactgagagccacaggagggggtgagtatggcggggaaacagcagtgcatatcctggcctaagagggctgggggagcgctgaactctcccatgctctgggtgctgtagctgggggagctgttaactggctgtaccttggcctgtatgcatcactgggctccagggagctgaggaaggctgctttcccgacttttccaagcctaggtgggttctacagctaaaggtgtgtatcggtattgaacgccactggctggggaagggcaggcaccagacgaggaatgcccctgctcgtgagggcacaggcagcactcccgcatatggtatgagttcagtctgcagcttcgaggtttgcacaaacatatatttaaggaacttaaataatgatacaagacaaattctatcctttgcaaatatttaaacttaaaaatgtgtgctgcatatacccttaaacaatatttaaaggatagctgagctgaaaagtatgcagctctctttaaggaatcctggctcccgggaatgacttcgggtgcctcccagggccctttggttactgctagagaatgttgcttcctggcagggtttccaccaaaacatttgcccgggtggaaaaagatggtttttggagagagatgtccttgtagccttgtggaagggacagcttcattttcttttcctcacagagatgcctaattttgggagggctccagcctgcttctctggccccaggtcaccagaccctagcagcaagtacagcctggcccctgtcaaccagaatgctcgccctggcatgtggcactgctgtggctctatttttcctgaaggtaaggtctccttcttccgagagagcacagcgcgagctgcgtgctgcttgtgtgtctttctcgctgtaggcaccacgaccccctgcccccaggcccacaggagcgctggctctgatgtcaaagctgcttggaggctgcatcgtcatgacggtactgttggggacagaccaggacttgcaaaaggagacgttttagcagggtgctgagaagctgcatttcacaagcatttcttcagaggaaaggtagctggggtaactccaaagtcagggaaaaagagcttcgccgcaaatgtcggaaagggtgatgctgccttgggttaggaagtaggtggcggggagcgcaassctgtggctgtcaccatctcccctttaggcagagcctctcagcaaaaggggccccatcccaggcaatgccatgagctcttgggagagcgtgccagggctctgaccctcaccgtgcaggctggcctgaggcactgggctggaaaagccctaatgaccccatcctgcctctacgcttcatcctcagtggcagcccctgaatggggcctgcgcccactgggtctcacatgtggtcaccacccaggaagagtccccagtttcctgtagcgacctcaggtgacagacatgaggtcctcctgagaagtaacagcttctcacatctagacaaaagcttcctggcgttccctttccttcccttttcagttatgccgccacgcaggtgcaggctggcttgggtgtggtttgtggcggaatagcgggacgcgcagacttcttctggtttagtccccacattcttccactgtgagcatgagcaagggaaacgctaaatagatgctacaaaatctacagtgagccactgagtttattcagaaggttacgttctcagcctttattccagggcccaattttcaagacaagccttcgcgggacaggaggagtcctctgaagatagcagtgcatgagcagagaaacacacatggcttggtctcgccgcccagcagctgattccgaggaggggctgagaggggccaatttcacccttccctagcaagactcggaggaggttcttcctacacaagaagcccatctgaccaccagggcttcctggcagagagtggtgctagatgtcagccaggaactccccagaccaggtattcttccaggctcaggcataaagaaccaggaggcttttattttctattaatcaacctagttggaagcagagccattgtaaaggcagagaggtattgattacaggattaaagaaggaaaacgctgcttatacaatgtgctgttcagcagaagcctcccctggatacttgaataaaatcctcggtaagggtcgcctgcagtcactgggcactttctattgtactagctcccatacagcaacatttctagcagcagaaaagcaggaaaaccactctccagggagaggttcctkccctgtcctggccccaaattacctggcaccaggctatcacactccaccaatacttcgctggcctgggttttcaggggtggcacgatgatggttcgggggttccccgtgcagtgattctccaggctccccttggtgtcaaaggcattggcattgttgtgcccagcacgctgctgcacggagtaggggctggtgttgctggaggagtcggagtagggggagtcgtggactgtgacacagctgatgacgttttttctttgcttggagacagtgctgaaaatgcaaagggagaagtcagaggtgggagaaggccrtgaggtgagacacccaactagcacttcatgccctggggcaggggagggaggcagaggggagagggcaggaacagggcttttgccctccctaacccccatagggagactgggcatgcaaaagtcccctgtgtagccggcagcagggggacatgtgaagacatggagaaggggctggtgctggacccacaggggcttctggaaactagggagtgagatgcttccgggctggcctgggctcttcctgtgcagcagagctcagcagagctgcaggggaggcacctgcagcccagagctgggtacaacccccgtgggcctgccagaatgggacatctgagcaaggagagaaccagcaagaacccagcaacctggggacctgggttaggagtaaacctcgctgggagaagaatgtcataagcttaggtttggtgcctgcggcctggcaaagcttatgcaggagggagcagaatgtccaatgggatgcagcgtgaggctctgagggggctgcatgcacacagcacagtgcagacatgctgcagagaacgcagagctagagttgacaccctctgcctctccttactttgagtgtgctctgtgggctgtgtgcaggccactacgacctctgcagtccccttttcaggagccaggctcacctgcagcttttccactgcctgggccaagggatcgggggagatggtattgcaccggggcctggtgggaaggcccctgccaggttgatgctgtgtgaaagccactctgaagccctggccttcatcttatatgtggaacttcatacaatagggaggcactggctttggatagctcttggccggcatgtttgttcagagatatttaagttagtgtggttactttgggaactacttctgtttgtcttcaaactcagtgagaggctgctggcatgatggatgtgaaatttattgtttattgtgtgcttatttaagactttaaaatgaatgtgcatctatttttatatattgatcatttatttttaagaaataaaaattgcctaggcaactggtcagtttccagctaattggatgagagaagcagctggtatttacrgagcctcatagagtcacagccacctcccgggtatcttgyttgaggccacacagccaggccaggctcttcccatgatggatctccaccaccctagaggcagcagggaagtgggcaaattccagagcccacagcagccaggcagsagggacagaagcagagcctgtctgctgagctacagaaggctgggggatctggggggtgcagtccccaggaggcgctggccctgctccccaacgcccagcgctcctgacatctaggctggataattcttccagtggctggacactgtcctctctggttcagggtgcctaaccgtgttcgtgggtgagaacacgaaccttggagtcagctgtctaacttcggcatgtgctggtgacagggcggtgggcagctatttaacctctcagtgattcagtggcctcatcagtaaaaggtaggtaataattgtacctatatcataggcttgttttgagaactaagtgagaaaatacaagtgctttcaatgatacacaacacatggtaagtattccataatagctgctattcttcttcttcttacaagttgtgttaccttagttaacatgtgaaaacaggtttgcaaaaaacttatttaggcaaagagaattctatcagggtaaggacttgctggaaaagtttccttttttctagtttatgaataaaccagaagattgaaatcaaagaaaattaaaactcatgatatctcggagatctacgcggggtactacagggaatacctatacaaagaaatatgtgtctctgccctcgaggagattaaaatctcagtggaggactgtataacaacatgacaagttaaatagtaaaagctttaaaataaccagttagagagaataatggatgtcacaaagcctccgtgattaactgtcagatgaatcgtacagatgataattgttaagaactcagaagaaggtgaggaatgaattggttgcatatatttatggctcttcatgttaacttaaagtagataaattttaattaataaagacccacacctcccagttatgacagtttaaatgtgaaatgtccatatgcttgttcctcaaaaagctaaacacagagttaccctatagcaattccattcctaagtacattctcaaaggattggaaacaggtactcagatacatgtaagccaatgttcactgcagcactattcaaaataccaagaggtagaaacgacccgagtgtccatcagctggtgaatgaatagaaaatatggtgtatccatacagtggaatactattcagtcatgaaaatgaatgaatgctgggaggggtggctcatgcctgtaatctcggtgctttgggaggctgaggtgggaggattgcttgaggctgggggttcaagaccagcctgggcaacacagtaagagccaatctctacaaacaattaaaaaaataagcaaagtatggtggtgcatgcctgtagtcccagctgtttgggaggctgaggtgggagcccaggagtttgaggctgcagtgagctatgatcacaccactgcactccagcctgggtgtcagagtgaaaccctgtctccaaaaaaaaaaagttctgatacatgctacaatatggatgaacctcgaaaatattaaatgaaataaaccagacacaaaaggacaaatagtttgtttgagtctacatatatgaaatatctagaacaggcaaattcatacagacagaaaatacattagaggttaccagaggttgggggctaggggagaggagagtgggaagttactgattaatggtatagtttttggttggggtagtggaaaagttctgaaaatagataacggtgatggctatacagcattatgaatataattaatgtcactgaatttacacttaaaaatggttgaaatggcaaattttatattttaccacaattaaaaattaacagactaaaaccactgaattgtacacattcaacgggtgaactatacagtacagtacatgaattctatctccatcaaaaacaaagtccaggctgggtgaggtggctcatacctgtaatcccagcactttgggaggccgaggtgggtggatcacctgaggtcacaagtttgagatcagcctgaccaacatggtgaaaatccgtctctactaaaaataccaaaaattagccgggagtggtggtggggcctgcaatcccagctactcagagcctgaggcagtagaatcgcttgaacccaggaggtggagtttgcagtgagccaagattgcaccattgtactccagcctgggcgacagagcaagactgtgtctcaaaaaaaaaaaaaaaaaaaaaaaaagcaaaagagattcagagtcttgggcacttcgccgctgtacatcagggctcagtagagacacccagagggtgggagggcactgagatccagtacaagaattacaaagtggaagctaggtgcggtagctcacccctgtaatcccagcgcttgaggccagaagtttgagagcagcctgggcaacacagtgagatcccacctctacaaaaataaaaacattagctaggcatggtggtgtgcacctatagtcctagctgctcgggagactgaggcaggaagatggcttgagcccaggagtttgaggctgcagtgagctgtggtcgtgtcactgcactccagtgtgggtgacaaagagacctacactctaaagaaaataaataaataaataaaaatagttaggtacggtggctgacacctgtaattagcacttggggaggtcaaggcaggcagatcatttgaggctaggagtttaagaccagcctggccaacatgatgaaaccttgtctctactaaaaataagaaatctgctgggtgcagtggctcacacctgtaatcccagaactttgggaggccgaggtgggcggatcacttgaggtcaggagttcgacaccagcctggccaacattgcaaaaccccgtctctactaaaaatacaaaaattagccaggcgtggtggtgtgcacctgtaatcccagctactagggaggctgaggcaggagaatcacttgaacccgggaggtggaggttacagtgagcagagatcacaccaccacactctagcctgggtgacagagtgagactctgcccccacaccgcgctggccccctgctgaaaaaaaaaaacaaaaaaacaaaaaacaatcctgggtgtggtggcacatgactgtaatcctagcttcttgggaggctgaggtgggagaattgcttgaacccaggaggtgaggttgtagtgagctgagatcacaccactacaatccagtcggggtgacacagccagactgtcttaaaaaaaaaaaaaaaagattgctgtctaccaataacaacaaaaaagaatatctcgaaatattttataaatataaattaagcaaaaaaaggaagtgggactctaggaggtctctgagctaggaggtagggaggagggatctgaaagcagggagatgctggaggctgaggacgaggagggagcaggagggaaggagagctgccttaagaagacaagggcagagaaacctgcagctgtcttctgggatgaatgcgggggagtaaagggaaacaactggtctgctgcagtctcttgtgtaataagggaactcctcccacctcacactgtttcgaagtactctgagggccaggggaagagctgggagccatgactgggagcagctgctggctcccgaggggaggtgaggagatggcgctgccctgcccttcactctcagcttcgggcacagctactcctgaatgatgaacatgcctctggtcatctcatgaaacgcagacatgttctgttgcaggtgcccattctgtgggtggaggaccccaggtgaggatggaggctgactcccaaatgtgtcctgggagctggcactgcagtcctagctctgctgttcctttactggtgtggctctggacagtggcctggataacctgtaacatccatccagctccaatctgctctgaaattcattgagagagattactcatggcattaaaggagccattatgaggatctctgaaagattcctagagacattctaaaataggaatggtctagccctaatctggagaggaaagagatccttttagcagatgtaccttacctatagacccagatctggccagttcttgctgatcatatcttccttaggatctgagtagtttagaaaatgagcatttaaaaaaaaaaaaaacaacaaaaagacaaaaacacacactaattttggcaaaactgtaatctgccctcgagtaaaattcaaattgggcatatttggagctcttcactcaaatgtggaaattgtggagaagcttcagcttaatatgaataagaattttctaacaactagaactatctcaagacacaacagccacttcatgagtcactgagcttcttgtcactgaagaatggctttctggcatgagtcttgtgagagctgacagcttggcgtgggtgacctgtgagaactgagggccatctccttgatggaaacccaacaggtagtgagcctcccactgaagagactgaagaatctgcatgtcagtgtctaattatctacaaggagtgtgggataaaacctttataaactcttcccaggtcccatccctttgttgtagctggggagcccctggcttaatgagcaaatatgtacggcacagcttgatgctgatttgcctacctttttggatttacaagtgacacatttatttgcagaaggtgaattcatttgctagctgtttttcatctcttccattgttagaaagctctgcgctctacctgaacacactatgcagattagagaactaatgggaagctgttaaatgagtcactttagaaatgagcacacatttcagatgactacggcagattctttaggctcgtatctatcgatactactgggattcattccatgattgcgtctagttattattgacagcttatcaatcccattatgagttggttaatgcaagtgagagagatagcgataggggcagagtgagaaatatttgctgaaatggccttggaagaacatcacttctgaataaagaacaaagctgtcagagttcacaattgcattatgttgtcatggcaatagataattttcatcatttyaaaatgatgaaaataaataaggagctaaaaagtaaagaaatccctaaaggagaaagcactggcagaagatcagatataacctgtgaccccttccctgtagggtcttatctggaatgtgtctctgatttctatttgctaatctgagtcaatttcatccttcaagaccagggtcaaaactcatctcctccaataacttcttttacccttctgatttcatagtcaatgctatgtgttctattactatgatgctgattattaagtacaggtaacatttattggatgcatactaactacagcttaaagtgctttatatgtttatctcctttaatcatcatggcaagatgatgtggtaaagaatatgactacttttggctgggcacagtggctcacgctggtaattccagtgtgcctccagaccagtatgctccttcctgatagctgctgacttagagtcattagagagaaaaaaaaaatcttcattttaatatggcacatacattccattcaaattattattattatttttagagacagggtctcactctgtcatccagactgcagtatcgtgttatgagcatagctcattgcagcctcgaactcctgggcggaagcaatcctcccatctcagcttcccaagtagctgggactacaggcacgtaccactgtgcctggggaatttaaaaaaattttttgtagagacagggtcttgctatattgcccaggttggtctcaaactcttggcctcaagtgatcctggcaccttggcctccccaagtgctgggattccaggtgtgagccaccatgcctggctcctcctttcaaattgtattatctgcatatttatgtctatgtctatgtctacacgtgtgtgtatataaatacacatatatcacccttaagatcatttttacatgactactttctagagaaatcagaaacagggtcgcagaagtagccatgagtagtcacctcgtccttgtcccatcagatgcagcggaaggaagtgtttgctctccttccatcttcttctgaagtccagtctctctcttcccaactggcctgggagttttgactcatctttcctcatcaccttcagtctatccactgagcaccgctctgccctatggtatccaaccctctgccacccctcttcctccttcttccctgtggaaagcaaggagcaaaccaggaagctgtggcatatcagtgacagctttgtaatgtgacagcagctggggacagtagggtgaagtgtctcttcttcaaaatacacccctgagccactctactcagcccactggagtgtcttaaatggagccctgtaaagagggtgtggcgaagtcagctggacaaaagatcctaccatcacctcttgagatgagtcacatgactgaaatatttttcaactggggatgtattgtactcaaaatggagagacaccaaagttccttcaaatggcactgtgtgtctgggttcctttgttccttcactcaagcctgattcccacgtctccatgagcatggcaggaggctggctgtagcagcttctcaaccaatggcaggatggagcaagctacatggttataggtagcaatggaggctaatcccactttgggctttttgcccatgcaataataaatgagtgtgtgtggtttttgctccctctgttaagtggatgttaatttttcaggccaaagtaatttgagctgcagtttatcagttttctaaccttgctttatctataatgatttctctagactttcaacttagtataaacaaggaaaacatttcgggtcaaattttttttatatataaacatgttaagagtgagctaagtaactgtttttatatctaaaatactgaatgatatttatgaatcaattttcttaaagttttcatttttggtaacgtcggctgaaacagtggctgcttacacaggcacagtgaagtgcagcctgcaggagacacttgatgacctaagcagaacaacccacctaccagaaatatccaggtaactgaatgagtgaatgcgtgaatgaataatggagctggacaaaatcatttctatatgatcagttgatgtgaaccactttggtttacacacttaaaaaattactctcggccaggcatggaggctcacacctgtaatcccagcactttgggaggccaaggcaggagaactgcttgagcctgggagttcaagaccagcctgggcaacatagtgagacactgtctctagttcttacaaaaataaaaaaagaaattaccctcatgactaaaggttgtatgctacagcctttacaagaccatttcaacacaaggtaaagatagcaggggggtctggatcaggagacgtggatcaagagagtccaggagagaaaagatggcttgttcagtatgtgtagacaattaaatgcttttctaatcgaaattgtctataaatatttaaaagaagaccagttctactacttaatcctgggggacccagaacaatatctgtttgtcttatcttttggccaattctctagccatgaccagagtcccctagtccaacagtaattcactgaaaaggagttccctggctcttccctgcccttcttactttaaaaagagctgactccgcccttctcagtgccatggctccagcactctgacaaacgcccagcaccaagagggggctcagtggacaatactctagactccctatggccctggcatggtgacctgcacacagtggcatagtggtagtcacaggagggagcaggatagaatctgtattcattgaatgaatgactgaaatcagttatttttgccagttattaagtttgacatttcttcaagagcatggcacctgagtcccaattctgctatttagaacctgtatcaatttgggtgagtcacctacctttcctgagcctcagtttcttcatctatcaaatgggaatagaaatatcagccttgcatgccccatcaaatgatggaggagctagtgcgggtggaacacccagtgcatgtttgctatgattctcctgtctttagctcagtgtctcccagcatctgcctccaacatgccctggagttcttacgagtggagctgctggccagccatctgctgtgcaaccaacagtgccacatacgtggggtcaggaataatgattttgcattggctttcttttaaaaattctaggctatatcatctagtcctagaggtttagtgacaccctcaatcaggtctaaaagcccctttggtggtggaggcactgccatccctctgaaggtcatcggctgcctgactctggctgccaagctgaggctgagccatgttaggggaattaaccagcattttaggcaaagttacaggactggcactggggtaagtagcaaatagaaaacgaggctgggaacacagaaggtgggaatcaacatgcccacagcatggagaaatcaggctcgagaacaaggatgatcaatgtgtaggagggaaggtctccatcgctccagctgggacacagaagggctggggaagctcttcagctggagagggaccaggtgacccctccatgtggctgcacttgggggtgcatccttgttttcccaggactgatgcttccccttgagcccctcagtatctcctgacaaagctgaccacccccatgtaaggggagatccctccccaaccccctttccatcctgaagccccttttggataagctcctgcacaggggtcttgatcctgttcgcttgccttggaggctctgccccatcaatcacctcacttgaatttgcaaccgcacctcctctactgtgtggacctgtccagacctttggccttcaaagcccccctcccctgctattcccttaagctattttccctttgagttcccatggtactttgctcatttttatgggactgacactgtgttttgtgttataatgatttgtatgtgtttcgtcttgtttattaccctgcaaacctcatgaggacacaaactgtctaccttatttatgtaacacctgcagttcccagcataatatcttacactagtggggccaataaatactgactgtgttaaattttatgataattctgacttctaagaacaagtaatcatatttccccacattttttttttctgatcccaaaatgtagtcacaataatgtgatcacagttacacagtggtttctctataaataaaacagctactggtttctgttttatcctactcagactcaaatacactttcctaccttcttgagtgcaaagacattttctaaggcacttgccattagatctctctagaaaacattattctgggagctcccagtcacaactgtggacagctgaagccttttggatgactccctagcctcagtctgcagcttccctattcagcctcatgtgtccggcacattttcacgaccctggcaggctggcagtccccgccactcttcactgcaggatgctgtgggactcagtagccactgctactgtctgtctgtggctgcccctcacctgtgcacctggctctctctcccaggtttctttgagttgttcccatgaaggtcctcatctgctgcccagcctctcggttctatcatttctttctgggggccttaggggctgccgcagaggcacggacatgctctggctttgcgttccactctcagccctgtcagctctctgactggtggagagacggctctctcatcctccttctcagacacgctattcaattctctcctgggcacagatgttgagagtctgtgtcaactcagatctcatacgttaggaatgagattccaatctagctgattgtcagattttaaattgcttttgcttttttccatttgtggcaaagggccgggcaaggctgctggacccttctgatgaccaaggctacccacgtgtgggtggctgctcaaggccaggcttcagtctggggctgggcagggccgtcccctttgtgaagagactgctgagcccacgtgaggactgaaccgacagtattcctgggtggtggtgtgggggcactgcggagaatggaccattcactcaacttgaggctgtcatcaaaaagggacctgaggccatttctggactaggcagatggggagtaaaaggcagtcctgggctgccaaagtattcagtgctatgcctggacctttgacctgggtcccctctgacacctggcacaatgctacggccacaagtgctccactacattcttctctgaaatacaatgacaattaggctgtacctaattggtgggaagaggacacttgaatgagacatgtactaaccccacccagaaacaaactaaaaccactggacttcattataaagagggaagggaacgtcctatgcaggaatagttataatgagaatgttttcatcagtctatctatacattttgtaatgatttcaaatgtgagaatttattatctaatcaaaggatttgtgattactaattagttacattgcatccaatcaggaattaataattcgagcctaattgtgaattaggcttcatatccagctgcaggatgcgtgctgactggcagcgctgggcctgggaggggcaggcctcccttccctggctctcggttccagtgcaaaggagccagcagggtggggccatgagattttgggctctacaaggccacactctagggatgcagaaggccaggaggccaactgttctagaggggttgctcagaacctgagctgagtggcccaaacaaaaaccacattttgctgaagtctggctgggcagtacagaaaaagaggctctggcgccagggttagtagttttgtaaatataataaagatttcttccctctccccaggaagcacacaaagactaaaatgaattattattactttgggataaacagtaatgctctctgggtgaagagccaactggcagttttgaaagattaggttaatcagacacagggaaatttctgattaattggacaattacttcgtattctgagtgagccaaggcaatgttagagaaatatcctgaccaactgggaataaattcactagcttgaggcagagacttttaaacttacagaggatgaaatacactggcattgtgtgcccgatttttatggtctcaagttccccaaatgtatagggcctataattatcttttaagaccaacatgattcgacattattttggttttaaacaattatggaaaacctgtttgacattcccttgaaataactttaggaccacagtagatggcaaaaccaaactgtaagggtcagaagagagggatccttatgtttgatgatggaagatggtcagatctgcacacaatgcaaaccctcccggctccttcctggaaggctaaggtggcactgyctcacctggtgggggcgtgtttctgttcctcctcctcgtccgtgtcactgctgatggtgatgacgctgaccgtggggctgggagtgtcgggaatgacaattgtctgccgctgccgttcccgggtggtgctggaggccacgtcgccccacccacaggtgaccgaggtgctgcaggccgggctactgtgcaccatggcacagcggggaggtgtgttctccttgacacgcttggatcgctgtggggagctgatggcctgagaggaggacacctcacaggtggagacatttctgtaatgagaaaaccacactctcacacagaggaaggtcaggccccacaactccttcgaaggagcccaattgcctagaaacacctgctttgccaaatctctgtaaaacacgtcagtggctgcccaatgagcctccatctgtgactgggaaagggatcattcagtgagcggctacacaggccttctctgggctctggtttggatctacatgcctgctcccagcaggacaaagggagcagccagggctttcggagcagggagggggctcttgtgccccaggctctacaggtcttgtaggagcagatgtcatgccaggattccagctgtgtttgccccaacacaccccctcgccttcagggtcaaggccctacttctgagctctgtcttgtgtcatcccttcaaaggtacttaagtcttgttttgggggtggtggaagaattggtgtttgccacatcaagctttggtttccttgctaatggttattctactgaaacattcattccttaagagtttcaggatctaaaggacctaaccttggtgaccagtggttcagttttccttctttcctcctctggaaaaagaacatgaccatcaaagtatttgtgtgcatataattgctaaaaaccttaaaaatgatttttctggattttgcctcgtggagcctcatgggaggcgcattagtctaaattgtaatagaaaatttggaaaagtgcaagagttttgaaaaagcactcttaaaaagagaacttttaatcttaattttgatcaacttgaaattccttactaaattaaccagtgtgatttttggtaactttaggggaaaaatactttctcccctccctattagatcctcactgactctggcacagggtgaacatcttttacctgaaatgcttggtccagaagtgtttcggatttttgttttcagattttggaatatttgcatatacataatgagatatmttggggatgaaacccaagtctaaacacaaaattcttttgtttcatatacaccttatacacatagcctgaggtcattttatacattattttataataattttctggatgaaacaaagttttgactgagaccacatgtcaggtgtggaattttccacttacggcatcatgtcaatcctcaaaaagttccgaatttgggacaattttggagttctggattagggatgctcaacctgtagtatctatgcagtgagagactaacagcaatgtataatgaaactcagacttttatatgtctttagagattctagcaccttctagctaaagggatggcagtaaaatgaaaataattcaataaaggtggatttattttcctatctagctagtgccagatacattgcttgctccttctagggactggtaatatgtttcactgatatgattgtaccattgtttgtacttactataaacctatgtatttgtcgttgctaatacattacaattttaagattatgtttttcactaccaatggttttagtatctccacttggcattgttaaggaaaagtatgcctggccacatcaccaacaagggagagacttctggtctttcagactgttttgctaaggcattggtcttaaaaataagcaaatacatacctttcactataattatatcgatyttgaaatgtactggcaatgaggcttcatgaagtcagctgggtggtgagtaaacaaaaaggagggacttgctaaacaggttgggaggctaagggttcttactgcccctactcagccaaggtgaaccacaaagatgctaagctcagtcctgggacagagtagtgctccatgtgaccttgctgggcatgacagcccatgaggattgagacagtggactttgttgccacccagtctaataatgacatgggtgagctgtcacaaggctgccaaacaaaagcgttctggaaagctgccaatgatctgagataaatttccctgagttgtcagaaatacccaaataaggaatcttggaggatgacaacttcagcccttggatgaatttttgaataagaatgaaaagaaaaaggcctagtttctggtatctgcttatatgaggaagcagaaaaccaaaatcactagacattttgtataccagatttctcttgattgacttatcgcaaataagcaattaagcacctcaaagctgtgccattaggaagagatgcaggagcaatcctgtagtcacacgatctctctctctctctctggcttggaaatctccattttttaaaaagtcaggtttattaaggtataactgacatatagcaacatttctccctttgaagtgtttgatgagttttgacaaatgcacagtcataaccccccctacaatccagacttagagcttttcccctcaggattcttcgcagtcaatctcctcctctcctactggtctctggcaagccctaatcggatctctgtctctatgttttgccttttccgaaatgccatatagatggaatcatacagcatgcagccttttgttgaccttgattttttcaaagtgttcattgagatgagaatggatttaaagggaatgggaaagatttgtgttctgctggttagtgtctgggattaaacaagctattgcttctatttaagcaaggtgctaaatcagttaaacttctgatcttagatacaaagaaagcacatttctttagtattttttaaaacatttttaaacaacttcaacattttaaaatattttaaaacaattattatggtaaattgtttccaaaatgaaacttcaggtgaagctgagtgttctccagacaagtagaaagtgacaaaagataatttgcttcaccaaactttagtcaggcttgtgaaccttctcctaggtctaactgtgcactctgctgtacaatctacttttggcaaaaaaccttgctaagtcagtttagcaagaacccaccatccctgatatctgatcaccctcgatatctgatgaggttcctcatcctccaggtgtgatatctgatcacccgggcctgtcattagcaagaatcctgttaggtcagtttaggcagaatctcccttacccctgatgcttcctcttagtaacttcccatccaccgacaccccccaaccctgccttggctataaattttcactcgcccacgctgtatggagttgagcccaatctctcttgcccactgcaagattccattgcatccatccctacactattaccacggtcttaaaccaagtgcttcctgcaaaccctaggccaaaccaggtggtacaggatgttttgctagtcactgcaggaagaggagtgcccccatcccatgcaactgtcccatgttcagagtgggtgctgatactccctaaactacatttctttagcactcacatcccctgggatttctcttccctagggtggctctcaycacctacctcacagatgactggtgctgcttactcttccgggaggaggtggtgctggttggctgctgccgcatcacgtgggccacacccacatttaagggctgtgctgctggaagggtcacatgaccsgtcaatagtgcaggctgctgcatgatgggattataatggcttccgtgagcatgcgtatttctgaaaggsaaccgggacaacaaggtgccttagaggtgttctaaaagtagagctcctctataagatcaagcttcctccccaattaaacgctgactgcagttggttatctcactagctgtgcagctgctgaagggatgarcctggccaygtgtgctcaacgggtgggtttcttctactcataaggagtaggtgaaacataactggctgtgagtgagaaagaggactttcaagtgggaagaatgccaagtacaccggctccaagtttttaagttctagggactggagataaatattccctccaacttttaaagtccctgagcacctaggtgtttatcctgaacaatattctattttagaatttacaggccaggtatggtggctcacacctgtaatcccagcactctgggagaccgaggagggcagacggcttgagctcaagagtttgagaccagcctgggcaacatggcaaaaccccctttctaccagaaatacaaaaaattagctgggcatggtggggtgcacctatgggcccagctactcgggaggctgaggtggcaggatcacttaagcctgggaggcagaggttgcatgagccgagattgtgccactgcactccagcctgggtgacagagcgagacactgtctcaaaaaaaaaaaaaaagtttcaccttaattttataaaaaaaatttttaaatgaagaaaaagcggaatttacacagtgtcttcaatgggttattttattccactctgtgacgtaggcaggatatcttagcaataccattttattaaagaagaaattatactttacgtgaaaaacaaactttgaagcctgggagccatatgcttctggtgttaggaagtgttaatgttcttttgaattccctcagtggctggaacaatgctcaggcatatagcagctgatcaattaattacacgcttgctgaatgaataattagattaactgaaggttgactagacaagtataaagttggtattaaatcaaaattaataacagtcatgatagaaatactggcagccctcatcctaaaaacgggttatgtttcacaattcttataatttgggttgtatgaagcttaaagccttgttttcccacagaaatgttaaaggtggtgactgactcagagattggcccataagagctcatttaacacataataaaattcaaagctaaaggataattcatttgaattttagaaaattataagaacctattgttgcaacatggggaaaaggatgaacaggaaaaaagaagtagatgaacacttttgtagggattttgatagcgccttttgggcatttacatggactttagaaactcatattatggcttctttttttttttttttttttttgagatggagtctcagtctgttgcccaggctggagtgcagtggtgcgatctcggctcactgcaacctctgcctcctgggttcaagcgattctcctgcctcagcctcccgagtagctgggattacaggcgtgcactgccacgcccagctaatttttgtatttttagtagaggcggggtttcgccatgctgaccaggctggtctcaaactcctgacctcaggtgatctgcctgccttggcttcccaaagtgctgggattacagacgtgagccactgcatccgaccaagaaactgatattatggcttctttattttgttgtagctctttctcctgtagacaggtggcactctttctcttttgagtcaggcctagcactggtacttctgtttgttagccacaataatagatgttctttggctcacacatgaaatggagagagaccaggaagagagtatgctggctttagatgtctcctgtggtcactaggtaagagatgtcaaaacgaaaggaaggagggaggaggaataagaaaatatgtaggaattagtaagtgtatgtgtatttctgaaattagatgagctataaatgctgaaagacaaaagggaaaaaaaggaatatgtcatgtgtgtggtcttttaggagaaaaaggggcgagggaaaaaaaaaaacccagttggtcagacagctttccactcggctgctcctaaggagctggaggaggaaaggcaatcttgctgagcatgggccgatgtgatagtggggagggaagatgacaggtttatttaatgcctgtcatgtaccgggcactgcgatggtgcatgttaaatataggccaagtgctttgtattttatcttactttaaacctcccaacaatcctgtgaagcaggcattactatccccactttattgaagaagaaactgaggtgcataaaggttaacttgccccaggtcatgcagagccaggattgaactcagctctacatggtttgagatggagtctcactctgttgcccaggctggagtggtggcatgagggcgttgccagaagggaagtgagtgggactgtggggaagggcccaggtactctgtactgggcagaaaatgaactggaggaatggaggaagctgcagtaggggtctgactgggggcttatatcaccacctttcttcttttctcggagagatcttaattcacaatagccttgtaggtcagaataagaactgtgggaggttccctgkgtgatatggaggctgtcagggggttgaggggagtgacctgtcctgatattcgtgcagaatgagagatagcccaatagggccatgaggagttggggacaacttggagggttgccatctggctctgcactggtgaaggggccattgtggtggtgttygggggaaggtacaagggtatctagccataaaaataacagaggagcgcatctgtgaggaaatcatgagttgggcagggtagagttctggaaacagatgcagggggtatgctgtgctggcaggcagtcaggtggacgcctctggggtgtgtgggaagtagactctgatctgtaagatatgactattaactgaagaggcacactcagcaaacatgccagcatttacccttccaaataaaccccattctgtcaagccatcccgtgggaggtcagatagactccagagtacccccgtctcaaacatcttcagaacactttctagaattgcttagggctttggggaccctcttctgcattctttcactggtgacagacctttgttttctgaacgtagaatttaattctgagaaactaccaaacatcatccagaaccaagtctggtgaattacactgatgagtaaatgacataactgaattctgggtggaaatgacaaccaagcataaattaatgaaactgattttcttgtatcctggtatattatttaaaaattgcttcttgttaccctgcactcatagtccacacaatatttttagaagctttaaaaagctctctacaaaccggggaattgaagtacaggccagcctggcagccctgtgttggcagtggacgtgcctcccatcccagacacacccactcaccctagaggggtttcctgcttacctccagtccgccagctgctgggtgcctgccatggtctcgggaatcacggtggcatgctgcactgatgtgtgggtggccactccagtcagttgctgccatgctgggggaagyaggatctgctgggtcccacttggccaagcctgctgtagaacacaggacatgtgcaatgaccatgtttgctaatcacataattgatttgcatgaacccacacttattctgtgcctggggttgtgctagacattctcatgggtgtgagagtgagggcctggtctctggcctcaaaaactaaagtaaggggagataaacaatgaacatacaggccgggtgcagtggctcacgcctgtaatcctagcactttgggaggctgaggagagcggatcacgaggtcaggagatccagaccatcctggctaacacagtgaaaccccatctctactaaaaatacaaaaaattagctgggcgtggtagcrggcacctgtagtcccagctacttgggaggctaaggcaggagaatggcatgaacctgggaggtggagcttgaagaagtgagccgagatggcgccactgcactccagcctgggcgacagagcgagactccgtctcaaaaaaaaaaaaaaaaaaaaaaaaaagaacatatatgaactaagtagaagataattaagtacagggacacagctgtatggaagggattcattcatgttgaagaatgatttctttataaatttgctctaatgagcaatgcttgaagtttctgaaagtttatttatttacttgttctgtcccacaactatgtacaggggattagggtagttgagttgagctagatgagggtgaccgctggccctcaagaagctttctgcctagtatcctttatttaacattttacctttgatttatcaattagaatctaggttccagcttgtgttatcttctgaatctaagtttacacaattctaagatcaccaaatatctggaacctacatctgagagcaagcaagtatgaagtaaaattcttagctgtgactatagcttaattgagaattactttgatttctcaaagcaaaaatgagagagaggcggaagtcactgcttgaacctaatttttctaagaaatctaaaatgaacgtttgtgattcttccttgatagattcactggkgtgtgtgtgtgtgtgtgtgtgtgtgtatgttgtgttttaagctcttttaatccatgatcactattctgcttgtctttggtcattagatgattcagactgaataccactgcctaaagttggacacttaaagcatagtcactaaggtaaaataccttttggacagatcaaatatttaaaggtttgatatcttagccatctctctttctatcagagtggatgtgactaacattgggtaatttatcgaatgcagtgcttcacaaactgtgcatgtgctcagtgtgggtgttttataggtacaaatacgcaattctggaaatggattacagatttgagtcagggcctaaaaaacattgacgcttataaaaatgagagaatcacatttgagagctgagtggaccagttcacctgttccgttattttcatgttgcacctgaggcccagtgcaatctcttagatgtttttgatactgtttgtttgcttttgatataggcagaagctcagggaccatgcgcataccatgagtgcttaatatctgttgataaaatgaaagaagcaactctaccaacgctattaactacagttaattgtatttcaggtttacttaactcacagaaagcggaaacataatttaattgattamaacagttgcaaattccaaatattaaataaataacaatttcgtttgcagtaaggtttctactgacttagccaattggaactcatttcagagctcatgaaaagcattagttttaactaatgtcatttaaaaaataaatcttgatatcaagctaaggttatcatttttcttctatttccctgaaatggatattaacattttacctcaaagagatagggtagaaagactatttttgacttatttcactgattgatatgcttggctcatttgtgacaacgcttcatcagacatttttataatttattactactaacaagaatgaagtgaacatttcttaatggatattgtgtgccaaacacagagttaagtcataaatgagtttctgactacttcttttttctgacttcttaataccagttctgtgaggtagggactgttattttcttccatttctaagattaataaattgagacacagagaggttaataatattaataacttgccctgaaatatggtaaattaaacatatacatttattgccttctttacactcaactaaaatgatagtaaaggaataaaaaatacagattcataagggcaaagagagtaggagagaggcaatcaccatgaataaaattttagaagctgaaaaactgatggacaattactaagtgaattaacagactgaaggaatctaagatcaggtcttcatttccccttagttcccagatccttggtgtacatgcttataccaccctccactccccgccccaaagcaggaggctagacaattctctctaggggaaatgactagtccaagagaaaataactacagatatgacatttaaggatcaggggatctgtcagtgaaaatgctggacttgcctcttttcagtctatagagaagcccacattcaatagtctctcccctaccctccaggtttccaattagttttttagtgctttagtcttaaataggaatgaatagctaatgawcaccagacagtaaaggaagcctctaacctgaaagagaataaaataagcaaacaaaagaaagaggaaacaaaaacagtgtgggaatcagaagaaaattttctaaaatctataattaatgcctttacagagttaaaaaatatatccatgaaacaagatcatataaagaatcaatatctatattcagagaacatgctcttttttggtatggagggagcagagaacaaactcttggaaatgagaactacaacaacagaaattaaccattcaaaaggaggtttcaaaaaagtttaagaaatctcttagaaagtagtgcagacagaggatatataggaaatagaggggaaaaaaagataagaaaatcggaagatcaatttagaagtaccaacactcaattaataagaattctgcaaaggagaaacagagaaaatggaggggaagaaattatcaaaggaaaaaaaaaatccagattaaaagggcaaatagggtgttcaggacaatgtaagaaaaaagacccaaaagaaggcatgtagtcatgaaatgtgagtccactgtggatgaggagaaagtcgctttcagagaaagaaaaaacaacatactgagatcagtgtgctcaaacacatcaacacatcaaacatacaaaccttttatagctctggaagggtttggggctgtataatgagatatacagaaaactaacccaatgggaaaaatgaggcaatcattaactccaggaaaaacaaaaagatgtgttagaaagaaaacataatcacagtatattataaggctcaactaagaataatattatataatattgataattatgtaaatattacaaagtagttgaatcaaaattatgtgggaggaataggagaaaagagtgagtgaaaggaggaacaggagagaaattgtgtgtgttatggggatggcagtgggttagaaagctaaatcttcatcttccataataggaagtcaatggrtaatacctaaaatggaaaaaaaaatccataaaaagcagtctaagcatattatttagaaacacagagttaaagaacagattaaacagttaagttaaaaattatcgttatggccagggcacagtggctcacacctgtaatcccagcactttgggaggccaaggcgggtggatcacttgatgccaggagtttgagaccagcctggccaacacattgaaacctagtctctactaaaaatacaaaaaaaaattagccggggcgtggtggcacatgcctgtaatcccagctactcgggaggctgaggcacgagaattgcttgaacccaggaggcggaggttacagtgagctgagattgcaccactgcactccagcctggtggcagagcaaggctatgtctcaaaaaaatacgtgtgtgtgtgtgtgtgtgtgtgtgtgtgtgtgtgtgtataaataaaaacttttagggataatatatattatatatataaaatatatatataacagggataatatatatgtgtatatatatacatatatacatatataatgtaactatatatattgttatggggaggagacattaaggatgggatagagcagaggactataattttcctataagtttatggtattaattaacttttaaaaattatgtacatgtattactttgaaaaggaattaaatttaaatttcaaaaataacttccccaaagccatatagccagtaagtggtgaggcagccatctgaatgtgggcaacctaattccagtgcccatgctttcagccaatatacacctctccttgtgttgataatacacaaaaataatggcccctattcaggatcaggcattggtggtaactgcataaaggtggcatgaacaagtcttccttattctctaagaatatcaggtgccagtcaagagacaggcagacagcaggacaatggttggaaagactggttgctgaaaatgttatcagaggaacttttgagtgagaaacattaaaattttgtatttcgaacagtttaaagggttcaagccaacagtttgttttcagggaaacatttaaaggctcagttggtcaaatatgagcccaagaaataaagtaaataagtaaaaaataaagaggttcaggtgatatgatttgattggctagaagaacacaaaacacttcatggaagggtggagtctacagtgatttctctaaccctgctagtcaaaggagattttagatcctgacatttgacaagtcagataaattcaatactgtctcaatcaagaactgtgcttcccatctctccactattacctactcattcacaatttctgttggtggccaagatgctagctgtggcatggggcttgggaggatggagttgacagctccttttaggcagtaccaaaaaagcttttgttgcaaggtgatccacaaagatcactcccatatcactaacataagcagaatgattaccatttccacctgccatgcacacatcctctgggtgccccacagaggcctgtttccctgaaagttttatgtgatgctgctgggaggtggggaggaaaagggcaaagaaaatgaaattaacatgaggagtggattcaaagactccatctctaagtgttcataagtaaaatcctttaaaagattttcagtatttagagaaaaagaacaatgtcaactttttgaatacatttatgtcaaataataggatttggaatgcctctgcctggtgcctagaaatttaactgtagaaaaacgaagccttcagtttaaatgcttaattgtgcttttttatagccaccataagagttttataaattaacttatttttgtcctttgaagggaatgtttaaaaatatctaggagagagcccatctcaacaggctaacatattggcatggattaagtgacaagcagagagaaaaataaaaagcaactgacaaaaagacacaacacgatactggatagggcaggatttttttcacttaatatatcttagaaatctctgcatgtcaagacacaaaggtctaccatgttcttttaatggctacatggtgttccattttacgtgtgcatcaacttatttaaccaatcccttactgacgaacattcaagtttcttccaacaatctcagttataaacacagtagcaattaaaatccttacacacgtattttttgttcactttcctaattacagctttaggttaaatctacttggagatttacaacactctagggactctctttcaaggaagcaaaaggtaaagttctcccctgctacgattaaaggactgaaacaaattctgactgctgagtctactggttccaccaaactgaacaaygaagaatccctattttggctaataagaaatgctaattattatttctttcagagatggctcctggcttactagggttaagtgtgcaaacataaaaaagatctgtaattatcctttaaaagcacacgtgagttctgtagatttgggctcacaaaggcggagcactgggagactggtgtggatttttgccactcagataaagtatgaagaagcttttttgcccctggactgagctgtagttctttctctgatctatcttggccttttctgaactccccgctactgaactatgcaaataaaaggaagctacaaggacccattggagagagaggaacgaagagaaggcctgttttaaatacaaaaagttctctgtttacaaactttcaataagacaaaactttgtgtgctaccagtcactggtgttagtggtcaactgcacagtgtcattctggacctaagcacagagatgaagaatacttcatatcgatcttaaacaaactgttccggaaaacagaatagataataatgtaaccacagcagtctggttcaacttttatgtaacaaagttgtgagttgtttttcatttgccatggatccacaggttaaaggtcacataacctgagcatgcccagatgaaccaggtatgtaacaacaggcagaacctaagtgcctggattgaggcgagtgaatggaatttagaaatggataccacatggcaggatccaggatccaatcagatcgagctgtggcatcactgcatggcaggatccagtcagatcatgcctctgatatcaattcgttgcaagatccaatcagatcatgcctcattaccctatgcttataaaacctgacccagccctttgctcagagacactgctttgggaactatctccagtgttctccttacttgttacaagtaatacaatccccttgctaaatccttgtctgtggtcattgggttggtacctgtcaagtgaccaaacccactcgtgtgggtaacaacaagaagaagatattttatgagcctggtgtaaccttgtactcaaatcagataaggattttataaaaagggaaattatatgccatttttcacctatgaacatagatataaaaatactaactatagtacttacaaactgaatccaatattaaaaagcatatcatatcaagcacatgagcaaatggagtttatatcataaataaaagggtagtttaatattacaaaatatattaatataacttgtcccattagtagattaaggaacaaaaagcatatgagtgtcttaatagatacagaaagaacatttgatataattcaatattcattacaaaacttaaacatgataaagtgtttctattaatttttttttttctttacagacagggtcgtaccctgttgcccaccctggagtgcaatgatgtgatcatagctcactgcagcttcaaactcctgggctcaagtgatccttttgcctcagcctcctgtgtatctgggactgcaggcatgtgccaccatgcccagctaatttttaatttttttttgtagagatggggtctcactatgttgcccaggctggccttgaactcctgggctcaagtgatcctctcatctcagcctcctgagtagctgagactacaggcctgggactacaggtgtgcaccaccacacccattacagagtgttataccatgttcatggataaaaatgacttacacgtttaaagatgtcagttgttcctgaagtaaatataaattcaatgtatatccagtaaatataaagcagatttttggtttctgtaactaaaattcttatgaaagagtgatgttaaaattcacttaaaaacatgaagggacaagaacagacaaggaaaatttgaagaactctctgggaacagggcttccctactagataccaagacagactaaagttacaatggttaagacaacaggatattagagaagccaatggaatagaagagcacagaacaaacctacgcaatttgattacataaaaattaaatttttaattttttaaattaaaaattaaacaacaacaaaaacaacttccatttaacaagacaggacaaatagtgtctttgggaaaagcctttgtgaacctaccttatttaaaaataaagctgcttctaaactaataacatttaggtcaagctactcaatagtagaaatgattatacagaagtagtatagcttggtggttgaaatacagatgctggcatcagacttactgggtgtgtgtcctggttctgttacctaattgttgtgtgactctgatgagcaagttattctgcttcagtttccctatttgtcaaatggagacaaatactgtggcattgtggggattaaatcaattaacaactgtaaagtgccctggtataatgatgatgtatttgttatcagggttcgagtgtcattaaggattgttactgttatcattgcatcactactgttaccttacgtttacataacactttacaaattttcaaccatttttcatctctgccatctcattctaccatcagagcacctacatggatacagagatagaaggttccagcttacagtaaccatgagcctggtttttcaactataaaatgagaggataatcaccaaggctccttttggctctaaaaactcatttctattttacaagaaagaaatttgaggcaaagagatattaactgacttgccttaggtcatagacaagttactagcagttaggattaaaacctaggtatcccagattaatttgcatttcaaagatataataataataatttccccagactctccctgtatctaaatttcttcttggaattgtaagcagatacttaggaaggtaattcacttggggaccatttagaatattacagatacattccaatgactagaagcacctaactcattactagggagagagggagtggagatatatatcttttgtgaacaacattaacacaggtaatggtaataccagtaataataaaggagaaagaattacctgggcaagcagacctggttggatctgaagaggctgagctcctggggcttgagtgacgatgggaactgcattttccattcgcaccgagtagccagcgtgcttagagggagaggcctgcaagcctgttccagacagtgtgagggagagaagggttagctgagacgctgtgaacagctggatgaaaagaaccttcctgggcagttatgtcaactttctgcttccctttgcactggtcactgacaacaaccaggtattgcctggtccttggaagtctcccctttggcttctaacaaattaaaaaacaaaactcctcctgaaatcttgaatgtcttcaaaggctagaaggtcagattaaggaggctgtaaggccaaaagtaggacagatatgctcgcagattacaacaggaaaacaagggcttctgaccatcaagatgtacctgtgtatgtcaaaatgaggggtgttggggagatgtatgaacccatttggaattgcattgactgtaaccacacagtttacaccatgaggcttgcaaaaataaattcttaagctttctgggtaaattgtaacaaagtacacagtctagcttcttagagtctacaggagaggagtgctggggtcatggccaaagaattgttttgaggaggggtcccagggaagtacttttcagactgatggatattcttcatgggagctgggactatgtcggctgtcagagattggcagttttctacagataacccacacagaggatatttcatgcgaggaaaagcaagagctgacatcagcataacaatgaaagcacaaactatgtacttatttacagacagctggccagggacacagtccctggcaggtgtgagagtcacaaaggattgacttggtgctgaggcataagccctattgtttctaggttggccacagtaggagaggagccctctagttcagtgataccagcgctctcactggaagaaatgaggagggcctttctccatgaaaatgagcgtgacagaaaactgcaggtgccggagccccagaggccgttctgtaagaagcaggtgagaggctgtggctgctcaatcttaccttggaagccggggggacacacgatgagagcttgctggaacgggtcaggccgggcacaaatctgggctgttcctgtctgcaggggcatgctccgctgggccactgcagccatggatgccgctgagggctggtagagtgtagatgggtagtttagtatggagacttcgggattggctaaggaaatagtggcactggtagaggagggagcctaaaggagtgatggggattaaacaaaaataaacaaaaataaaaaatgagggaggtggcatgttgggagacacgaatctaaatcaaataaatgaactcaaagaagaacaaacaaacaaaaactaagagcagaaaggcaaaagcagagaggagtggaaacacgattgaaagtcgcagggaaaagcaggtccctgaaaacatgggagacagtcaccttggtgttcacattcagacttgctcctggcatttgtgaggcccagacaagaggacacacggatgcctgctaccatgtctaaatgctgaaaaggctaaaaattaggctagaaaactgtttaataaaatgttctgccttttcattttgacaaatacaccttcccaataaccgggaagaccaggcgtgagttgaggactatgggattccttgggttctgtgctgacacatggtgacagggagagagctggaccttgccctccttctctctgcccaagccccattccatcccacaacatgatgagctctgggtgcctggacctgccagcctgcacgtccaagctctgctcacactcccctcgggcctggtgggtgcagtccacatgtgggaggacaaatccagggggaggctcttgcaggccctaaaggactatggtctcagtacccagagcttggcacaggagcacatgcaacaggcggagagcagggccgaggaggggctcaggactatgggcagtactgtttacagatgtccttagatggctgcaaagcttagagaagtacaggagatgtatgcagagagggagagggacatgytgagcctggggctttgtgtctgcatcccatgcattcatgttggtatgcagtgacaaagcctggcagatagaaaagatgctggtgtgtccagataactgaaatggaggtggctttgacaaacacaagccattgacattatgtcctcttgcctttctttttcagaaaaagacatcacttgagactgaacttgcatgaaaaatgaggctgtataaggaaaataaattccaactttggaattctccagtttcccctatcttagccttcatactgatcctttagcaagataggtggttaccagtggtttcacattcagcactgtctacaagaggttttgcctctagaagttacaaggaccagggaatacataggaagaaaccacgaagatatcttggacacaaatagaatttcaagtagggtgtgtatggatgtcacatttgataaaaaggacaaagtcttattttacatatgttttctatacttagattttgtgctaaatttcattgcaaagcaaattgatttgtttgaaaataatcacgaaattgagtggcacagatgtctgattttaagccacatattttaaagtgggtgtgcttttgcagcgtcgcatagtctgcttgggacacgtgtgtacatatgtgggcatcagtgtctgtgttttgtcagatgacatgacttgtatttcctgttttctccatatcgcgatctcttccggaggcttcttccccctcaaccctccacattccccatggtctgctcatatctagactccccccagcccttagcccctgtgggtgtccctgctgggggtcctggcacctgtatcctctaggttcccaaacttctgctcggtggttccactttcttgccagccactgctcctgctgctgcttccttcctgatgtccctggaatccactgactcttttcagttgtgacttcctggtgcctgggacctataaggccctgactagaaatgttctggtctctacttcccttccagccttcttgagcacagagggtagatcattctttccacaagacacctttgtgcatgtcagcacccctgctccaaaatcccaattacagcttgatgaacatggtatgcgcctggtctagtgccctgttttccctggtttggccaaccttaccttctagacttatctccctctgctctccactcttctgacaccaagattagtttactcattgttttccaagcatactgtgagcacaggcctttcccttcatacaagctctctgacccatagcattctctccaagcctttgggctttaaggcctagcctgggtcccacatgccccattgtgaaaccctttcagacaccattaatggaaatgaattgctccttcctttgctatcacacagtacaatatagccttctagcccagctcctgttacaatctgccttacagtacagttggtctttccagcctaaagtctcctgggagggaggggctgtgtcttagtggtgttttcctccagcctgcagtggtctctccttcctctcgattctgtaacacataatctgtttgtctacctggcccctagtacatgctattctgcattttgattaaactatttttgcttacagcctgtctcaccatggagaccatgagctccttgagaggctgaatcttccagctctgtagactcaaggacaaatggcacttgtgtcctgatatggacccagtctccagtgtgaccatcagacatgcataaggttttcccctagtttcgaaccctgcttaaggaccagttgaagaagcccatgtgagggcaacaaaaagttttctacttctgtatatcctcctttagctctcagaaaggtagctagcctatcacttgccagagaggagcacacagagaactgggaagagctcttgcagctgacagatagtaataacaagaaaaaacaagttaaaaaaaatcagagactggggtcttgctatgttgcccaggctggacttgaactcctgactcaagtggtcctcccacttcagccttccaaatagctaggattacaggtgtgcaccactgtgcctagtgaaaaagcaagtttattgatgacacaggttttccaaaaatggaagaagtgattcctggaagcagttgtagtagacgttcaaatggttccagaaggaaggggtttgagcttggtctataaactcaaattcaaattcttggtagaaggctaggtccaaataatagaattccacggaaatgttagagaagttgctgatccacatgataaacaaggaatagctgagagaagacttattattcaacatgttaccaactgggtaacytgaaagttttagaaagtagaggaagtcagctgccttgagacttaacgggttatgaattattgacccagcttccttgagacctaaaagattgtagattcatgatcatttgggaaatggttctttggttagtctactggatatatgttaaaggtagcaagagattctttaagtagtttaatgtccttcaacttctaacataaaactatgcatatattgtattgcttctaaatatctaaatgggcaaacagctccaaggagctcatgtagaaagctagctactagaaccagcaatgaacagaagaagtcttgttggatttaaagagcagacatcacctaggaaaggcatttggggacctccataagacttacttaagacttacttatgctgctgtgtatgtatattttaagagtccagactctgaagccagattgctggctgcaaagcctaagcccacctctcatgaacgagcaaggrccttgggtaagagaattaatcactcggtgcctcagtttcctcctctaaaatggaaatgataataataaaacctatctcacaacgttgctgggaggattaagagttatggtacgcttagtaaagcctggcacataataagtgttagctattagtaatgatgttatttaataacaacagtatcagtggagggaaagcatgccttagtgcttaaggctaggtgtgtcctgagtaatttttttttcctgatgtattcaaaagtagggagtagtagaatccartgcaagagaacrgaaatcctgttcttggaccctttgcttttgtgggatgtcattttcccttacccacgactctggcccaagcatcacactaagttaccagctactcctacttcaccccagtcccaagccagatctggatggtctcagtgccgtggagaagacgggtgttcttatttgacaactgccttttgatgagcaacmcttttagttttgcagagtctttgcgacaccctttggagtggatatgctggctgtcatatcaccagcaagatggcggtggccccccaccccgcgtctggtcagggaccacagttctccagcctggcagaaagacatccatgggaaggacagcctgctggggagactccacttgacatgacgcctgcattggaggggtgctccttcctcctgtttcacagatgcctttgatacctgatggggcagatgttagatggggacaggtagtttggggttagggagttaagaccaggtgcctcatgagggctggtgggagaaacaaatgtcttcaaggaggtaatgaacaaaaccatsctgatttttgtcaagaagctcacaggtctggctatggatgctttagccttagggctgggcaaggttagttttcggactcccaacagctctttcaccctaaggagagcttcaagaatgcaaacggcccccagagggcagcagataccaggtggtgtctcctagaatttgggcaaagggagatggcaggctgggaagaaaagctaggcctgagcaggccaatgtgccacaaggatggcctaggggaaaagggtgggaaggggagcggctgaaaagcagggggcagtgactcttcagtgacaggagggacctttcaaaaagaatggacataaggtattcacatttcaggtacacacacatccacacagaagtcttttcattccagattgatattaagaacaaaaatctgggggcccttctttaggggaactaggaggattgaaagatgggagtaggagttacagtttcttagacactagaggcagtctcagctcagacttggagattattcattcaataaatattgcctgggtgtcatccaagtttcaagcagtatgttagctgctccttctgccaatttcctggaaatctgtgggaagaaaaccttagcttcctgatcccatttagttccagctgctgggattctggtgacaggctgatgaactgattttctccatgactcggagaaaggacagggtttatctgtcccaaaaggagatcaggtagatccagccatgtggggacgaggggaagggcctgaactgggtgattccctgagtccttcccagttctagaatctttattttttttagattaaatccatgtttccatgatctttttctttgttttttgagacggggtctcactctgtcccctaggctggagtgcaatgacataatcatagttcactgtagccctgaagtcctgggctcaagcacttctctcacctctgcctcctgagtagctgagactataggcatgcaccaccatacccagctaattttttgtattttctgtagagatggcgtctcactgtgttgcccaggctactcttgaacttcctggctttaagtgatcctcccaccctgaactcccaaagtgctggggttataggcatgagccactgtgcctggccagttctagaattctttaccagkcacatatcaggcataaaaggatcatagcacccccttccccctattcccacatcaggacagaggaaagcagtaaggggaaccatctcagaaagaatggccctcaccagtcctttctgggacctgtcaatggggccagaagtcaacacaaaatgtgcctgggtccctcaaaggaaataaccttggatgcaaatactttgwttagttgttgaayatgacagcaggaattttgcctcctgactaggtatgatggaaaatacaagtyctgaggctcacactgtgcagccccgcctctccttcccttctgtttcccacttacctggttgtggacagtggtcagctggttgttraaggtcatggtcaggttggtggaygtgctgggggccacgtgcgtgatgaaaggggttttgctctggttcaccgtgtcatacatattcacccgacgcttgcagatctccatgttctggaaacatgatttgacgctgttcatgcaaaaggcagaggcatattgagacataaggggaggggaagagggtaacgtgggatgaaggggagaaaacaaaggaaaggagagaagggttaattcagtaaacaggacaagcagggaaactaaactttaggtctaagtttcttggattgcttgtgcaaagcctgtgcatttgcaacaggcacggttattcagatgaattttctccartgccctactaccctttctccatataggttctatatatcacaacaaaactgactgctcacactgcattctcacatcaggtccacctgcagcatcactgctcattctcaactctcagcctggtttctggcccacaaaccaatgtataagctctctgaatgggaacattaactagtcacttataacccgcctccacctttcccaaagacaacccttgtagtcacctgcttcagctaccctgggtcaccagcaccacctaggggacggccaaggaactctccaacccagtatggtgaccctattgccacactttctcccacaggggttgtgcaggtaggtaatggaaacagtaataatactaataattaataatagtggttaacatttattagtgtcctaataataatactctgcaacctctcactcggtccggcaacatccataagacggagacatgattctcgtccctacttcacgagtaaggctgaagcttagggaggtagggagtttgccaaggataggtaatcactggctaccttcgtgtatacacatacgtcctctttcaccaacttcagccttcattttcttgtctaagtcttgtccagctacatgaaatagaaattttctccttttcttcccccattgcatctgtgtatcaaaacaaaaccccaactacaaaagtaaagtataaaagtggtgctgaaaccagcatcagggaaaaggaaagccacaagtggcttcagccacccaaattcttgaaaatcgaccaaaaagtgtccttcagaatttatacagcgcttctcattcatttcttgtagttaaacttacttttcctcaaatgctaatattcaagataataaaatcccttttagtctgggtggggtggctcacgccttaatcccagcactttgggaggtcaaggtgggtggagtccaagagctcaagaccagcttggacaacatagggagatcctattctctacaaaaaaaatataaaaattagctggctgtggtggcacgtgcgcatggtcccagctacttaggaggctgaggtcggagaatcacttgagcctgtgaggtcgaggctacagtgagtcatgattaggcctctatattccagtctgggtgacagggtgagaccctgtctcaggaaaaaaaaaaaaaaaaaaattaaaagaaaaagaaaaaaaactcatttaattttcaactcaaaatgtctattttaattataaaaaatgtaataactgaatgagtaaaataaaagttttctactattttaggattacaaacgtgtactacttcagtactctgtgggtatgctatctttggggctaagcaggtgtctgtgggctattcccaaacatcctgtgaaaaatgcattccaagtttcaaatgactgactgagacgcgacttagagagtcctacttctttctaagattctgaccacttacactggctgcgtcatgcacacgacataaccatttacggactgatgatgctgaagagaaaagaaaacatattctgcggtatccagtaggtaaaaatactcctaataatgctgttaatgccagtgtgttttcagctcctactaagtaccaaggtcttgtgcgtggaggctgcagcataaaaccaatgcattttatattctttttggaatgggcttaaagcatttggtttcgtgacaattcaacacaaaatttccataccccttcagaattttccaactgaaatatttcaagttttgggttttaggaaagggcaagtcctttcactttaggtttataagaagattggttttttaaaaattgtgcactggaatcctggtatggagaaaggagtggggtctgtttcacctagtaatccagtagctgtggctcagctcccagggcaggggcgctacagctgcatgggcctggagatttatccttgccctggagttcttcaaggttttcccagcaagttctagagaactttagggatcaggcctactttcaggcaagcctaggtgtgttcagagacccacctttccttcttaggctaatttctgagttctgacttgtcagtgcccctcttgggtcccagatgaagttctgaattggttgctgatgctcacggtctccatgtgaccaagccgtgaaacactctactgattcttccttacagaacccagaggtggaaggactctgaggtcattaaagccccaggctttatgggggtgactatctgactgttttggtgcagacggctaagaggacctctgtagagggcacccctatcctcagtctcctatccgtagctgtttctcagtcatccmattttacccgtgatatcaaaagactgaaatcatgggagccctatccagtaaattgccaagtctgcttttcttcttcttgtggtacagatggacagctctgtggctgacccctatggcactcagaaacaggacaaatccaggccaggcacggtggctcacgcctgtaatcccagcactttgggaggccgaggcgggcagatcacctgaggtcaggagctcgagaccagcctggccaacatgrggaaaccctgtctctattaaaaatacaaaaattagtcgggtgtggtgcgtgtgcctgyagttccagctactcgggaggctgaggcaggagaatcgcttgaacctgggaggtggaagctgcagtgacgcagtgagcaaagatcgtactgctgcactccaacctgtgcaacagagtgagactctacttcaaaaaaaaaaaaaaaaaaaagaaaaaaaggacaaatcccataacaagagtaggggagggatgggtccagattcctttgtaccggagttcagttgtttcaagcatggttttacattaaagaggcactatctgtttgttgcaatgccatttgacttgcttcactgatagtaaggcacagaaatgaaatggaggccccactatccatggtggtgccacccactcacttcctgtaggccagaaaggggcgggtccagccttgagacccagccccctctgactctggagacagcagggcccgccatgatacgcacaattctcacatctccaggctcttctcacaggattcccttcccctcctgatccttatagaatctgctgctctcttgagcacaccccttttccctgcagacgtaggatgtgattatttattcttttacatcccaagtacctcagggttgagaggctgaagtgagaccctccattaccttcccatccaccaacggcttcctatttttttttttttttgacggagtctcgctctgtcgcccaggctggagtgcagtggcactatctcagctcactgcaacctccgcctcctgggttcaagcgattcttgtgcttcagcctcccaagtagctgggattacagaagtgcggccaccacgcttggctaatttttgtatttttagtagagatggggttttaccatgctggccaggctggtctgagctcctgacctcagctgatccgccctccttggcttcccaaagtgctgggattacaggtgtgagccactgcaaccggccatgacttcgtttcctctccccttcgttcactgaggcctttgccactggctggaccttcctctccaagccattccctgcctcgctaggaaggcttcagaagtcacaggtccctttttaaataccctggcttcccgcttacttctcatgtccagtgactcttgttctcaacccagtacagccactcattccctggaccgtcaaacctgaaattgctccacctccagaaactacaagtttaagcatcctgttttcccagccacattcttcctccatctggctcattccactatgactatgataacccttctctgcattgaccagaacaccacgtttacttggatcccctcccatcttcacttcctttccctttgggcaaagtctccaatagacatcattctggattacagttactctctggctagcctcatcagcttccttgtcaatctgtcttcttctcttaccagcctggcaaaaattccacctggacaaacctagatcagaagactcatctgtcttctctatgccttcacctggggagatgagttacactataaacgattcatgtcgaacctcagggctcaacaattccaccgtatttctctggtcagtttgctctgccaccttctgctccagctacctaaactttctacccttcttaaaccaccctccacctcgttctcaacagataacctcattgcctacttctgagaagcagaagctgtctgacaggactccctcaacttttctccatgagaccagcacatacgctgacatccacatgcccctcgtccatctatccttccaatgacactggcccatccctgtgctctgaaccctgtcttaaaaacaatccccttgacccctccccagtcacccctctatttcttctcttgcatagcctcacttcatgaaaggttgctatttcttcacctctcacttggtctttcaacctggtaaactggtttctgcttttaccactccactgaatggctgccactgcgttactgacaacttgtgagttgttaaaccgaatggacatttttttccagactcatttgacttgtgtggcagcagacagatctttgctcaacacagatctaaccagctattcccttgctgaagaatcatttaatgagttcccattgctttttggatcaagattaaaaaccttaacatgtacggcctgccctggctgactggatgcctcactgtctcacctactgccttctgggatgggtgcatggtcctgcccatgggggagtgtcctgtccatacaggcaatgccctgcctgctcatgcccatcctcttcctcatccttcacaggccacttcctgggagtcttcctggtttgccccaaaatgaggctcccctgtgggtatgctctcatcacacctgatacttgtcctcatagcagcctggtgatttgggcatcacttgttttataccattctctctcttacggactgcaagctccagtgggcagggccgtctgctctgctcaccactgtaccccggcacacagcacgctgaagaaatgaatgaacaaatccaaacccaaactagactgggtccactctgggaaggttctgggagcaatctttggccctgagactagttttgcgctacagagactaccgtttcgggcacctctcttcctgcacagatacccagagtcaggttcatccagctctgtgctctcctcttccctccttttcagtgtgaagccaactgcaggccagggacccagtccagccactgcccactttctttctttttttctttcctttttttttttttgagatggagtctcgctctgtcgcccaggctggagtgcaatggcgcgatctcggctcactgcaacctctgcttcccaggttcaagcaattctcctgcttcagcctcccaaatagctgggattacaggtgcgccccaccacacccagctgatttttgtatttttagtagagacagggtttcaccatattggccaggctggtctcgaactcctgacctcaggtgatccacctgcctgggcctcccaaagtgctaggattacaggcatgagacaccacgcccagccctgcccactttcataaatgtttcattagaatgcagcctcactcatctgtttatgtattgcatctgtggctgctttcagctacagtgacagctgagtagttgttaccaagaccttatggccgcaaaacctaaaatatttagtgtctgggcctttaaagtttgccgatccctggtacgaagcatcaggcaggacacctactgtgtgctgtggggaaaatcgagtaagtgtgtcatggtgacaaagggatggttcagggtttcgattggagtgattctcttgtcagcatcaatggtcagcatcttcttcaacaggtcaatgaactcccgccggtcagccttttctaccaacatgtcgctcccttccaaatctgtcgtcatgttcacctggacgcaagtaaggacaggttaccaaggaagaccccagcgtgcctcccctctcctggctccccttattttttgccctgtaacttcctcctgatctctcaagccccctttctcagttcccaggractctgcccctatgggaggcaccacccacatgttgtcattgcccacaggatgtggcttttctctctgcaggaaaggcagagaggggctgtgccccaggaaggggagagggctgctgctgggacctgcaaatatatctgaatgacaggatgtaaactgctcctgctttcatcagttaagttgaaatgcagctttcatcactcctcattaaaaataaccacaagatgaaaagagttctggagactggttgcataacaatgggagtgttaatactattgaactgtacccttaacaaaggctaagatgataaattttatgctatgtgtgtgtttgccacaatttttaaaaaagagtcacggccaagcagtacaaataagatacaaaaaagtcdatgtatgtatgtatgtatgtatgtatgtatgtatgtatgcatgtatttaacctttagagggaagtggaagggcctgagtgtgcccgtcctccacctacagcatatcatccttctcatgggttccccagttagggccagaattattttagtccctgtgttcaatggagtcacctctggccaagacaggcaggatatctgaacacaggatttttcttccaagggtgagtctatactaggatcgactttaaaaggcttgttttgtggtgatttctgtattttccaggacatggtctggaaaccaatttcagttttctcagacaatctaagctgctaatcaactgacaagcacactttactcagaatcatgatttttggttatagtcatctacagtaagaggggtgctaagtgtttactggtgtatagctttgtttctcattgctttaaagagaaaactcactttgggttgccctggtttcagactaattttcacactaaaaatagctgaagttctagaattttctctggggcacaaaggtgagagcctgcggtccctgccagtgagctgagactgtgtagcagattgaattgtatccctctaaaagatatattaaagtcccagtccccagttggtgtgaatgtgaccttatttggaaatagggtctttgcagatgtaatcaaattgagttaagatgaggtcatactcgattagggtgggcccagtgacaaggcaagggagatgtggacacagaggcacagaggagacacaggacaaaagccatgtgaagaaggaagcagagattagagggatgcagctacaagtcaaagaacgctgaggattgccagagctgccagaagctgggagacagacacggatgctcttcccctatggcctttacagtgaacatgggcctgctgaagcccaacttccaatttctggcctccagaactgtgggggaatgaaagtctgttgtcctaagccatccagttcatggcaccttctaacggctgccccaggaaacatacacactaaattatgggcattaaacccatgggtactaatgggctggaattcttctcatgataacatcaggcagataggccagtactatattacaactgggaaccaatacactggaatgattgtttttttgttttttttgagatggagttttgatcttgttgtccaggctggagtgcagtggtgtgatctcggctcactgcctcctgggttcaagtgattctcctgcctcagcctcccgagtagctgagattacaggtgctcaccatcatgcccagctaatttttgtatttttagtagagacggggtttcgccatgttggccaggctggtcttgaactcctgacctaaggtcatccactcgccttggcctcccaaagtgctaggattacaggcatgagccaccatgcctggccaactggaacgattttaaaggagctggtatgaagttttaaaaatgtttcacacaccaaatggtattcttactaagactggctgtaactatttaaggtcaaggtcaaccactgcagttgaataatgtggatttcaacccattatcttctattactattgcagaagtcttgctgcccttggttttaaagggcttacgttgcatactcacccatgaagcttacctgggccatatcatctaaacagttgaaaatgtactttcttgcttcttttgacttaatccctgtctctgcttcatggtcatctggtgtctgtcaagagaggcaaaagccaattggtagygtgacttagctcctcatcactgggactcaagccttggaactcctgtgtctcacagagggtctctttcccacatttcggaagagattttgattcttcaatgacctgcacacctgcaattcccttctctcttcatccacaccaacccatccctcctccttcctatgcacacgtgtcaggggctggctccgggtcaggtatggagcagtcttgctccataccacaggctgatcraggtatgccacatcctcgatcagcttacagccttctctgagtctaaggaataaggcaagattccattgtggaaaagcaaagggctttcccatgcattttccaattttatttaataaacccttatgcacatagctcttgctacgtgccagacattgttctaaagcacatttattcatttaatagttttgacaaccacattaggtagcacagttactatccccattttccagatggggaaacaggaagagaaagctccaggcacttgccatggtcacatggccaataggtggcagctggccccagagtttgtggctgggctgcccctctattggtggctgagacacagacctacattccccaaatggctggagatactgctgtttccaattactatggatttctgtactcatccatgaggtaatccagaggtaattcgtcttcaaaatctcactcaaggacagcacacctggagcggcttaagtcctgggaacagctggacatgtgggactgaggctcttcaataaaacacaacagcaaactccagcctcaccctcctccaccggaggactctttttactggacctgaccttgacactcaccctcacagttgccaaatgccaggcctcccatcaatagcctgagtgcttgctcagttcccaaatctcttttctcagtcttttgtgactactggatatatattatctttaaaccatattaggatttggctgcagattccattaaaaaaacaaatccaaaacaacaacaaaacaaacaccyacccaccctgctgcaaaaaaagaaatacctaaaatgaaacatatttaagactttattattttctttttaccaggaaaatactttgattttaattgctaggcacagatcaaagtgaaagcaaactatgtttctgttaaagtgaagcccctgcccccggagtttcaggtttatggttacttgtgtgaaccagacacctccctgggccttaggatattcccatgggctcaccaggcagcctcctttgcctggaacccctctccctaacccccatcaccccagccgccaccccacacttctatactgggcaaacccgcttcattcttccttttctttttttgagacacagtctcactctgtcgcccaggctggagtgcagtggcacaatctcagctcactgcaacctccgcctcccaggtgcaagtgattcacgtgcctcagcttcctgagtaggtgggattacaggagcatgccaccacgcccagctaatttttatacttttagtagagacggggtttcaccatgttggccaggctggtctcgaattcatgacctcaagtgatccacccgcctcagcctcccgaagtgctgggattacaggcgtgagccaccacgctccctcttcattctttagggcccagttcaaatgctcctccttgcccctctgctgcaggcagaattaaatgctccttcctcttggcacccacacccattcttgaccaggaacagggcccttactacagtgggcgggagcttgtggcacatggtcctgtctccctctggactgccagctctcaagggcagagtggggttcgtttctctccctagcacaaatcagacagtcatcaaggcttatcggattaaatcctgggagttcagcaatcataaggttggactctcacaggcggcgataggccaagggaaagaggggcttctgagcattcagattcagccayrccatgtattaacaacagcacccccagtgccctcattttgctgactgaatcaaaagctccccactaatgggtctacggccctcttccctaagcgctgggccactgtgaggagtggaggagacgctcttcctaccttcagtctccacaaaggatatggtgagtccgtgtcacggttgaaaaacctagttgtctttgtcccggcgcttaataaatattcagcaggcaaaccctgtgtttgtgaaatataccgaatctgcaagaaaagataagaatgaggtcagggcttttcctgtcactatacatatggtatrctaatggctctgctggctttgagaaaaatgaaaatgacaatttttgtagggaaagaagttaacaaaaaagagaaaaaagaaaaaggraaaagagaaaggaataaagaaaaaatagcaaggttaagggaagcaaggtttgggagacaacgtgacattccacagtcccgcccatttgtcatgtaatcaatgaaatgctaatccaggctattttccagatgaagaatgaggtcttgtgaatatctgtgtcatctggacccacctgatcatactcygaagctcctggatataacggccaacccaggaacaattctgcaataacacagcccagggaccacatgtcaattgcctcacaaaatggtaaaccaaggatgatctcaggggccctgaaaaggaagaatggaagaaaccattagyaagytggaaatgcaggaagctgtttctatatgaayactatctttcaaacctggggtgccattactgactcctcctctgaagggcctgtggctctcaggagaggcgctgtgctacaacaatccttccattctttggcttggtcccctccattagtggagggcccacttggaaggttggctgagatgaaggataagtctgtgtgtttagaacacacctacagagaaccacgtctactgacttcattacyttcacacgccaatcagatgagctaacaaccattttagagatattctgaagttatcttttgtagctgaaagtctgggaaacyaatcttcagagaatgcctggtttttacaaaggagttctgaaacgcaggtcttctattttcttctgtctatctagagatgggaactcactatgttgcctaggctggagtgcagtggctattcacaggcatgatcatagctcgctatagtcttgaacttctgaactcaaacaatccttctgcctcagcctcctgagtagctgggtctataggaatgcacaaccacacctaactcgaggtattctatctycaggaagatgtaaaacaagctgtccccttcccaaaataacgggattaagtccaatatctgtttatgccaattatcctttcttaagaatttacatcacactttcttaaggaaacattgctattttttattagcttctaaaaagctaatcttcttagaagttacctaatattacaattatagaaccccattcatgaatacagagtctggtatcaaccaggattccagcgtaaactccatgaacaacctgttcctgaatgcaggagttctgtcccttcaaggaaatcacctaaaccccaagagaacatttcacagggagttggtaatcaacactaaagagaccacccaggtacatcttcttttctaagaatctgtcatgattaggtaggggtatgttttggacaaaaccaggctcaaagtttgagatatgaacacagcttatgtttttttaaaaaaatatgtctcaaggccaggcacggtggctcatgcctgttatcccagcactttgggaagctgaggcaggtggactgcttgaacccaggagttcaagagcagcctgggcaacatggcaaaaccctgtctctaccaaaaacaaacaaacaaacaaacaaacccaaattagcagggtgcggtggtgtgtgcctatagtcccagctacctgggaggctgaggcgggaggattgcttggacccgggaggtggaggttgcagtgagctgagattgcaccactctactccagcctggacgacagaaatagaccctgtctcaaaaaaaaaaaaaaaaaaaaaaaagaaagaaagtagctcaaggcattctgctgataatgaaatgcattagcctgatttttgttttctctataaattttccacttcactaagagatggtagaagaggctactttcctaccctttctgcagcctggagtgggagtgaagggagctggggagacctttctcttggttacctttcacacacctagcatgagagtggggaggaagagggcgatcagaaacacccccactggtcttggatcttctagctgaatttttctctactgaaaaagtacctcctcttccccctttaaatttgttctcattgctaatcttttttctttatataatagtattgaaaagaagaaaacaaacaaaacccaaaaatgtcttattaccaagttctgatttttcacaagtaaaatggagtttggccaggtgtggtggctcatgcctggaatcccagcactttgggagggtgagatgggaggatcacttgagcccaggagtttcagaccagcctgggcaacagagtgagaccctgtttcttaaaaaaaaaaaaaggggttaggcgcagtggttcaggcctgtaatcccagcactttgggaagccaaggtgggaggatcacttgaggtcaggagtccaagaccagcctggtcaacatggtgaaaccctgtctctactaaaaatacaaaaattagccaggcgtggtggcgcaggtctgtaatcccagctattcaggaggctgaggcatgagaatcgcttgaacccaggaggcagaggctgcagtgagccgggatcgtgccattgtactccagcctgggtgacagagtaagagtccgtcgcaaaaagaaaaaaaaaaaaagccaggcatggaggtgcgcacctgtggtcccagctactcaggaggctgaagtgggaggactgcttgagcccaggagtttgagggtgccatgagccatgatttgcaccattgcactccagcctggtaacagagcaagaccctgtctcaaaaaaaaaaaaaaattttagtttattcctttcctcacaactagagactgggtactggctactacgtgcttctagagtaccagtcacacttgccggtctgggcagcagaaggagtgaccgctgggggctggagtgagttgccttgttgctatttaatgaamcttccgttgtccccatcgcctgctgctgggcgtcttcagctgccagtgttctgcttggcacttcaccccctttggcctttgtctcctttggtccccacattggactgcgcatgtattgtcaggggccactcttactcactggcactgatgagctggggatgcctgtggtggctccaagacatgtccctgctgcacccttgtcttccatgtgaccacgagcccaccacctgcctaggccacctgtgtcagtgttggccacataccagggcccccaggttcactcatcattgtgtgtaactgataagattactgccaggttgcctctagcagtgcctttagagatcgtttcagtttatttaaaacatcacatcccttagaaaaaagaagggactatctgtttcaggtttttttttttttttttttttgagacagagtcttgctctgttgcccagcctggagtgcagtggcatgatcttggctcactgcaacctccacctcctgggttcaagcgattctcgtgcctcagccttccaggtagctgggattacaggcacctaccaccaggtctggctaatttttgtatttttagcagaggcgggttttcaccatgttggccaggctggtctcaagctcctgatctcaagtgatccacctgcctcagcctcccaaagtgctgggattacaggcaggagccaccatacctggccagaaaagaagggaatatctgaaaagaacactaccaaaaaaagtattatggtgtcagaacctgcttttctctctgccctccctgttctagagtcaggggtggcctcctgcctcctctcacgtggatctaggcctcttcatgggaggagagttttggcctggactgctggctcaaggatcaagcacattctcacctctgtcccccgattcttgtcacctggcctcttggctggcccctgccctcttgcagcctgacgtttggaagtctgacgctccagtctgtaggtttggatgtttgacactcaagtaagtcttaggaaggccggtctggccccaggggacttctctgaacttgactatgggcctgcccttcctatcaggttagttacgtggttctcatggcccggaaggctgttcctaacccacggaaacctcgttttccagtttccattccccagtgatgaacaaggcagactgcaacaactaaaatggccacacaaaggcactttagtgatgttctttagcaggaaacaccagacatagattttgacgactgacgtgacatgaacggggcctgggaaaattgcttgtagtccaccaagaaaatgaaatggcagccattcacggtaccatgatacgtgccgcagaatgttcctgctgcgaccgtaaagaacaaatgcccaggcatctggctaggtggctgggagacagtactgtctgcgaaggcctctgatgctgcgaaagccacatcaaagcacacaggacaactcgagtcgaatacaaaacgtgtgtcacagaaagacacagacataaaaatcgagccgacacagcacaccacatgctctagcggctcccacgttagaaaacaaagcagaacacaagaacaaaacagaacacaaaaaacaaaacaaaagccccaaacacaaacctttcctaatcccttcgtctcccagcagctgctgccctagttctcagctccccttcaaggcccactctctggagagagtcatctccccctgtggttcccacctcttcacctcacagcatttgctcagcttcctctaattggagttggacactctgcgtcactgacgcgctgcacttgttgagatcagcagtgatctccacgctgtcacatctgttgatcaacttcttagctctgtgacctgggagccacatttttttcacgcgggtgatcattccttcctgccctgaaacacttattcttggttttcatgacatcgcttgctccccatatctgtcccgcctctctgcttgtggcttgcccatttcctttgtaggctcgccctcttctatccaactgctgtgtgttggccaagtcctaagcccaccgtcttctctccttccacccagccctagataattgttatgggttgaattgtgtccccctaaaagttatgttgaactcctaattcctggcaccttggcatgtgactttatttaggaatggagttgctgcagatataattagctaagatgaggtcacactggagtaggtgggccctaatccaatgtgacttgcatccatatcagagggaaatctggacatagatactgacacagcagcaagatggtcatgtgaaaagggaggaagagattggagtgatgctgccacaagccaaggaacacctggagccacccgaggcaggaagagacaaggaaggctctacccctggagccttcagagggagcatggccctgttgacaccttgattttggatgtcttttgttttaagccagatattttgtggtacctatttcagcagccctaggaaactgacagtcatcttactcgctccataggtttaaattccatttgtattcccaggtttgtctccatcttggaattctccttctggctctagatttgcattctggaagcctggtattgcctctggaatgtctcatagtcatctccaattccacacgtctagaagggaactattctctgatccccctctctaaacatattccttccactgtcctcctcattttatgaaagggaaccaccaccctccagctgcttaggcagaaatccaggaaagatgtttgatttcttcatccccaccatctatccactaacatggccagctccaaagtctcaagtcagcccctgattctccatcccccctgccgcagcagtggcgctggtcacccctgcgtcacctggagcttccactgcagcctttccacttgtctctcccttccttgtgcccacttcctccatggcagccacagggaacagatggcaccccacccccttgccgtaagccttcaggggctccccactggacttggaatgaaatctagacccctccatggccatggggcctccacgattgggaccctgcccacctctccaccatcactgccaaccactctcctagcttaatacgttgcaggcccgttggtttcctttccatttgcaagagtacctggagctcctttggagccagagtcttcgtgggatgctgttgcttctgccttaaatgctctccctgctggctgtcacatggctgcctccttctcatccctcaaatcttagctcagctgtcacgctacagacaggcctcccttgacaccagttagtcttcatatagggtgccataaatgccacttcacagcactttcttaacctgctcactgtctgtcttccctgaccaagtctatgagggcagcgcaggcattcggtagccactcattaagcatttgttgatcaaataaacctttattaaatataagaaagtgttaaaatatggattaagacaaagctctaaggcagtgcagataaaagagagtagaagggctgaatcattatgcagcaatcaaggtttgggcatgagggggcaggatttagcccaaggaggagcagaagctgaggctcagagaggggcacgagcaacccggctcacactcaccacagcagggcagacagcaggagtgccaaggacacctacttgcaggtggccaacaaaagaattacagcaaaaatgacagggaggaggaacaggagggctagaagtggcacctggctcatgcagggttaggacttgggacctcagggatttagcccaaacctcttattttatggccattgtcattacgccctctagagcctccaccttagctcttatgttgaagactttatcctgcgcagtcccactgcagcatgcgaaatcacatgctcttccatctgggcctcactacagccacctgctgctctcttgcctttggttttaaccttttccaatccactctggatccctctcccacccctaagggtgcagccttttctctgcactcatgagacatgtttcagatacagcctgcycccctccctgcccgcttccattcttccttattcaaacagacactgcycactgtctctgtgctggctctaccaggtgacaagcatacaaagatcaatgacatactcagaccagattggtccaataaatactaactgagcacccactggccccacagaaccatcttaaagaatttcctcatcgctattttgggacatcagaaatactttaaacatatatatgaagtgtcagacaaaatctgcacctaagaaagaggactcattcctttccaacattcccaaagcaagccactaaacattcttgttctggagaaagagagtaaataattgtctttttttttttttttttttgagacagagtctcactctgttgcccaggctggagtgcagtggcgcgatcttggctcactgccagctccacctcccgggttcacgccattctcctgcctcagcctcctgagtagttgggactacaggcgcccaccaccatgcccggctaatttttcgtatttttagtaaagacgcggtttcaccatgttagctaggatggtctcgatctcctgacctcgtgatccgcccgcctcggcctcccaaagtgctggattacaggcgtgagccaccacgcccagccaataattgtcatttttgacacacaaatacgtttgcatatctgcctctactatacctcctggagggcagggtctgcatctcacttgtccttgatcctcagcctggcacacagaagctgcttcgtaaacagctgctcaacacccagcccataaaccctcaggtaagggaggtagttccccatttggcccccaggaatctttggggacttcagaccattttgctgggatctgatcttgcagaggccttgtccccctgctctgctagtctataaggctctgaggtcctagaagttcaaagtcaagtctaaaatgtttcttttcatccagcccacctgaagcatgttggatggttgctaaagcatgcttaatcttcagggaagctcattctgacagtcattctgagccagaatttgtttcaagctgtcctcactcacttattagaatattcaaccaccatttactaagtgtttcctctgtgccaggtactgtgctgggtgctaaagatcaaaaagtaaaccagaccctgcagctcttccaggagttcaccgtctagccaaggtagcagcatagcgacatctgacatacaatgtgtgaagtgtgtacatagtacacaaagatgggggaaattggaggaggagagagaaagcaggatgggcttcccaggaggagtctgagctgagccttagtaagtggccaggcaggggtggctaccacacacagagcagcgcaagtcccccaacccccatgtcactgctgtatctccagcgcctagcacgcagcctgggcatgtaggtgctccatacacatttgtagaaggaatgagtctatgtcaagtgcacaccctcagcagttgccagttttccctggagctggcaatgccaccttgtcagtacctcctatgtgagaggcagacagcttggcctttctgtttcagagtttacatggttttttgggttgatcatcacatgtcggttgcttccacaggggctgttcctgttctcggttcggtttcaggcaggtagggctgctggttcctgaatactgtgagtgagcatttccaggttctgtcataactgatctctcatttgctcttcctcaccttcactgctacagctccaccccatggaaccatcttaaagaatcgcctcattactattttgggacatcaaaaatactttaaacacacatgaagtgtcagacaaaatctgcacctaagaaagagggggataatttctttccaacattctcataggaagacactgaaaattctatctttctaaagaaagaggaaaaacaactgtcattttggacaccatcaatatggaagctttgatgatttagctccactcgctctcttgactgcacacactgagaagcattcccagatcatgtccagatcatatgaccctgcaggggaatggcctccagtggaggtgtagaggctgcagaagtcaagagggcgtggcccgcacttgggatcccagtgttcaccgggttgaatcccagccctgtcaggtactggttgtgtacctacttctgggtacaggtatgaagactaggttaaacagagcatcataggggggcaccttgcagaggcctggcatagagtagtcagctgaacaatactaaaccacttatctataacacgtctaagtccatgtgaaagcaatgaaataaacagatcatccctcttccttattttttttttctttttgagacagggtctcgctctgttgtccaggctggagtgcagtggcacaatcttggttgaccgcaccttccacctcctgggctcaagcaaccctccctcctcagcctcctgagtagctgggaccacaggcacatagaaacagggtttcaccatgttgcccaggctcttcttgagctcttgagctcaagcaatccttccgcttcagcctcccaaagtgttgggattatgggtatgagccactgcacccagcttcctcattttttaaagccactttctttctgatatggaacactctgttgaaatacattaaagcatatacactaaacaactgtttcatttatttacacaaaaagctgaaaagattaatataaccaacagtgaagtacctaccacctagctttagaaataaaaactccctggccgggtgcagtggctcacgcctgtaatcccagtactttgggaggccgaggtaggtggatcacctgaggtcaggagttcgagaccagcctggtcaacatggcaaaaccccgtctctactaaaaatacaaaaattagccggacatggtggcacgcacctgtaatcccagctacttgggaggctgaggcaggagaatcacttgaacctggaaggtggaggttgcagtgagctgagattgcgccactacactccagcctgggtgacagagcaagcaagactcagtctcaaaaaaaaaaaaaaaaaggaataaaactccctatccacaatcctcttgcttcttccttgtgtggagaaatactaccgtaacctagtgttccttttatttcatctcacatgaatgctgggtacatgcagtacactaggcaatgaagactgaaaagacagccatgcgcttgggctgcttggagtcctaacagtgtgccaggctagaggtcagagtgatgcccagggagcacagcccggggaacaggtttgggagggtggtcccgtgggtctgaggaccccggtgggcagagtcaacctgtattactgtgtctgcttatggcatcggcggcaacaagggctgggacgcagggttcagggtatagtcccttgctcaccccaaacactttggtcaagtctgagaccagagtcaatgtcttgctcatttacayagttcactgayaaaacaagggcagggttcactgccactccgaacttgggtaataaatctgcagcgctaatcggagcgcacaggcggagctgtgcatttctggaaaaatgttactcaatttctctgagtttttatttcaccatctataaaatgtgattattaatctcactttttctcttgtctctacggcagcttatgaagataaattayggttggcagaattataaaacagtttaaactccttggaagcaagacactctattagtccatggtattttataatcactggtattataaggtgtactcgaactgcagagaaaaagtccgttcccacaaatatatgtagattgaaagtaacctcagtatggctggggcagaagcaatcaaaatgtaaaactgtatttcagatgggttgttaaatcttatgtttccactgcaaaaataaggagacttgcattgctgtcttgagctctgagccgctgtttgagctggtgaccgggagtgggaggcgagggattacagtgaagcagcacaggacccaagaaacagtggcagaaatctgaagagcagggaggaggaggaggctatttcagaggaattggagccagaggtaagagagagctgcacagaagacagccagaaaggcaagggctggaaagcacctcggggcagctgcatggagagacaacacgccctgtgaccacaggcaagcctgctgggaaaacaggggcagcctccccacaggatgaatccacaccatgcctagggggatccagaaggtccaagtggagatgtagatggccattgaggtgagctaatcccaggtcaacctgtgattggattcttaaaaagacacacagcttcctaggcaaacaggagatcaaagagaaatagttttgtctttgattagggtgataggcagacaagcaaaaggaaaaagggacccagagatgaagctctaggagcaaaacatgggggaggttgacaaggggcccacccattgcgctggcttccacggagccatccttggaatggccaagccaaacaccgtggaccccaagatctctgtgcactctgcagcagggtacttttgcctggttataagctgaagaaattaaggtggagagctgctgcaaggsaacagggttccaactccaaaaggagagctggggggacagacacgacacccaaacttctgggtggttgcagcttgatgtaatacacgtagaaccactgttgcagagattttctacctaaggggccgctactgatgtccataaaactgtgtgctaaggaggatcatttcagaccctcactgatgattctgtcataactgagtatcttcagctatcaccaatacaagtgctgaagacttcagaatgaaccatcatatccatatggaggttgatataattgcagttgggtctagatgttgacatcattctcatggcacacttggacagtctcttaaaggatgcaggcttccttgattcaactggccattccctgtataatgttagaatcagattggcggttttttctattcatattggcagwgaacatcttggctctgaatatgtactaaatacacacacacacacacacacacacacacattttcacactgatccttcgttcttagtcctgctccaactctgctaagcgtagcaccaaaatctaactcacttgtttacatgccagaggagaaggttgcatctgcaactgaaatgaatataatctccaaaggcttctggtgatgttggtgcaaactggaaaccagttctcagatgtccagagcatactggcctctaaatttgtggttatgtgcttgtgcatgtagaataaagtgaagaaagtacagccagggacatggatccacctaaacgatattgacttgacttggtgaaataagaaaagcaagaagggaaggaaagaagaaaaaaagaaaactatgaattgtaatgtcaatgaggaaggttcctagaagaaccagtttggactccatgataagtatttcaaagatactcacgctgccctgtaattcctgagatccttatactcctgacacgtgctgtgcctgctttacccatccctggcctgggtggcccaatatcccccaatctggtctctggtgctataccatgaagctctgcgttgctggagaaagcctgttctgacctcccagcactctaccagactacagtgtcaccaggccacgctttatgcttggtgacttttgtcaaagaatgtgctcaacaaatgtttgcagaagcacctatcagccagagaaatggaaccatgtgtctctgcaggtgcctatctatgtaatcttttcatatgtatactgctccaggctctttttaaatgtttttatctttttttttaattatgaaagagaatatatatacaaagaagtatacaacaaaaacgtataccttaacaacttattggaaaacaaagaccagtgtcactaccagccaggtgaagaaacagagcactgtcaacatcacaaaagccctgtggtatttcctcccatccgctgtccctcctcctcaaaggggctctgaagtcaccatgtgtgggaggtgacatgcagcctgcacactcaagcctgggtatgggtgcacatcggtgtggcagcccccatgcctcgctgtgctctgccactgtgctcagatgaggctcctgcccaggtgagcgcaaaggccagaggctgggaatcccaacacagtggctgagaaaggagccaggcctcagccattcttttatgatggtcctcatcatggatccttttgttgactgtttttcttccgattcattgttagtctgttgactgaagccgagggttgaaactgggcatttagagctgtgttgggaagcctgctgattctgggaaggcctaacccaagtcccactgtcacctgctgtcacttttcagctttctgggaccactcttcttttctctgcactggcaagggatttggaatttcaattcctgtggatcaactgcagatgtggygtcttcactttattcagcctggtgatgttacccacttatagtgatcatgagatgtgaggctggggaaaaggctggtctcttccacactaacacattaattcaaggttcaccctctactctagatggatgcatactaagaaagtaacatcacttatgtgcaactttactgatttaaatgcaaaacttctcattgcttcaacatttagcttcgactggttcatggtgaggcctcaataagtgtttgctggatgaatgaatgaaccaacaacaggcagaagaaacacgatgctttcctttccaaggttcccagtgcctccactggagaagccccgaatccccaactctcagatgagtgactgtgccatagacaaggctcatctttggggtattttctttccttacagcaccatctgatcatgtggcttgtggagctaagtcacagtcagtctttatggctgacagtctgggataaaagacagaaacttgctccttctttgaaagggagatacattcagtgtcaccagccggagacataccaattaagagaacagaagccagaaacttgagctatgaaaaggaacccactcagtaaaaatgtcaaacacaagttagagagtgaatttccattgcagcctaagggatattccaataaaacaggtatcgtctgaggaggtctcccccactgcactgtgtgttaggtggaaaactactgagaaagcagggccgaaacccactaataccctacctaagcaactttccaaataaagccactactcctggccgatggagtaggctctgatcctgtaagtacaggatgcggcctgactctaagcaggcaggtgtgagtgcggtgaggggagccaggtggatgaggctggccttgctctctggagacgtgcacgccatcaaaccagcaaaacaggactcactgagggtatgttttttacccaattttagagcagggagcatccacagagtaaatgtggccatggcccgtctgctcacagcactcctggttaggacctgctgtggtccggacaagagcgagctctcacggtgactggttggttattccagcaggagttaggaacaagaagatcttgccaaacaaaatgggcataaactccaggtctccagccaagggcagcttactcaggggaaaccttccaacactcaacttttcttaaaggagctgaaaaagaacaaaccaaaccaaaccaaaccaaagtttgccttcttgtgtttgggtcacagaggaaatactaagctggctctttacacctcccactagggggcgctgaagtgcaacagacacaggctcggaaagccacctgaaccttcaacttccatggagacagagggacgcgacccactgggtaagggaacaaacggttcccttaaggctggtgcggtggctcacccatgcactgccagcactttgggaagccaaggcgggaggatcacttgaggccaggagttcaagagtagcctgggcaacatagtaagactccgtccctacaaaaaattttttaaaaaattagccaggagtggttgtacacacctgtagtcccagctactcaggaggctgaggtaagaggatggcataagcctgggaagtcgaggctgcagtgagctgtgatcacgccactgcactccagcctgggtgacagagtaagaccttgtcttaaaaaaaaaaaaaaaaaaaaggaaagaaagaaaagaaagttttcagatgaggataccactgctccatcttctcawtaaccagttttcttatcctaacaatggggcctctttgtagtccaagaacagggactctcctacagtgcctttggaacrgagcaacattcagcaaaagagatgagaatgctcattttgttctcgtgagccccaaacactactccagccaactgagctaaccagcttatggaatcagggagctgtcacacatcagctggggctttgggtggagaagggaagaaaggaaggcaggaggaagggagggagggactcttgagggaagtcagagaagaaagagtgaggggcggtgaggcagcacctgagactcttggtggtcccagactctccctgagcacacccaggcttcccctccgcacctctgtcagtggccctgtggaaagcatgtctggcctggctctcatggaaagcctttgaagctttctactcaaaccttacctgctctagcactccctgctgactgaggctccctcctgtgctctattcctacaacgctaactatgtctctactgccaattcagctctttcactcrtccttgcactgatagtttttttttttttttttaaataagaatcatctataatcagctcctagactggaagcatcccgaggccatggcctgtgcatgactgatctctgtacacctcacagcacccagcgtacagccttgtctactggggtragagggtcggtgtctgcagacattgggtgtcattgttcacactcatgagctggaagaagctgtggtttcattatcttctttcctaccgccaagcactgtgctaagaacagtaaatacccaatacacagatgtttgctgaactgagtagctgattgtgtgaagaagaagtgaaaactgggatttcttactgtttatttacttttaaggaaataagtggctcttttagttcttctctgataataaggatttcaatggtgaaatgtgaatagaaacctataaagctccactttttaataggagaagcttgacatagggagtttgtawctatctatcatctatctatatctatctatctagatatctatatatatgctgaggaatagtgggtgaaaagcaggtgataaaggagatactatttacctacctgaagaagaagagagaataagtggagatagggaggaggcagctagggagattttgaaaattcaattaaaaaaaacccataagcaattaaacccataaaaaaacctgtgagatgtttgaaagaatgacagtgatcattggtatgaacagcttagtttcttttttgccaaggaagaaaagttttgtggcatcactggaaatcagcgagggcctgcctggcaggcctgtctctgtagtgtcagctgtgtaagtaggtctttgtatggttgtatttaggcttgtcctggattcccccaagagatcaaaagttccttgaggagacagaacctatatttgcttcccagggaagtgctcagctgccacacagctcagggtggtgatgcacacagcaggagttcaatcaacattaacccgctaaatggagctaaccaaattccacccccagtctgaaaggctctgacacagaactgtctagttccttttcatttggcctcaaaaggggtacatttttcaaaaaacaaaacaaccccacataccccaaagtttcaacctgagattcaattttgaattgaaggctaagtgaacaattctgcctaactctttagtaagtcttgcttgtgtgaaaatcaaacagaaatcttccctcttccctcttctgggtttccctgactatatagaggttgatagacttcagatgatcacagaacccaaagttacaggccatcactagggagtcacagttcagaccaggaaatcactagcggcagagagaagcgtggagggaaacgacgttgcggctttcgggttacacagtggaaaggctgatgaagggaatacggcacacagtccccagccttgttactttatccccccgggatagcatcaatagcttacatgggagtgagcatcattcckgcttgcaccttcacgtccggttaaaacgattctattctgcaagccagagcttaggttccatcacttcctaccgagcaacgccccccacccttctcatcagccccgtctgcatcattacggaggacggaggacggctcttgggattgtcttgcttggcagtggagggcggagcagaaggagggagagggtgctgcgggttttttttttcctttccccgtatgtattgtgttcagtgtggacaaatatttgtgtagtctgtatttaccattaatactaggataaagtcattagtgattcgatttttctatggaaagaagcaaggcattgggcgggtggagggggaagcaaaaccccaaacggaagaacagaaactctaaaagctggcgtctgaaggtattattcaaaaacaatatgggaaaaggcagcaccatatttcctctgttcttctaaggggaagttcagaaaaaggtcagaaagagaacaatgcaggccatctatcatagcagcctctaacctagaggtgacttgcccgctgcagcctcatttctcagttctgtaattaccacccctcccacagactggacaccacagcggcctatgaattatgcatttcatttccacctccccacacccygactcggtgaccactgctgcggcgggtggctgcggggggcgggccgatgcagcaccccttcccccaggtacacgcgcaaatgttacagggccccagagccccggtgcacacccgcagatgctgcttgtgctgaccttcagttcccagcctaagattttgtttattgagcaaataagactagttaccagtagggattttcctaggggaaaacacactggggcaccttttcttccccttcacgtttttattcaggcaaaatctggttaaaatgaatattaagggtggtcttgaaggaggcagaggtgatgtagagcctgagggtatgtgtgtgtgtgtgtgtctcctgctgttagaattcgggggggtggtttggaaagtgggtcccagaaatggatactgctgcaggaacaggagcaaccctgctcctccctgtctgtgcctctgattaactggtgcccctctcctaccaattcagagggtcccagaaaacttctggggccacctgtcttcacaggtgctactggtataccaaagcagggactactctttgttcagagtgattttcctttcaaatctttacaaaacgttaggtttagtagagaagttggttaggtttagttgctcgagcaactgagagacctaggaatacccctggaagcagacaggggtaagcagcaagcgaaagggttcccttgaaaagcaagggttcttctgtttggtacacctcagtctatcgcttgaagaggtggtatgggtaggattttaaaaaatatttttaaaaagtgactttagatacattcagggaagacagttctaagatgggatataaaaataggatatttaggccaggcatggtggctcacgcctgtaatcctagcactttgggatgccaaggcaggcagatcacctgaggtcaggagatcaagaccagcctggccaacatggtgaaactccatctctactaaaaatacaaaaattagctgggtgtggtagcatgaacctgtaatctcagctacttaggaagctgaggcaagagaatcgcttgaacccaggaggcagaggttgcagtgagccaagattgtgccactgcactccagcctgggcgacagagcaagactccatctcaaaaaaaaaaaaaaaaaaaggatatttaatttctgaggctgatctggggaacacaatagtaagtgggctgaatattaggtgcaaatcactatgacatatattttattcccttcgggttttttttttttttaaactattctcagggttggaccatttgttcataagggaccgactgagggttgtgatcacagctgtgacagccagcccttaagatggcccctgaggacccagttctcctggaagtcaacaccctggtgtggtctcctctcacactgagcagggcaaacctgtgtaaccaataagacagcgcagaaatgacaatgtgtggcttctgagactaggctgtaaaaggcatgtggcttctgcttttgctctgccttgaatcacttactctggaagaggaccctcaatggccctgtggagagatccacgtggatggaacccaggcctctggccaacagccagctctggcttgccagccacaagggtgacccacctgggaagaacaccctccagccccagtcacgcccttgggtgactgcagcctgggctaagagctcaccgccacctcatgacagaactggagtgggaatcgtcctgtcatgttgctcccaaattcctggagcacagcaacggtgagataatgtttattgtgtcagccacggaattttgaggtacttcgttatgcagtgacagatactgattgggcgtctctaagaggggagggagcacgcagagaagctctggatttgtgtttccaacaagccttaggtcagcaccccctgatacccaacacatcactaggtcctccatccagcccctgccytgccctgatgggaaccaatgaagcactttctaaaaaggtaggaggcacaaggaaaacacagcctgaggaggacttccaagcacccaaatgcaggcaagactgaacggatggcatgaagtttgcaagctgctattccacaggatgaacccggcacagagacagacactctttggcctgcatagatattaaattttttcaactagctattaacatttagaactcaggtgatattcctaaaagtttggatttcctgctgaaaatcaaaagctctggcaactctgggccacttgtcagttcgtggtcacaatgacctggggctggataaggctgccctctgcacgtgtgtgtcaccagatgcagaccttagtcattaccagctcactgaccacctrcctggccctggaggcacttgagttcgtgactcctaggagagaggcgagctggagggggacaaatgaaacacttacatgaaatcactgcttttagctctatagcgggggcactgtggagaggtacacaatttgttttcttttattaaacaaacaaacaaacaaaaaaggtttagcaaacagctgccccagaagggacttcttagaacttacaaggaatgtaaaatgattattccactttacattacacagtgtgaactttaakaggagagatccgatgttatgtttctgcaatgtttgtttatggaggtcttcgttatataagacctccgtggagaggaactgcaatgctggagtctcactttgctgatctggctttctactctaacaattatttacaataacattagagaggaaggctctggcgccataactcagtgaatatctgccggattcttccctcctacaagatacaataatataccctttattggccttctcccaattctccatttgaaacaggattataatcagttttcagagtggcttactcaggaattaactagccaagcactggatcactgcttcttgaacaattctgtagtcctttgcacatttttggaaaaggaatgtgatgtcaacagcctcatgttcttgagaatatccttcctaggtgggcaagtgctgggctgggggagaatggggccttgtgtttgcataagacgctgctcacgagtggctttgtataagacagcaggaggaaggcattctgtctgcctcccccttcccctgagctcggggacatgattggattattgagtgattatgtagtaagttcaatcactgatatttattgagctcccagcatgttcaagactctgctagagggtgataccaagtcatggttgctgttctcaagaagcttatcatctcgtgtacacgtatggaaaaaggaatacagacagaaatcatgaatgtcagatgccagctacgtttagagggagcaatctctctcattcaataaacatgtattgagcatccattatgtgctgggcactaattagagagtgaacaaaaaaagacagtctctgttctcatggaacttgaactctagtagacctcagcggactccactccaggctgggaagaacaggagagaattcaaggaggcagaatttaaatagaatcgttaggtaccaccgacttcagagttgagagaagggagagggcactgcaggtaagaaaacatcattaacgaaggtacagaggcaggaaaacacaaagaagactgttcagggccggcacggtggctcacgcctgtaatcccagcactttgggaggccggggtgggtggatcatttgaggtcaggagtttgagacctggccaacatggtaaaaccccacctctactaaaaatacaaaaattagatgggtgtggtggtgggggcctgtaatcccagctactcaggaggctgaggcacaagaatggcttgcacctgggaggctgaggttgcagtgagccgagatcacgccactgcactccagcctgggtgacagagcaagactctgtctcaaaaaaaaaaaaaaaaaaaaactgttcaggagaacaaggaagtgacacaagggctagggcagtaggagcaaggggcaagtgataccagagcagaaacagcgtcactgtcatcctcgatgctaactctggacctcctatgccatggtgctgaggcaggacaacagctgctctttgatttcttcagagagcaactacagacaaagagacatttgtctgtaaacatgagtaactggaaaatgcagtgcygaggactatcaactgttacagaatgggtggtgggatttagagatcttatgggacaaatcacacctcccacaccgccatctcgtatggtaaaactctgacccatggacctcgggaaggaggcctctgcctcctgttasagacatgccattgagaggcacaggtgataagtgagcaaagraaatcagcttccactgcctcaagaagcacagcctgggattacctgacctggtgtgatgaaaatcgccaagttttatgttgcattagtgaagattttccacttgtacaatgtttttttctttccaaaggtggggggaacaaaacatgctcctctggcctcctcgagactgttgttgttttttttttgagatggagtctcgctctgtcgcccaggctggagtgcagtggcatgatctcggctcactgcaacctccacctcccaggttcaagcgattctcctgcctcagcctcctgagtagctggggttaaaggtgcctgccaccacgcccggctaatttttgtatttttagtagagacgaggtttcaccatctttgccaggctggtctcaaactcctgacctcaagtgatctgcctgcctcggcctcccaaagtgctaggattataggcgtgagccactgtgcccagccaaaactgtttctttactacagagacaggtttgtgtatgtgcagcccagcttattgaatgataaagcagcaaaacagagcctcaatgacacaggggctgccaggcccctgttcctataggtttaacagcatgagatacacataaaagctgctgctatacaagtgaggctcttaaacatcattaaaaacacatatttgaggttaggcacagtggctcatgcctgtaatcccagcattttgggaagctgaggcaaaaggatcgcttgggcccaggaatttgagaccagcctgggcaacacagcgagactttgtctacaaaaaaaaatcaaaacattagccaggtgtggtggtgcacacctatagtcgcagctactctggagggtgaggcaggagtactgcttgagtctgagaggttcaagccaaagtgagtcatgatcacgccactgcactccaccctggacgacagagcaaggccctatctcaaaaacaaacaaacaaaaaacccccaaaaaaccccaaagcaaaaaacacatctttggaactgtttaatgcatttagggagcatggagtccttatggtggtctgttatgggcttgaggcttcaccaagcccctgtgaaaactctgagtgctgtctccatggcggggttgcagtcagtagcaagataacaaaactcagatgggaaggacaaagtgcaacatggacgctcacgagtccagccaaattctgagtgcttaagaagaggcctgttcattacgatattcctggtaatatcaactctcaaactactccttggatcacctacccaatatttatttttgggaacagtttaaatcaagagaaaagctattaataagttaaataaaagctgttgaagggattcctgcgagtgggaggttgaatagggtgatttctaaagcccttgccaacacacaatctaggattctatcactgccttcctcccgatcccatgcaattacatattcacaggcgacaaagagcaatagaaaatagctaattcacatgaagggctgctctgactgtggggggaattcgcttggataagaaagtgtccctaggaattagggtccccagcctggagctgagtattgatgagccagttactgaattctcagtgcccataaggtgcagagttgatgacaaggatcacagtcagttaagggaccacagtcatgacaaatacaaaccagaaaatagttcagaaaagggttgagcaggcacacaaataaattcagagcaagcgaagctagttatgataaacaaacaaatgtcagtcttccctttgggacaaagacgtaagttgcagtggagccagtagagagtgaatggggaggccctgtgcaagaggctcccgccgggcaaggaggctgctgcctgcagttctgcaggtggctgtagacagaaggcgtgtgggaacctgcacagcaactctgtcttcctctggagtctttccgcttatccgacgtggcagggtcttcttggctcttgcttctgaacatgctcacttcctctttcttttctccttggccctttctctccttcttcctttaaggtggcaatgcttgtccctgctccctgccctgcactgatggacgcacaagtggaggggtctacacacccctctttcatttcctaagcaacccacaagtccaggtgaagatgtatgattacatttgtattttggaaacataatgattgattgtggttatgattttaaaggaagggcacactcttgtaatgggcaactggagaatgaattagggtcaagaaggctcagggtggggaggcaagtcaggaggcctatatgataattggatgatcatttaaccatggatgaggagactygtgccagggaagctggaaaggctgcactcacacatcaccaccaagctgcttttgggactcaggggccttcccttggttctcatcctcagccttgcctctctttgataactgaccctgttgacctcaactcgctttccaagtccccttagggttgctaatgtgttttgctggtctctgctcatttctcccatcattcttctctctcctcttccttctcccactccctcactctgtaccctggtccacctccatggtgaactcattcactgccaggcatctaccaccaggcagatgcattcccagccccaatctctccctgggttctagtaccatattctcattgacttaagtatctctaattggatgcctcaaagtgaagtcatcatgtccctccacccccacaaaacggggctcctctccagctcaccccacttattccagcagaaccatgattttttcatctccaaaattaggatgctcaagagtcatctttgcttatcacgtttacctttatttcttgagtttctgccttctttttgggatttacctcacagtcactttttcttctttattctcaatgccactactcccttggcctgggcccgataactgaaacagtctcttggctagtttctctgcctctaatctttccctccgtccaatccaatttacagcctgctgcctgactcactttcatcatcccacagctttcctcaagaaccaacttgcctatcacacggaatccaaattctaattgctcccaaggccccacagctgccctcccttaccccatcatgtttttctgtgttcagttcataacatcctcttcttttaggtctgacccttccctgtcatttgtgcacaccgcaatactctccttactcgacacttctgtgcatgttgctttcttcatctgcgatgctctctccttctcttattcaaatcctaaacatcctcagagttcagttctacctccattttttttttttcctgagatggagtcttgctctgtcacccaggctggagtgcaatggcacaatctcggctcactgcaacctccacctcccggattcaagtgattctcctgcctcagcctctcgagtagctggggttacaggcttgcaccatcacgcctggctaacttttgtatttttaatagagacggggtttcaccacattggccaggctggtctcgaactcctgacctcaaatgatcctccagccttggcctcccaaaatgctgggattacaggcatgagcccccatgcctggcttgccagttctacctccacttctattagcagtcccccgacagctcacccaggcttctgctgtagtcaagagccttggactgcactgtgtccaccttgcacgctgaccctccgtgggaggtactacgtcagtcagagtcgtctgttagacagcattcatctaccatcctaggtagtgattatgctgttagggtggcttgtgttgacccaaatgttccttcagacctcgtccattcgatttttcactgtattggtcccaaatccccaggccttatctacgctgagcttatcagacttcaccttcagctgcacatctctagacagagacaggactggcacattctgcctccacccaaatgattcttggccatcatcccctgcctgggtagacctttactctcattggcctctggatttacccagtgctatctctgcacaatgttcagtttcagttcttcctgaggaactttttgatgccttccagaaggctcttctttcccttcacacaccttccattaaactgtaagagtcatgccaggcacttgtttctaggtgtagcagtttaatctctccaattaagctataagcttcttgattaaaacaaaaacaaaaacagaaacatggcaccttcctttcttggacagctatcactgaacacagtgttacacaataagtgctcacgaaaacacaactgattgacttattttgtgtcacaccatgtgactggccaccatccttccagatgccctttaagaggtctgcacagggatcaggagacctgggttctccacatgaccttgtcactatctactttgtgttcctggttgagtcacttaaatgttatgagcctaagttccctcagccataagatggtagcagccattcctacttgatcaccttaagaatcaataggggatcacctgaggtcaggagttctagaccagcctgagcaacatggtgaaaccccgtctctactaaaaatagaaaaattagctgagtggagtggtgtgtgcctgtaatcccagctactcaggaggctgaggcaggagaatcacttgaacccaggaggcggaggttgcagtgagcagagatcgtgccattgcactccagcctaggtgacaacagtgaaacttggtctcaaaaaaaaaaaaaatgaacggggaaaaggcaaacagagtgttgacatatttgacaaacttcattgtatgtttaattaactcattcactcactcaaatcattcaatgtatgtatgctacacaaatggccatgttatgaaatgaagatgagccaagagttttcaattccactgaattattttcagggaaagtgacttcatgagaagtaggaaagcgaaaccaaaattttctccatagaaactaatttaatgcccacactagtttaacctattttataaaccaaataccagaaatttggacagagaagagtcttggacaatatacaacctaggtaggaagaggagacagtcagagttctggtaggtacggcagagttgggaggtgctgtgaaggtggggataagatcttgttttgtacatcctaattctgagtgcccttttattacaactgctttctgccatctccttcaggcaaaaccccaggttgctgaagtgcctgctaattttatattggaaggccagttctgggtcactgcactactagtctttctcaaccagggttttctatctgaactacagagcacagaaaatgatctgtgtgactgtaaccttcctatataccactctcagtggccaggagaggagtcgattcactacaatggatgtcttaaagcaggagggcttatttctccctgggaaccctagttggggaaggctaaacactgacggatggacatatttctcgctgaggccgacggcatgtggtattggcattggctgaccaaaaacaatagggccctgtctctgctgcaagggggccgggagggattttttcactgaggagcactaccttaatgaactcacttgcttttctatgccgcttgtgtccacatttccctcactgccctacttctttcctgggactgtctctcgtcttaaccctttccctgccacgcatcacaattaggccattcaaaccaaattttctactctaaaagcattcacagatatgccatttcatgcagctgaagattcaacaggcataatttaataacatccgattctttctgcacccttcaagtaggagcagccttttttgagtccatctttttggtaggttccctggccctgagccgcggggtcagatctccagccagaagacccagcacagacccccggctgcagctgcagcttgtgcacggatagagagagattcctgcttgggctattagtgtcccaggtctggactctggttaatatggtcgtcactgtcacctctgctgttgctatcctatagtctctgcagtaggcattcagttttctctttattccctgtccttggcctatgccttggcctatgcctatgccctttaaaggaagacagacccttcctttaaagggtgtgtctccagcccacgaacttctggctggctagagctgcattctctctcttttcttcctgacaccctattagaaaattagggttatttcttgatttcctttattcagttctccctgatccctctacatatgccaccatcatacaggcatatagctaatctttacttgggtttagtctcttcaaaaacagacctatttatagcttcccaatatataactgcatgttaaatgcaacacctatacttcagctctcttatttataatttgaattttgaaattcggaattgttccatggttcaaaaatcacctttgggcgggttgttttgccaagaaaaccttttatcaaaaacaaacagttcactggctggcaatacacactttactggaatggcctcccatagtttgagaagctcatatctggttgtagcccaactggtcaagggtgttattgtctgtctcttgggaaaccactaaaggaaagagtaggaagtaggcacccttggggaaaatggcaaagcctatagggtttcaaatagaacacagtaggcaactaagaaaagtaaaaacaaccmattttttkttgttgttgttgttgtttttaattagagcctcaaccaaactcaaatacaatttgcatgaccacagctgaattcgcctatcatgtataccacaggacatttgcttttcctggttacagcatgactcagactttatttaaatcctttttacaaagaaataagggagataaaagtgacagaaataaagtcattgtttgctctctgcccaggcagcatggggacagaggctgatctgaggtcaacccaaaggccccatcggttgggctgttattgccatatggcctgcggggctttgttatatttgtgggttggaccttactcctacaatcacttgttctcaacagcccaggtgtttccaaatcctatttcactggttgaattcatctgatattcacagtccttgaggctagtgctgagaatgaggtgggaggcacctctcacagagggctagccagtctagatacgtaacaaggaaagaattattccaagcaacagaagatatctgcgttttcctggcagatccagagacagagaaactcacaggccccagatcttggcaggagataggaagtggtatgagcacaaaaggggagctacgcaccattaacaaggaaacagaatctgaaaactccaaagaacacgcacgtggatgttcccacacccgtctgctcttccacattccagagactcccggcctctaaaagacacctttttattatggataatactggtggtatgctggcatgctgacactgggtaggggtggggtggggtggggttgatctattgccaatttccttggtataaatactgcttccatggcccatttcaagcaaacaacattttaactactagcccttaaaaatcctcattatttaacaaccagctcctgcaagctggtatgaactggctccagcacaccactggataatacttaacacactagaaaccctggagaacaatccgacacccaatataagcgtctcttctacagaatccctgacagctgtacaccaaacctgttttgctctccactggtgagctgctcatgaagtctaacatctgcctagcttagaatgccctaagtatgcccactggagaagtgcaggataagtctacccatctgtggtgtcttcaacatggcaaccttttacatacttgaagacagtggtcatgaaccttggggtcttctcctttcttctccatgctgaaacatatccccagatccttctactacccttcacatcaaaagtataacagcccacccacaatacaatgaacataaaaatgtcccaaatgtaacataacacaatggggccattatctcccttgtgctaatcagagtaagaattgtcttgcatcacacataaaatacactaacactaatgatagctgattagttaaaaaaaaatcacacacacaaaaaaatctcatatgttttaaggaagtttaggaatttgtgttgagccacattcaaagctgtcctgggctgcatgcagcctgcaggctggacaagcttgctctaaatactatgcttttcttactctcctaagattgcattaacccttttgacagccacctgatactaaccattcatccttacataactatctcccccaaagcctttccctcctcccagagtcttttaatattatttcaggtttttcacattaattgattattaaaatacacttgctaaractacattattctcaccaactgttatatgtttagcttggcttctgacctctactgagatcttctttattcttccaaagggtgttacccacaaacgtgctaaaaagccttttatgtcttcattcaattcactcacatagatttttgcagcatctacaagggacctcgccctctttaatccatgctctttgagtatagtccttagctaacatccagccagcggcaccactctccaatctatgtttctccatcttgctcacagaatttcacacacttgtcaagtgcctagttgaaatttagaatgtacttttagcaggaaagcactgtataaaggtaaggatttgtctgttatttccctgccagaactctctgagaatgttatgaagaaaataaatgggattcatttggcatgcctttttcctcagtgaggtcacatgggtaccctgtggtctttctatcgttgcttataaaccacttgccaaagaaatcctgtaagaaatttccttgggaatcaatcacattcaggttgagtttaccactcgggccatataccaggggtgtacaagcctgtccctagctgtctctcctgtgtacgactgccaggcgaagtttcctaaaacaccacttttttttttttttttttttgagacggagtctcgctctgtcacccaggctggagcacagtggcgtgatctcggctcactgcaacctccacctcctgggttcaagcgttactcctacctcagccttcaaagtagctgggattacaggtgcacgccaccacacccagctaatctttgtatttttagtaaagatggggtttcacatgctggccaggctggtctcgaactcctgacctcaagtgatttgcctgcctcggcctcccaaagtgctgggattacaggcatgagccatcgtgcctggcctaaaatgccactttcttcatgttgccctgctgttcagacattcctgacactatccaagtcctgtctctgactatcagggctctccatcatcagaccccaccttcccactggccaccatggcctctgactgggtttcaggccagctcctttctgtccatgaccttcgacactaattcctgctcacacttccctcagcccaggaactctccctgcatcctgcccttctcatgcccactggcctttcagagtgcacttcaagtcccctccaccatgaagcttctcctcccagttctggtctccactgaccttcaccttctttatacgacattcattcaaatgcttacagccatggattcacagaagccttacttggaaggctggactggagatcacctaattcagctttcttcctaactaggaagcgggtttacagctcaggggcagcagtgcaatgcagctggagagtcacaggggccctgaatgctggctctgccactgatgagctggaggcctcgtgggcttcctccactgtcctgacgttcggatatgacactatactgaaaatccttcagaaacaaaaaagagcacctcagctgtgtctactggtattttactggtattctatgccaaaccatatgtaaccataaaggtaactggtgggaaggaggggctccaggcagggcagacctgaaacaaagctattcatctacgttagggatcccaacccaacggcaactgtaaatagctttgggtaaaacaggcttttgagacattagaaacaaacaaacaaaatgtaaaagttaaattcaattagactctggggtaaaatttaaccttgagactttagcactctccacagtgctgacctttgaagctggagacagactgagcaaggagaaggaactagccaggaacttcctcaattctatctcctgctttcccgaagcccacccataatgccggcccacgagtcttccttcaccagctctcagaaatattcttgtcctcgacttctgccaagccagtgtccacatacagggtgaccagggatcaaaccccagaggcctgggccaaggggccattcttcaaggaggactctgcccccacgcttggtaccgagtccctgacgaccctcctctcacacttggtcatctcgcttcagcgtcctcccctcatgcccaatctgatccaggtttctcctgaagtcaaacaaacaagcaagcaaaccaaccaaccaaccaaccaaatatctcatgttaatctcactttgcattcatctacttatttttcctgtcatccgcacccttctttctcaactacaataagtagcttgaggggttgggtatagtggctcaagcctgtaatcccagcaactttgggaggccaaggcaggtggatcacctgaggtcaggagttcgagaccagcctgaccaacacggcaaaaccccatctctactaaaaatataaaattagccgggcatggtggtgggtgcctgtaatcccagctactagggaggctgaggcaggagaatcgcttgaacctgggaggcagagtttacagtgagccgagatcaagccattgcactccagccggggcaacacagtgagactgtctcaaaaaaaaaaagtagcttgaggatttttctcctgcaaacccttgatttttattcctcccacatggcttccacccttcctgctatggcgcaacatccctttcaggggacaacgagggccacctccgctggtctcttcttttggtagtgagtggctctgagctgtactgtagccctaaatttctctgctgtctcttttctcactctccaccattaacttaggtgcccctttgactttcaactagtttttccttctgtatattaattcagccaaagcagaaatgatcaaaaaacctaatctctgctactaactgctccctatttttttaccttaatcatttgcatagacatcctacagatatcagctatttacaacataccaacaagcgctcagactccttcctctgaccttaatacagagtgtctctaacaccaccataacaacagtttccaaaggcttaaaattccttccagctctttccttggttacccttcttctttctctctctttttttttttttttttagacagggtcttgctctgtcacccaggctggaatgcagtggtacaatcatggctccctgcagcctagacctcctgcgcttaggtggtcctcccacctcagcctcctgagtagcggggactgcagttgcatgccactatgccaggttgatttttgaattttttacagagatggaggtcttactatgttgcccaggctggtattgaactcctgggctcaagcaatcctcctgccttggtctcccaaagtgctgggattacaggtgtgacccgctgtgcccagaagggcggacctgaaacaaagctattcatctacattagggatcccaacccttcttcttttttatctcacattcaacacttttaaaataaaacccaacaaactccttttatgtaaagtatcaggaatttgctgtgtcttccccattttcttagcttatgccctagctatgcatgcgctgacctggctctcctggatagagcactgccttcagcctcctggccacatccatccatccatccatccatccatccatccatccatccatccatccatccatccacccatggtgcttagtcacaatttttattctactactcactaaccagaaatctacaagcattctttatcctcattatattaccaaactcctcccctctaaatgagtgcctgggccttcactttttcttccatgcatgctcactccatttgggcacccagtgccatctgcctagctaatctgacccagatgctcatttgttcaaggtccttcagcattcagttcagttcaaatgtctgtaatgtgacttgttcatgttgagctttgagaacattcttcagtcatttcatgtcttctgtttacaagcagactgtaagctctttcaagtcaannnnnnnnnnnnnnnnnnnnnnnnnnnnnnnnnnnnnnnnnnnnnnnnnnnnnnnnnnnnnnnnnnnnnnnnnnnnnnnnnnnnnnnnnnnnnnnnnnnnnnnnnnnngtgccaaaatgtcagtttatgtactggcaaatatcatcttcttccttggggctttaagtactcagataagatgcaacagaatgaactgtcccacagagtaaataactttctgggagtaggtaaaagactctcagaaaagcagtcactcttttagaaggccacaaatgaatacaatcatttgttaagaggcaccacagtacaacaagacaccatattttggggatatggactgatgccttctagtcctccataaagtgctgatataacaaaaagatgttagaaatgtattagacaacttcgtaacaacatgaagaaaacaaaatttaaaaaatccacattctggctgggtacagtggctcacacctataatcctagcagtttgggaggccgaggcaggtagacggcctgaggtcaggagttctagaccagcctggccaaaatggcgaaacccgtctctgctgctatacaaaaattagctgggtgtagtggcaggmtcctgtaatcccagctactcaggaggctgaggcagaagaatcgcttgaaccttgttggggggcagaggttgcagtgagccgagattgcgccactgcactccagcctgggcaacagagcgagactccttcttaaaaaaaaaaaacaaaacaaaaaaactccacactctaactctaacacaataaattttcatttaactccttaaatacatagttgtaatcatagtatcatataattttgcattctttttgtcacttgatagcctatagttacccttgcatagttttggtctttctacttataatcaagtccaccaattattaatattccatcttataaactttgtcactgctcatttgctgattttggttgtttttaatatttaatctttagaaacagttggataatcacatatacacatatagcttttaaaaaattaattacttataattttaaggaatgagatcatcaggtaaaaggatataaaaatattcatggctggggatatgatttgaaaaactgacctttagaagaactgtacacatacatagtttttaattaattttatactttttgatctaccctttgtgacaactagtaacactgcagagtgtcactaatctggtgctgaatcactgctgcaggatcctaatgtagtgactgccatttcagaagtggtactgactcactagcttttataatcagaaaacaacaacaaagaatgagctgctttttagaaacattgccagattctcgggaaaatatttgtacatttgtataatatataaaacatattggttaatttcctttatacattagaacaatctagtttcataggtgttaagtagtaaatatattctattttactttggcttatcttttaggtaagaacaaagaaagcaattacttgtggctgggagcggtggctcgcacctgtaatcccagcagcactttgggaggccgagatgggtggatcacctgaggtcaggagttcgagaccagcctgaccaatatgatgaaaccctgtctctactaaaaatacaaaaattagccgggtgtgatggcatgcactgtcatctcagctactcggaaggctgagacaggcgatcgcttgaacccaggaggtggaggttgcagcaagccgagatcaaaccattgcactccagcctgggtgacaagcgcaaaactccatctcaaaaaaaaaaaaaaaaaagcaagcaagcaagcagttacctgcatatgatatgcaactaaaatcaacggtatcttatgcaatartagataacctcagtgttaactaagtaagtataattaatgtgaaatgctattttaaaaaggtatgatttactggccgagtgcagtggctcacacctgtaatcccagcactttgggaggccgaggtgggtggatcacgaggtcaggagatcaagaccatcctggctaacatggtgaaaccccatctctactaaaaatacaaaaaaattagctgggcatggtggtgtgtgcctgtagttccagctactcgggaggctgaggcaggagaatggcgtgaacccgggaggcagagcttgcagtgagcaagctccagtgagatcgcgccactgcactccagcctgggtgacagagcaaggctctgtctcaaaaaaaaaaaaaaaggtatgatttacttttcatttaactgggtgtctggtgagacatttctcacctgaggcatggataaatatctgaagtttgattagaaaaaattaacaaatggaatctattctgttagagtttaatgccattaattttgtgattaaaagttacaaatgctattcaaaatttctgggtctgactggttacagttgcacattaaattggatattagctgttctatttagttgagataaaatccagctttgaatccaaatggttaaaaatggtgaagtaaaagaagactgatgactgttttagaaatgcaattatttacatgattggcttttgtctgtatgcctttcaaatgtcaagatattctgaaaataatcaaataaccatgaaagaattcacgtggaaggatcactttaacctgtgccttatataatgtastcaatttacagaaaagccaattccacgttcttatccaaaacaataaaatcaatgatgcagccttaaaatctcttyctctggattaatccctttacctaacaactacattctaaaaactgaggacttatcattctggatagggagtgaccttttgggaagaatcacagagtcctctccccagcccgagaccactatcaatccccttggctagggggtcaactgtgtactcagcttccttttaagtcatttcaaaggatgaacaataaacagaagccgtgctctcccaatttgaggcattggtgatctggcaggggagataacacccaaatagggagataattgtattgtgactgtacataattaaaggcagcggtgacagtaataagcccgttttttcttttgtagactgagagagaaagatcttaaaaagttgtcttcttgaattcagcctttcaagactcattggtgaatgasaaaatgagacatctggttctccaaaatgtatctgttgagcatggttcttacacggatggtatctggcaaatagagatgagcatgagaccacataaatgccataggaaattcccaggtctcactgaactgtttcattcgcaaaaacactgtcacagccagtgggcgggtgggggggacacattaagtgatgaaataaaacgtactaaagcacagaatgtcagmtayttcacacacacacaaaaactacaattacgctaggctacatcaattatcatggaataaaaagattacaaacattacaaatgtgtgagtgtggtttttttaggaaattaattaaatataaagagctattgatggtggtcatatggcaatgaggtcaacacgaaagccaggcactagagtacccatggatgaattttcaactggaataatcaagctttatttactttttgtggccatgattttaaccttttacttattgagatgccaagacaaatcaaaacggcacacaattaacctgttaaatttatttttcacaaggcctgctaaaagatgtggttgaaattactctcaaattgctttcggaggtttggcaagtgagacaatacaagaaaaactaaacattttcaagtcatattgttttgagaggcgggcctgagaaggttcaagtcctaaaaggctgttgtcctacaaggctgtttgtttttccgggcgggttggggttgccagactcaaagagtccccctgatctgcattctgaattgagattctggacattgccacccagctcttcatatgtctaaggaaactgtggctggggatggtggctcacacctgtgaccccagcattgtgggaggctgaagagggaggatcatttgaggccaagagttcaagaccagccagggcatcataacgagagcctatctctacaaaaaatcagttaaaaaaaaaaaattagctgggcatgatggcacacacctgtagtcccagctactccaggaggattgcttgagcctaggagactgaggttgcagtgagccatgattgcaccactgcactccagcctgggtgatagagcaagaccctgtcttgaaaaaaaaaaagaacaaaaaaagtgaaggaaaaataaaaaaaaatggtgtaattatttgattcctgctgactgcagctattaaaaagggaggtgtgtagctaccacctttgcattcccaatcattcaaaataggtttcatttctttttcttttctttctttctttcttttttttttttttttttttttttttgaggcagagtcttgctctgctgtccaggctggagtgcaatggcacaatctcagctcactgccctctccgccttccagattcaagcaattctgcctcagccaccctagtggcggggattacaggcctgcgccaccatgcctggctaatttttgtatttttggtagagacagggttttgccacgttgtccaggctggtctccaactcctggcctcaagtgatttgcccgcctcagcctccccaagtgctgggattacaggtgtaagccaccgcacccggcccaaaataggtttttaaagccaattttaaataccttctagttctcattacaacttgaaaaataacactttaaaactccacaactggaaacaatgaaccaaaagagtgatctgctacagaaagaacattaagatatttttataatacttgaaaacaaagtattacaactggaattcagggaattgaaattggcatgtcaaacaataatagaagattctaaaggtaaaaagtagaataattaaaagaaatagtaattataccaaagacaggtttatagaaaacaacactggtgaactttgtatttactgacttacttaaaaagaacttctagcgtgacattttttctaacattgtaattgccctgcacctatctttacatgagtctccataaacactgctgaatgtagatcagaaaattgaagatgattaagaactgtttatctgatctgtgtaccaaaatggattagactcattggtagtactttcagttgagaataaagtttttttttttgacagagtctctcgctgtgccacccaggctagagtgcaatggcatgatctcggctcactgcaacctccgtctcctggttcaagcaattctcctgcctcatccttccaagtagctgggattacaggcgcacgccaccaccccagctaatttttttgcatttttagtagagacagggtttcaccatgttggccaggctggtctcgaacgacctcaggtgatctgcctgcctcggcctcccaaagtgctgggattataggtgtgcgccactgcacccggctgagaatcaagttttaatgaagtgactttaatgcatttatgagaaatggtcatcactaaaatctaagccttgaatgtgatagttcagattcaaggcaaagaattttttaattcctcccatttgtttgctacttatacctctggtttaaaaagatacatctgaagtttaacattatatgattctagatttttataaaagatttttatgagtttcttatagtttatgtctatagcttactcattcatttgttcaatatttatctagtgaccacagtgtatgctgaacactgatttagatgctaaagataatgcagggaataaaacagatgattcgcctacagatgactccctgccctcacggaatttacatctacctcataacacttgaagataagtagaattgattagctagtgatttagttacctgaaaatcaaatgctacatttatgtaagttggcatgaaattataaaatatctttcatagcgaggaccagtcaagatgataaaaactactgggtaagttctaaatatgtcataccaagtaaccattaactatttgtaaaaaaaatggtcagtttaagtcttgacttagaacatgaagacttcaaaaaaaataattacaagtaacttttttttttgagatggagtttcgctcttgtagctccagctggagtgcaatggcgcgatctcggctcactgcaacctctgcctcctgggttcaggtgattctcctgcctcagcctcctgagtagctacaggcgctgccaccacgcccgcctaattttttgtattttcagtagtgatggggtttcgccatgttggccaggctggtctcgaactcctgacctcaggtgatccacccgcttcagcctcccaaagtgctgggattacaggcatgagccaccgckcctggccacaagtaacatttttattcacttctggtgattaattagaatcactgaaccagaatcatagtttatttaatcatcacaggttgtcttctacatgactacctcatctttaacttctgtattaataaagaatttgcactttcactattctcagtcatggtatgactcaatgttttagaacttagtatcctccttgcaaaaagtaatgcgagctggaacaaagcccataaggtaacatttaccacctggaacaatcaaaacaaatattttaacagcaatagatttgtggaggacagaaagtcctagtggctagaacagtggtgattagaaaagcagtggttagaactttttttttttttttttaatgaaaaagatgggagggaagatggccactaaattgtatttgaaaccaaaagaagtgacccatctgctctggggcccgtggagagagaagagagtgcagattacgaactgggaatgcagaagacagaaagatgatcagctggaaacaaactgaaggagtgtgttggctagcaacacataatgagagtaggggcaggcttctgaccttgatggtggcggagccgcattctctcgcataatctgtcagttctctctctctcttacaggagaccagcctgtctgggaaaaagtcacttagctaccaatgcctctgagcatacggccaaattcccccaacctcctctctgatcagcttctgcctctttttgtaacactaagtgggttggggaagcccctggaggctgagggctgtcataggccatctgtgtgaggactcccaggggctgagggagctgtgaggagggacgtagagactgggctgacaccaggtgcttaccattatcatgtaagttctctaactgtttcatgtggggtcttccctatccttctacctacagtgatggtaggtaacctgaagaagtctgactttttaaaattggcacagagcaaagcccattcctaaggaatgttaaaaaatttgctgactttggacagggcgtggtggctcacatctgtaatcccagcactttgggagggtgagccaggtggatcacttgaggtcaggagttcaagaccagcctggccaccatggtgaaaccctatctgtactaaaaaaaaaaaaaaaaaaaaaaaaaaaaattagctaggcagactgcagactacgcctgtagtcccagcaactcgggaggctgaggcagaacaatcgtttgagctgaggaggcagaggttgcagtgagatgagcctactgcacttcagcccggatgacagagtgagactgtctcaaaaaaaaaaaaaagaaaaatttgctgacttttggctggagattttaattacaaatatagtagagaagttaagattaatatataaaaaagacggtgccaataactaaatgttgtgcggcactttttagtttataaggaatcttccctacatcatctcatttggtgctcagagctgtggtggggaaggcctctcatcagctcagatttgacacacctaatgtggagtgaggtgggtgtttggtttttcaatcttttaattcttttccattattccacayataaagcaataagaaaaattaaatgctaagccgtatggtattgattaggtaaaacggtgacttaaaggagagctcggtagtgtcagaagagcgcaaatccatcctggggatgagatgcgtgctgagcctgaaagagcaaggttttaaacggaaggccttccacctgtggagagggcaggaagaaaggcatgaggatgggaagcagacaggctacgtgggaaaggcgagaacagattccaggcagcatggtgctagcccaaagcagcaaacctggcatggaccaaattctggctcctttccacgaaaggaagaaaaatgaacacagtaatctattaatcaattagycttctgttttcgacttcaattcccagagctaattaatcacttcattaagtaggagattctctcttggtttaggtcattaatgaatattactaagtaaarcctggtttatatttctaaaacttttgcatttcaaactcctggtagsgcttacgatgaagatgtaaaagaggtgccacayatggactggaggttccatcccagctgccgcttcctgccatccaccctrgctcttctctggaacagccatctccggacctgtcctggaagttcgcacacttctgcatttgcctttgtcattgtaaggctaatgctgggaaacgtgctcacgtcttgattgtatttatgctgtgtctaattttagttctattgtaccaaaatgactgacatgggtttaattgcttgatccaatagatgctggtgcatcagaccaacagaagcttgctcttaccgttattaacctgatatattctgactaattcacagaatgagggagagtatgttttcttcttacagcacatcctgctcagtgactgtgtcatcaccaaacatttaaaaagagyccgttatgttaaaaatattatgctaaccacygagaacacaaagaggtgtggacacagtcactgaccttcagggtactgacaggttgtgcaacaggtcactttacaaacaagaccagaggacagcatatgaaaaacagtgagcaaggccacaggtactaggcgcttggagtctggggccccagacttgcttccatatttaaatgtcrgcactcactttgctgccagtgactctcatcttatttctcacrtgcggactcgacacagcatgaggggcaggcaggtggggaggtggcagcaaaacaagaatgcatggttctgacctcaagaagcctgagagttactgtggagaaaagaaaaaataatctgaaaacagttacaaagttgatgtcagcaagaaccagacaccatgctgtgagttatatgtttgtgcaaagatcaccagagaggaagttagcatgtgaccgattgggtggggttgacctgaggtttctggagctgtgaggtggacccccaatctagtgacatgaactgggactgggagaaggacaaggctttctggcctaggaggtaatacttgccaaccccaacgcttagataagactcaaaatgatgctctttcttcaatgatgcctgaacagatggctgtaatatactcctaattggttttctcatacttggtccctttcccaaaagctccagtccactgaatcattctcatgtcaactttcctaaaccatacatatctccaatcaggtcagtcgtctcctgatcaaaagagaaccaagtatgcatcgtcactttgcaatggggccccctaaggtaactgcgctcatttttgttctgtgcctctatggcagagttcagcaaacactttccataaagaaacaaatactaagtcttttcggcttaccaggctatctatacaccgcaactcctctctgctgcatctactcatctctgctgacgtggcacaagagttgccagagaccacaggtacatgaatggatgtggttggcctgtggaccctagtttgctaaccctggcaagggaatccctgggctcacccatgctgaacttctggttgccctcctgcgggtgtctgagcctacacaatagtctccttaccagaagtatcctcacatccatcactgacagtcaagagccctacactttcctctgcccgcctcacagatttccatcacatctttgtgctcacccaatgtgatccatttaacagatatttgttggttacccaccatgtgccaagcacctcccagatactgggtatacaaagtgaatgacagccctttttctgtgagcactaagatctagtagggaagaacaaacagatctgtttatttggttcaacagaccaaagctagatatgagtcccccttcttccaacatgccatagcacttcttttctgcaatgaaacactcagtaggcatctctggagagcaggtgaagtgctcagaaggtaccccacacagttccttgtacacagtaggtactcgaaaaacatgtactaaactgaattaaactgaaattaatagtgccatacatctaattgacaaatgaacacaagtattagaaccatagtattttttttcttttctttttttttttttgagatagttttgctcttgttgcccaggctggagtgcaatggcatgatctcggctcactgcaacctccgcctcctgggttcaagtgattctactgcttcagcctcccgagtagctgggattacaggcatgcaccaccacacctggctaattttgcatttttagtggagatggggtttcaccatgttggccaggctggtctcgaactcctgacctcaggtgatccacccacctcggccttccaaagtgctgggattacaggcgtgagccaccacgcccggccaaaccatagtatttctaatgtgggatgtgtgtgtatgtgtgtgtgtgtgtatgtagagagagaggggctgatattatatatattatatatatatatggagacacacacacacacatatatacacattttttaaacaacaataatgatcctgtgaccatccttctagctgggtaaagtgacttcatttagtgagaaaatgtcttagttcgtttgtgctactataaaacaacacccaacattgggtaatttataaagtttatttctcacagttctggtggctgggaagttcaagatcaaggtgccggcatttggtgtctggggagggccttcttgctgagccctcacacagyggaaggcagaaggtcaagagagcaagctaagctaacagctacatgaagccacttttctattattttttttaaattatactttaagttctgggatacatgtgcagaacgtgcaggtttggtacataggtatacatgtgctatgatggtttgctgcacccatcaaccagttatctacattaggtatttcccctaatgctatccctcccctagcccgccacagtaatggaattgctgggtcaaatggtattcctggttctagatccttgaggaatcaccacactgtcttccacaatggttgaactaatttacactcccaacaacagtgtgaaagtgttcctatttctccacatcctctccagcatctgttgtttcctgactttttaatgatcgccattctaactggtgtgagatggtatctcattgtggttttgatttgcatttctctgatgaccagtgatgatgagctttttttcatatgtttgttggctgcatagatgtcttctttcgagaagtgtctgttcatatccttcggccactttttgatggggttgtttgtttttttcttgtaaatttgtttaagttctttgtagattctggatattagccctttgtcagatggatagattgcaaaatttttctcccattctgtaggttgcctgctcactgtgatgatagtttcttttgctgtgcagaagctctttagtttaattagatyccatttgtcaattttggcttttgttgccattgcttttggtgttttagtcatgaagtctttgccatgcctatgtcctgaatggtattgcctaggttttcttctagggtttttatatttttgtataaggtataaggaaggggtccagtttcagttttctgcatatggctagccagttttcccaacatcatttattaaatagggaatccttccccactgctagtttttgacaggtctgtcggagatcagatggttgcagatgtgtggcattatttctgaggcctctgttttgttccattggtctatataactgttttggtaccagtaccatgctgttttggttactgtagccttgtagtatagtttgaagtcaggtagcatgatgccgctagctttgttctttttgcttaggattgtcttggctatacaggctcttttttggttccatatgaaatttaattctgtgaagaaagtcagtggtagcttgatggggatagcactgaatctataaattactttgggcagtatggccatttttacaatatttattcttcctatccatgagcatggaatgttcttccatttgtttgtatcctcttctatttcattgagcagtggtttgtagttctccttgaagaggtccttcacatcccttgtaagttggattcctaggtattttattctctttatagcaattgtgactgggagttcactcatgatttggctctctgtttgtctattattggtgtataagaatgcttgtgatttctgcacattgattttgtatcctgagactttgctgaagttgcttatcagcttaaggagattttgggctgagacgatggggttttttaaacacacaatcatgtcatctgcaaagagagacgatttgatttcctctcttcctacttgaatacgttttatttctttctcttgccggattgccctggccagaacttccaatactatgttgaataggcgtggtgagagagggcatccttgtcttgtgccagttttcaaagggaatgatgaagcctcttttctaaagggccttaaacccattcaccagggagaagccttcacggcctaatcacctcttaaaggccctatcttttaatactctcacattggcaacacctgaattttgaaggggacccattaaaaccatagcaacaaacaattataaagattatgctaagaagatgtgggtacttcgggtagacagagaagtgtaaatggggttaggaattgcattaggaacactatatgctcagaaataccaatctttaaattaaacaacctatcgaactgcctttacatggtgcactgctggttataaatgtgcaatacctgatggggggaaaattccaggagagcttataaaagcatgctagaagcattaaaattttccagccatttcattatttgtcattcagcaaatgttaatatttctctttgtattcctactgaagcttgaaattaacatggctttttgtttatttcttcatttctgcctccttgtcagctcatctcaggaatgcagttggttagctagctgctgcagagccaaataaaaaagcctaaagaaactcaaacattgactggcaaaaggctctgcatgaaaaggcatttgttttttaacctctcagaagtagaacatttagcttaaaataaatatttaacatctaggatgcttttatcaagaatcattttgacatggacattagtctttatcccaaaagccagataccctggggagcaaagttcgctgcaaatgtatgcaaaggaatagcgtgtgcaggatacaaggaggccggaaggccggaaagcagggggagtacaggatttcctaaggtaaaccgatctcttaagaatgcctgttcccctcccgcaaataatcattaaacagaattcagcataagttcagcattttcaagtcactcagggacacaggtaccygggaatgttccctctgcccctggactgtttgtgttggattccagcctggctcctcctgtcccccgactgcaggactgtttcccacatggaatcacgattcagtcacgattaacaccctccccacagcgtggctggtgcccaagcagccccagtagggcttgggccttgtggaggagagccctcccctgggtgaacaacccagacaagccaagtcaactctggttttgggatcgaacattaaattcacgtcactggctttaattctttccttaccaggtgccttgggttttgaggggatgctgttttatgagggcttttgtgagggccagggatgttttcaaaactacagggcttggcagacatgggtactgaatgtccccaggaacaaagtaaccagggattgtgtccaaaactggcttgaagaaatgcctcaaatgtagcaaatcattttttaaaattcatgttaagatcggccaacagccttcagaagacagaacctttttcatgtctgtggcatgtgtgtgttcacgtgtgcttcctgaatttcccaaccaggacatgaagagcacagcccactgggatttttttgctggtggcttcccatttgggaacaggctctgagagacaatctgagcgggcttcctgtgttgtctgaggccagcttccacagggctgccatcagtcagcccattactcagccatgggcccagtgaggcagccacagggccactgtgctacaagcaccctccccgcccctggttttcgtgccatgggtttcctgtggagaacatcgtcacgctatattcatctttcctcttagctggcgctgagtcactccatgataaagccactcttcaagctctattttgggtacactttacactctgagggagccggtaacacatctctcctgatataaatgtacaggagagcccgtcaaccacagctctctgatggagcctacaagttgcaattgggtcaatgttttcactgccacagcacttaatcacttgaaaactttatctaaacttgtgaagttttccctgcttttagcttttcattctttttggcctgttttgataacagaagcatgctgccgtccatcccaggtcagagctggtggcaggagagaggtgggtgggagaggagggaggacacagcccacttctcaggtccttctaaatggtctttattagcggatttcaaaattttgcagtgaaattatcagaacacctggcacctccacatttaaatggaagcacaaacccaattccaaagccaaaggcttcttccggaacccctgctgttttctataatcagcgccagtgctgcactcccctcgcctcctcccgctcagtgtgggtgtcaagaggtgaccacaaaagaggctgctcaacatcacctgagaacaaagcctcctttcctgcaattccaaattgacttttgctgtacaagaaaattaaggatgctgtggctaccaccagagagcacatttaaaactcctcacatgaaaggcccttgcactcctgggaaaaatattctcactttaaggagagtcacagcgtgcggagcctggactttccatgcaccaagccctgggtccatgcagccaccactgctccagggagcagaaggtctgatgttctctgagctggaatcttcctacatttctttgtccactgactgggggccctggttctaggacagcatctcccctggtgctggaggtgctcaaaccaccatggcctggcctgagtgggctctatcttttccagggcaggcatcacagtggagccctcggatctggctgacactcctgttactcgtgcacggcttatgtcatgctggtacagaccctgggccatgtagaggactcatggtgagatgccaatgtggctactgccccagcttctgccctcacttggcacataccatagaccacgttgcttccactcctcagaaggaaaaccccctctattgccaagctgttcaatattcacgacaggcaaggtccttatgattcagtcctgttacctctccagcctcatcatccaccacatgccctcactcactcactcatcaaacatccactgagagcccatagtgagtcaagacctgggcttggcaccaggaacactgggtaaaacccatctctagcctcaagaaactcatccatgagcaggggtagccagacctgtaactatacatgtgcaatgaggggttggaatgaagggctctgttgaggcacctaggacagagatgtcagttccaccttcttcaggtgcagtgtggacaccacctcttacgggaagctttccctcatccctcccgctgcgtgcctgtgccctcctctgggtccctgtggtgggtggggccgtaatgactgtgcttgactgctcctcaagagcaggaacactgttttactcatctcctccccacagcaccctgcaccatgtcctgccacacagtaagtgctccatgcatgtttattgtttcaaatgcgcctaatggtaaatctcagactctgagtcaatggcaatctcccaaaagcactgtgttaaggacccgcgttcccctttcttctaacagaggggacagaaggcgctggaagactccagtcaggacatgtgactgctggagcaagcctagctgctcatgagctgtgtgcattccagagatgcttctggcccctcttgccccttgtcccctcctctgtaggacagtggagggccccctggcatcacagggccacagacaggaagtggggtggagcaagagaggctggtcctttctgggaaatgacagagcagcaagaaccagactttctggtgggagagaaaggagaatgtgtgttctctcttaaatataaggcatttttaccaccaacacgccactcagtaaggtcactcctgggttgatgaacaaaaccttgctgtttgtacaatatttagcattacctggaagggcctggctctcacctcggagcctggacgtgacctgcttcatgcttaactatataacacgcgtgccacacacgaggataaaaatgcgaacagagactgcattagctgcctgttaatgtgtaacaaggtaccgcaaaacttagtgccttaaaataaccattacttcatggttgctctaggccagtgcttcagcagcggcctagccgggtctggtgcagggtccctcatgaggctgcgatcaagatgtttccaagctccccaaggcagctgcggtctgtgagcctcagctcctccctacgggggcctccacaggactgctcacaacacgggagccaaagcgagaaataccagagagagagacacacgcataccaagacagaagctgcagaacctctcagaatctaatcttggaagtgaaacaccgtcatttctgccagattctctgggtcacacagaccaatcctggtgaataccaggaggtgagggtcattaggggccttcctggaggttggctgccactgtcataccctggcaatggcattcataccattggcaggcaatggcatgtcatacagcttcatgagggttggctatgtcctttccagagtaaaatagatagattcattattctgtattacaccaacagttaggtcttactcactctcctgtggttttgaagggctacaaatactttagaaaatagttttaaatactgaatgggcttggaatttggggaggggcatatatatagagagacatacctcattatattgcccctagcttgactgagctttgcagataccatggwttttttttttttacacaaattgaaggtttgtggcaaccgtgcatcgagccggtctatcagtaccatttttccaaaagcatgtgctcacttcatgtctctgtgccacattttggtaattctcacaatatttcaaactttttcatcattgtgatatctgttatggtgacctgtgattaatgatctttgatgttactattgtaatggtacttgtgtgccatgaattgcacccatataagatggcaaacttaatcaaacatgtggtgtgtattccatctatgagctgttcccccatctctctccttcttctcgggcctctctcttctctgagacacaataatatggaaattaggccaattaataatcctacaatgacttctaagtgttcaagcgaaagaaagagttgcatgtctctcattttaaatcaaaagctagtaatgattgagcttagtgaggaaggtatgtcaaaagctgacacagggctggttgtggtggctcatgcctgtaatcccagcactttgggaggctaaggcgggaggactgcttgaggccaggagtttgagaccagcctggatgacacagtgagaccctatctctacaaacaaaatattttaaaaaattagctggacatagtgatgtgtacctatagtcctaggtactctggatgcaggagaaccacttgaatccaggagtttgaggttgcagtagcctatgattgcaccaatgcactccagcctggacaacagagagagactgtcttaataacataaaaaaagctgagacaggctgaatgctaggtctcttgtgccaaacagccaagttgtgaatgcaaagaaaacattcttgaaagaaattaaaagtgctactccagtgaacacaggaatgataagaaagtaaaatggccttactgctgatatggagaaggttttttagtggtctggatagaagatccaaccagccacaacactcccttcagccaaagcctaatccagaacaaatccctaactcttcaattctgtggaagctaagagaggtgaggaaattgtagaaaaaaagtttgcagctatcagaggttggttcataaggtttaaggaaataagccatctccataacataaaaatgcaaagggaagcagcaagtgcccatacagaagctgcagcaagttatccagaagatctggctaagatcattgatgaaggtggctacatgaaacaacagattttcttttttgtttgagacagggtctcactctgtcgctcaggctggagggcagtggcacgatctcagctcacaacagcctcaacctcctgggctcaggtgatcctcccacctcagcctctcaagtagctgggattacaggcatgcaacaccacagccagctaattttttgtacagacaaggtttcgccatgttgcccaggctggtctcaaactcctgggctcaagcaatcctccttcctcagcttcccaaagtgctgggattacaggtatgagccaccacacctggccaacaggttttcaatgtagatgaaacagccgtctattggaagaagatgccatctaggactttcgtagctagaggggagaagtcaatgcctggcttcaaagattcaaaggacaggcttgctctcttgttaagggctgatgcagctggtgactttaagtcgaagccagtgctcatttaccattctgaaaatcctaaggtccttaagaattgtgctaaatctactttgcctgtgctttataaatggaactgcaaagcctagatgacaggacatctgtttaaagcctggtttactgaatattttaagcccattgttgaracctacttctcagaacaaaaasatttctttcaagatatgactgctcattgacaatgtacctagtcacccaggatctctgatggagatgtacaagattaatgtgatttcatgcctgctaacacaacatccattctgcagcccatagatcaaggggtaattttgtctttcatgtcttattatttaagaaacacatcttgtaagcctatagctgccatagacagtgagtcctctgatggatctggccaaagtaaattgaaagtcttctggaaagcattccccattctaaatgccattaagaacagtcatgattcatggaaagacgtcaacatgtcaacattaataggagtttggaagaggttgattccaacctacatggatgactttgaagggttcaagacttcagtggtgtaagtcactgtaaatgaggtagaaataggaagagaaccagaaagagaagtggagctgaagatgtgactgaattgctgcactcycatgatcaaacttaaatggatgaggagttgcttcttatgaacgagcaaaaaaagtagtttcttgagatggaatctatttctggtgaagatgctgtgaatattgttgaaatgataacaaaggatttagaatatttgatatggtttggctgtgtccccacccaaatctcatcttgaattgtagttcccatcatccccaagtgttgtgagagggacctggtgggaggtaattgaatcatgggggcagttgcattcatgctgttctcatgacagtgagttctcatgagatctgatggttttataaggggctttcctcccactttgctctgtacttctccttgctgctgccatgtgaagaaggatgtgtttgcttcaccttctgccatgattgtaagttttctaagggctccccagccctgtgaaactgtgagtcaattaaacctctttcctttttaaattacccagtctcgggtatttcttcatagcagcgtgagaacagactaatacaatattccataagcctcgttcataaagcagtggcagggtctgaaaggactgactccaaatttgaaagttctactgtggctcaaatgttatcaaacagcatcacatgctacagagaactctttcgtgaagggaagagtcaagtgatgcagcaaacttcactgctgtcattttgacaaaattgccacagccaccccaacctttagcatccaccatcctgatcagtcagcaacgattgacatcgaggtaagaccctccaaccagcaaaaagattatgactcactgaaggcccagaagatcactagcatttttagcaaygaagtattttattcattcattcattcatttatttatttaaaaatgatgtcttgctatgttggccagactggtctcaactcatcactacaagcaattcttctgcttcagcctcccaagtagctgggattaaaggtgcaagcctagctctagcattttaaaattarctctagtattttaaaattaagtatgtgcaattttttagacatgatatagcatacaaatgaggtaagtacaaatgattgcacacaaagactacactacagttttttatatgcactaagaaccacaataatgcatgtgattcactgtattgcaatattcactttattgaggtggtctgaaaccaagcctgcaatatctctgaggtatttataatatgccaggcattattaggtggttgggatatagaatacattggtgaagaaaacagactaacatagtaaatacaggatatttaatgttgcttaagaattttggttttaattttaacacagggtatgggtgataagctgcccccaattcttgtctcagtctatcccatcccatctcatcctatcccatgtctaaagtccctcagcaggcacccctcactaggattggtatgccaagaacctgggagaaaatactagtctcctggattcctaaacttgcacacctcaggcagtacagggcagaggaaccagctcttcctgtcccaggctaaacacaattctggctgaaacagcttagatttgtgcttaataatattctggggcagtttgggggctggtggatgtatgggtgattgggagaaggatccagagatgagaggagatgaaatttcccagagagaaggcaaagatccttgggaagaaccagattctaggatcttccttagccaagatctgcaaagctgtgcttgagcacatccagggataagctcacccttgttctcaagcagcatggattcttgtcaccccaactcacacaggcagcccattgggcctgcagggacaatccactgggccaacacacacacacacgcagcccattgggcctgcagggacaatccactgggcacacacacaccccatccctcttcttgccctctgaagcctggccagaccaggcctgtgtgagctcctcctctttcgcgaccacgtgaatctggagctgatgactcattcatcgagatcaagaggcactccctcctctcattctcttggtctggcagtctcctccacttttccactttttccttttcaaactcctctccttaccgctccccctaactgggagtgattgtcaagtaaatgataacttgacctctgaatatcagaagcagttgaagacagctagagactggaagacacaggaaggtctggaagaacgggcttctcactccctcaactctagagtctgggccaatgtcaagggccaaaaggcaggagctgatggctgctgccggttctcttccaagggctatggttgggggtatgatcccagttaaagggagatgtttaagagggctggtaggctacttattttcatctgcagcctacaatcttagcatcaagtcctcccctgaataatgtggcacaggataatatttgttatcaatcatatgcctcaattgactatttttaacaccagagatgagttcccatgtaaaatcactttccctcttcccacctcccacctcaccaaaatccagacagcaaaacttaaaaatactaatgttcattataagacggattctgcctgcatgtgaatttaatgccaccagtatagaacatgatgaaaaaaaagtcaaagtgaccaacaacttgtataagacttctgggtacattcaggggcttatgtacagtaaaataccacaattttatttccagtcttactaagagtttataccttatggtaccactacaagtcaaacctgaatattaacaaggcaaatgaagagaaactctcaaaatgaaaactttcccaactgccaagtggtggaccaagagccaaagctaaagttgaatcttcgtgcagcctggagacgcccgatgagtgccacgtttggctggggtgtaaatgcagccacggaccccacagagtgctccccaagagctggggaaatgaactgctggtagggaaaactgctatcgggaaaacttagaagtcaggaaatgcaatcagagaaaagcggtcacattttgttggcgttaacagggctgcctaattcaatcatcacaatgaagcccacataccaaatggaaccttgaagttctcaggattaagatttaggcagtccaagtgtgtcattttgaagttatgtatgttatatgctgtcttataagaaagaattggcttgctatccaatttggaatgaaaataaatatttcttgtgaaacagcccagaattactttcacacaacatcatttatatgtattagctaaattgcaagttcctcacaggtaacatcttcctgtctcagttaccttatgtctgttgatggtgaagaatactgggtctgctatgggggaggtgtgcagaaatgtttctcacctgatgagcccagcctggaactttcctattacaaacctgcccatctctgccacacacagcttcccattggtccaagggtcatatctggccctacatgtaatcgtgtggctcagaaatcccaagctatggcttgcgctttgcttgaagaggagccaggactaactggggtctggagacttctaactccaaaatgagaaaaagaggactgggaaggagtcaggtggtgagtcaatcaacaggagagcggcagagcttccctgacaggacagggacaaaggcctcaggcagcctgtgagggggaaagacgctgggtggatgtccttgctcaccatccacagtgagagctcacgcagggtgccgggcacctcggtgtgcacagggggctgggggagcctcaaggtggggcccaatctatgcaggtccatgagaagcggtgggggcgggggtgggggagtgcggggagggacagctgacacagcaggtttaaagggatgccaggggaaagcgcttgggaaatgagctgcacccagaaagccctcagacccattcctgaacacttgcttgcccaactacgtcagtgtaaaggggtggtgaatgcatcaacacaagggccatttgctagagcatcggtccctatttagtggtatgagcagtgcacacagagtcaggggagggcagagggccaagaagagtagggacatacagcaggctgtggacagatgctggcttccctatgctacagttttgatgtttgtccccctccaatcttatgttgaaatgtgatctccagtgttggaggtgggaactaatgggaggtatttgggtcatggggacagatccctcatgaacggcttagtgttgtcctcgcagtaataaatgagttcttgctctatttgttcccacgagagctagttgtaaaaaagagccagccccagcactttggggtggggggccaaggtgggaggatcgtttgtgcccaggagttcgagaccagcctgggcaacatagtgagacactgtctctacaaaaaatagaaataaattttaaaaataaaataaaataaatacaaatttaaagagcctggcactcccctgcccccgccttgcttcctccagtgccatgtaatccgcacacgccagctccccttcaccttcagccatgagtgggggcagcctgtggcccttaccagatgcagatgaccaatcttgaacttttgcagacatcagaatcatgagcgaaataaacttcttttctttataaattacccagtctcaggtattccttgatagcaacactaaagggactcagacatcctacgaaccgggtgtttgatcctggacaatctcggcctgggaagcctgcaaatgctcacctttagcatctggccgagagccttaagcctccaatgtatttgacataaaaaacaggaatctgtaatgaaggaggtgagattagataattgccaagatcactttcagggacacagtgttgagattctgtgggaaacctcttttctttggacaaaaggaaaacgcccccctacccttactatcacagtgtggtattggctctatatgtggctagctgcagagctggtttatatgtctctatagttccatagtttcgattgtgcaaacatctggcacccttgctgataaaaccgaacatcaaataacactgcagttgctggtaatttagcactctgacgagcccgtccccattatgactaagaaagttcagtgttcatatctgcggagagagtgacaacaaacttaggccctcttttcatgtaataagacaataatagcagatagccaatgtcattaagtcttgctcttttgcaaccctgctccctgcctacccaagagtaatatgtggcttggaatcacttacactctgacctggcactgctgcatggagcacaatttctatgtgaaacactggaccaaaatgaaagcctgacccttcacctcatgagccctcataaaccatgtgggaaaagtctggcacagtgagctgccccacagcagcaaaaccagctgggataaggaggtgagcctggtgtggagagagctggctggggaccagctggcttgactccttcctggctctgcgtccagggacagggcagattctcagtttccacctgtgcaagtggggatgaaacggagctgctctgatgattaaatgaaactgtatacatcatggtgctctgtcaagtacaaaattgtattaatacctcaaaaataaataatacattaaaaaccgtggcctatgaaaaaaatccagagtttttggggaatagaaatatacgtggtatacttatttctcctttcagggaaggtattaaatccaccaaaaccaggatatttataaaaagatgatttctacgcattcatatattaaaaaataaaacttaaggtaacaggtttttgatataacattacaggcatatcagtagacagtagagggacagctttttggttttctaaaaattttaaataggccagtgctcaaagaaatgaccaacctggtgcagtttctaattctgaagtatctgaaacagtattttcttttttaaagaaatacatacatttaataacatttgaagctcattttcatttggcaccaacaactacctagaacataacccagaacctggaagtgaactcaaaaaggcctttgagcaccaaaaatagatgtaaaatctgtgcattaagctcatgcacactggctacagagagggtgtcaggccctccccgagagcctgcttaatgccaaggtcaaaggtatagagctagctctgtataccctgcactatgttcccacatcctagactttcacagcaatcctactaagggagcaggacaggttcttttcctgtgtacagagaggggtgaccgtggctccctgacatgaagtaggtttctattgtcatctgtagaatttggggtgggggaatggttagatcccacatgatagtaattgcattgttactatctcccaattgagaaaatacaaaataccaaaaagtcacagtaggcaagtcacattttccaatttattaatcacaatagcatctatatgcatcagaaaaaaaaacagttatgtgcttacgtcccaaacataatttcgtcagtacccattatgtgggtggagcatatgcagattctcacacattcgtgataaatgcccatcctaggcagggaagaagtacggctctaaatttcaggagccaagggcttgcttaaggccacatgcccagcttggggctagaagccaggtcgtttggttcctatgccaatattttttccattacctccaacaggtttggtgacttgattctgctgtcatgaagagatgggaacacgacattagaacaggagagagccactgcaggaaggggctggcataatgacaacagttcctaaccccaagaggaacagagaccaaccactgtgagaagatgcaaagcttttggaggcagaaagactccaaaggctctatcacttagtgattataggatttggggcaagttacttaacctccttgagcttgtttcctcatctacagaatggaaaaaatgccttgtgaagaacagagaaaatgcatgtaaaattccttgcatataacaggcacttaataaatggcagctagagttagaattttaactcaatgaacacagatacaaggagccttttaactggagcaaagagaattaaactctaagtagagcacctaagtgcatgtctgtgtttgaacacatttcatcacatttataataaccctgagggattaggaaggggttcagttggagagagagcagcacttggtagaagaaacgtgtgtctgggggtcagacacacctggttcaaatcccagcagcactacttctagccttgtgccacttggcagttggtttcctcagactcaattttctcatccactaaatggggagttgtcccaaagattaaatgtaggcctctggcctttagcagatgcttattaaaatgccagtgccattcattccccttcgtcctctactctatatcagaaggtatgggatgctatgatgtcttcctgttaaatttttgtccagaaaaaaaaaaaaacattttaagtatggtgttgaaatgggtaagttttagtcacttgggaaatgtatacacacatgatatctttattctccaataatgtgtgactcaggtaaacatttctaaaaacatgtgcacttatcagatactaaaatgcagtatcccgcaggcagcaggcactcaataaatgcttgctgcaaactgaacacatgaaaggagtgataatccaactctaaaaacaagccacttccacatgcataaagagtgcagtctttccttgaagtgaytgattctaaaccgagaagaaacttggaactgcaaaagcagaaatatactttttttcctattcaataaatcatcaagaaaggttaagtctgaagggtctgcattactcagtacagaaggtttctcagatttctcttttgacctggctgtaatagatgcacttcgaattagcaaaaattcatctgctctttctgactcatgaaataaacggatgaactttaatccatcctcctgtaactctcacagtctgccatgctccactctgccagagacacgtgtgtccttacacgctccacaagacaccagatatgtatcaacagagcaaggttctgtcacctagcccagtgatagatacccattaccaacacaaagatacctcagatcgatgatcatgacgtatcccagcaacacacggctcagagctccgacaggtgtctcctcccaaggcaggaccaaaggcacggggcactgtcatgctgaggggtcattcctgccccagcccagatccacctctggtctctggaaccacgtggggagtctgttgtggtctgcctgggtctcaaagcgttctcgccacctgccaaggttcactgattgagacaagcccaccattccctggtggcctgatcattcctgtgcgcatggtccatggtcacataaaaacagagatggggcactcagctatgataaatgggggaggtagtgtctgctttggtttagtggaaagatgtcagttgaacagagaaggtggaggatgagggctggaaggtgcagagtgaatgggcaggaggacaaggctctgcctgttaaccccaggacaggtgactggcaaccatttatggggcaaggcaatggcctaacagttgcatgcagacattacaacagaaaaggaacagtcaaacaaggaatatcctgcaaaactgctgaacctgtgatatttatctgcctcagaaaactgttaaaacacagaaatccacaggctcgccccctattatatggcctgctaatgtttactggcatttttcctagctagctgctcctaaacgtgctcttgcctctggctgcgaggttcgccattttgtcaagaaaacaaaacgcctgtctgtagctcagtgcacggacttcactcacaaacaccatctccatgaaaaagtamtaaaagtgaaatatagtttattaatattcatactgtctcccactgccagcagccataagtgttccatcattagaggagcaggctgcttgcrggccgattcccagggagccgtggtcctcgtcatcaaagtgaccatcacagtgggcggctcagaacggagggttaggcctcaccggaactgcacgactactgtgtggcccggggctgcctttcaccacccgctagttagacagccttgggggctcgccactccatctcttggggccaccatgaaatgggaaatggggctgagaacgccaacctgattgcctgacatcaatgctacatgggaaggaaacctctgtacttgagaatagaagtagatatatttaagcttgaggacattaaaaagttattcaagaggccaggggaaagcaaagaatcagaacaaatcagaactgctctacagaatggtttacaggacaaacagttcattaaaacccatataaacttccaagagtagaaagaacacacactcaagatgaaaatttaggaaaggaggatttacaatagttccaaaatataatctgccaaagatgttttggacaaattaccgaaaactatggaagaagcatgactcagggatgaaatggctacaaaaccacagttcagtgaaatcctgtcccacagcttaactgtgatcagagtgatttctgtctaattttctgcactggactctccttgggggaagggcctagttctgattcatcatagcacactgtcttgctcctaataggtgtccaataaatgtttcctgaattaaggggggaacaaaagtattaacaaatcaggatttgaggaagaacagacattctaatcaatgtttaagacttcggagaactggccagagggagaaaaagtgtgctgcagatgaacagaaggaaaccaaggcaaagagaatgtacccagaaagccattgataacgtgatgtttgttgaaggtcagtgattttgttgatagtagggtgggggatgcaactacgtaaatacacagtggtaagatgcagatttctttcttatataaaggcctgtgacaatgaaatataattatccatgtggcaaaccaggaatgggaagagaaaaaaagcagtcttggctgggcagggtggctcacatctataatcccagcgctttgggaggtggagacaggaggatcacttgaggccaggagtttgagacaagtctgggcatcatagtgagaccccccgccaccaatccctacaaaaaattttaaaaactagaaaggcacagtgacacacacctgtagccccagctactggggaggctgagggagggggatggcttaaggtcaggagtttgaggttgcagtgagctgcgagtgcaccactatactttagccagggtgactgaatgagaccctgcctcaaaaaaaaaaaaggtagaaaaagaaaaatgcagtcttttctgattagggaagatagttgatgataaaacaaaaccaaacccagatacttttcacttcctctaaatggcagcacaaagaaatggacataaaagtaaagggggcggggtgaaaagagtaaagggggaagagtcacacaggctgaaaggaacactcacatcttcctggcgtcaacactcagaggtgacacgtttcagagcattgcttcctcagagagatgaatgtttctgtgcatccccacaggccaggcactgcatgtgtggatttcatctaatccttaaaacttctataagacagcattatgatccccagtttaggggtcaggaagccgggatgcagaaagttaagtaacttgccaaggacacacgagggtagtcagttgcagaaatggaattttatttaggcttaccatctctaaagccaactataccacagactttagaattattgaaatatcatagacaaaatactccccctttcgcctcctccccgaccccctgccagggatcagtccttcttgtaagacagagagagcacccagaggcagctggcctggctttacctcctgcctcgctgtgcacactacacctgttcttcagataacaccaccacttccatcagggcaacgccgagctctgcttacacacaggtgcccaggggcctcagagagagctgcagtaaagctgctccttttctctccgagtgaaggagaaaacaaaatatttaccttactgtttcagcctacagccggaaaagtataaatcatcttcgcaaatctgcttttgtcaggatttataaaatcagctcctatggcgacgacacaaacacagctctcaaagatactctcattctacctggcatctctaacaatgctaggtcccacrtacaaataaaccaaaaagggcctgaatctcagttcctggtaaaaatctcatcccattcctacttagcctaaaggtttttttttttctgtttaaaaaataattaaacagaaaattaatttttttcccttttctgtttaaaaaataatttattgaggtgaatcacatgcgtaaaattagtctttttaaagtgaacaactcagtggcatttagtacattcatcactcataacgttgtacaaaccatcacgtctatctagttccaaaatattttcatcatttggaagtaaaatcccttatctattaagaatttatcctattatcccctcctcccagccaccaatatgcattctgtcttaatggaattttttatttttttttttttttttgagacggagtctcgctctgtcgcccagactggagtgcattggcacgatcttggctcactgcagcctccgcctcctaggctcaagtgattctcatgcctcagcctcctgaggattacaggtgcacgccaccacgcctggctagttttttgtatttttaagtagagacaaggtttcgttatgttggccaggctggtcttgaactcctggcctcaagtgatctgtccatcttggcctcccaaagcgctggagttacaggcatgagctactgcacctagccatcttaatggatttttctatgctgggtatttcatataaagagtatcatacgatacgtgtatgccttctttcacttagcatgatgttttgggtgtatgttcatgttgtagcatttatcagtacatttttccttttcgtggcgaaataatattccattgtatgtctataccaccatttgcatatacgttcatccactgatggacatttgggctgcttccaccatttggctgttgtaaacagtgttgctatgaacatgcatgtacaagtatttgttcgagtccttgtttgcacttcttttgggtgtatacctaggaatggaattgcagcaatcatatggcaattctatgcttacgtttttgacgaactgccaaactgttttctacagtggctgtgccattttacattcgtaccagcgatgtaagagcgttcctgaaaaagttattttaaacataatttatgaaacaaaaatcctgaaatgattttcattaacactgacctttgtagctcatgaaaggattgggcgatttatataacagctttccttcaacaggccctgtgaaatctctaatccttaccacccaccccgccaccatcaagtacagggaatatgttaatcaccagcacagacacccagaaaggttccagtctagctccttgaccaggactaacacccaggacacagctatagaacaaaagttccaaacctcaaaagttccatcaaatgcaaggaggcatatattataccacagattttacatgcagcaagaagttacagcagagaagagcagagtgcccaaagaaagatgaatagagaaatgaaacctgagtaggaccttgaaggacgggtataataaataataaaaacgacgacccacgcagagcacacagcaccacagctgccacgatccgaacaacctgcttgactgagggcggcccagccggctgccgacgcacagtagcttgggcagcaagaaccgtgagacagagatactggagagtggcacccgccatctctcccaccagcctggggcagtatctcatttccccagggccgcagggagtacatctcctgaaaaagatctcccttcctacttgctaggaaaggcgatgttgtcatgtttcattagaaacattcaatttctatggcaaaacaaactcagcaatcctcacgctgtgcaggcgaaatggaaagtatttaagtgtggtgagtctcgcttgctagatggaaaggaggataatgtgaatatgtataggctccctccccgcctcctctttatcacctggggaagaggaccatgcttaggccacatgtacctgccatccacagcctccaacccagcaagaagttacgttttgtccaggagaagtctcactaaggagcaggagagtgtaagcccctcaggtacaccctgctatcaggaggcaaggctgggcctgcagctggggagggtggagctggcataggtccctctgcaccaggcacaaggtggcctttcccatggcagaacccctcacccttcacctttggtgatcttaggagatgactgctgtccagctggcatggctgtcacctgcatccctcccattgacattctcagggtcaattccaggctgccccaggtctgaatccctcacagcactgggtcacaatctgcgcacgccaggggtgtgcggagtgaatgcacagatgtgccctcccgggaggcacaccctggaaaacatgcatgcttcctgtggctgcacactatgccacctttgtctggggcactgaatcattaattctggagcaggggcagtgctgctctgtgcagtggtgtcagcatcatcattgcctcggacagaatggagcagtgatgcagatatacgacgtctgtgctaaccaagcatgaggttcccaatgggacaggaaaacaaatcctcagtggcgctctctagagggcaggacacttgcctgtgcgaggtggggggaggggagggctgacgtgagactgctgaaatcagacgtgttttcaagggtgcctgaggccaggcctttctagaggagctgggggtttcctgctgtgcacaccacagcctggggaccctcaacacgcctgctttctgcaaggaatcatctggacagagtgggacacagaggctgtaccgttgtagtggtcaccaacatgtgggtgacctgaggccacgcactgaccacacagtgccctacgtgatggggacaataaggctgcaagagctacctcagagctatgatgacggtcacaaaaagccctttcctgcaaatactcagaaaacgtgagtcaccatcatcagcaacgacctgcttcaatacaaactcttatgtttagttcaaatagagagccatgcacccaacttcttaaatgggtatttcctttgtgtacatccacgctgtattttctgaaatctgcacgtttacagttaaccctcccactctggtcaatctataaatgatatttcctctcctcagttcatttctctcgtgaggctttctcagcagaattcccctcttggtccatgtgggactgagtctcgcaggcagcactgcggctcatttttctgaggccttcctgttcctatgatctcactcaaacggggtgtgcccagaagannnnnnnnnnnnnnnnnnnnnnnnnnnnnnnnnnnnnnnnnnnnnnnnnnnnnnnnnnnnnnnnnnnnnnnnnnnnnnnnnnnnnnnnnnnnnnnnnnnnnnnnnnnnnnnnnnnnnnnnnnnnnnnnnnnnnnnnnnnnnnnnnnnnnnnnnnnnnnnnnnnnnnnnnnnnnnnnnnnnnnnnnnnnnnnnnnnnnnnnnnnnnnnnnnnnnnnnnnnnnnnnnnnnnnnnnnnnnnnnnnnnnnnnnnnnnnnnnnnnnnnnnnnnnnnnnnnnnnnnnnnnnnnnnnnnnnnnnnnnnnnnnnnnnnnnnnnnnnnnnnnnnnnnnnnnnnnnnnnnnnnnnnnnnnnnnnnnnnnnnnnnnntgcaagggcagccccgatggaggaaggtaaagcagtgaaccggcatcactcccagaggctggaatttctcctctttgtgcccagtgtctaagtcgggtggtgtctggagattccctatctacttccaacgtgtccacctggattagtctgagaaccttagaaacacaaacagatagcgggaggagaagaacagggaaaagccagggacagagaggccacggtgagaaatagtaatgtatttatagtctcggctaactgcaggacgtgaagaggctgtgaggctagacatgaggcttaaaacttaccaagacctttcctgttcccaaagccctcacctagaacgtcggctctcatccagtgagctgtggcaaagtcatgtcggagaggtggtgagacttagcccaactcacatagctggcgggacgctgagacctacgtctctctgtctcattaccctagtctaagccaagggtggcaggccattcgtgttcaccgtacaaccagtggatacaatcagccttggttctctccccgggtttaagagccagacccagggcctaagaaatatatcatttctttggggatcaaatggataaatgaataagaagatggattatactaaacgcaaattatttagaggagggataaatctcttttggttatggcaaaggtagcacttgagtttcacaaggggaatggggcagaactgggtttggaggcctggaggcgggggaaggcagggaaggcaccttatgccaaaggcaccgtgcagactggaacggacggtgagcaggtcaggctgctgcagaggccacatcgggagagagtggcagaggggcaggctggggctacccagtaggacttcgaatcccagagcttctaatcccaggttagggatctggacgtgggagccaagcagggagcacacgaggagcagagaaagaagaacacgctttaggaggtgtcttttgagagcaaggaagggcagtccctcccagtgctgctccagactccagcagcgcaggccggggcacgagacagcggcgggagaggctgggcagcctgatcgtaagctcagttctgcaaatattggggcctcttgctgccaggagtggccctgaaaacccacatcttacactggctgctctgagctgcagaggacactgtggaaggacatttacaggctgtcgaccctcttatttcctccaaaaaaataagcaaatgcccctgtggagacagggaagcatcctggctctgagcccagcatgtggccttgggccacagcccagtcacgggggtgcatatcccgggtcgagctgctgggaccactccaggcacagggaccctcgccgaggcccagcacttagaatgaggatacgtaccccattacatccaggacaaaggaagttctctccctgggggctggggggagacctttcctgcaaagccagctgcttctctgtagtaagcttgaaaatgccctcaggagggagggttgccacaggggaaagctggttttgagataacgattacagggaaaaccatgatgtctcatgcatgggcatgcaggccatgggcgtaaataatcatgtcagaagcaaggggaggactcctgggcacacagaggacccctgggcacacggaggctggatcaacaaccccactcagccttcatcttctctctggacttgcaaagtcctgctatttcagccataatagtttgtcacttctctgtttctagtggtcagtccttaacttttggaggacaagttgatgagccacatacacaaaacagcacataaactaaagaaactgcatgctatcaatgcttcctccatcagcagctgtttacgccccagagttgttttcgtaggttcccctgtccggccgtttccagaaatgactggttaccctcctggccatcctgtgacaggatgaacaaacatatcttttttacccaaacacagcacaacaaaacaaaaacaggaagaaaaattaggcatggtacggcttatgggtttaatattatcaacaatttccctagaggtcattaggggtaaatagatttaaaatcattttgaaaatattttaaaaacggaaagttctatgaattttagcccatgtatagatttgtgtgaccaccaccacactgagaatacagaacagccacatcatcctaaaacctcccgctgctgctcagggtgaatgtttgactttcacaagtgcggacatcatctggctctcttggtgccagatctatttatattctgggggttcgtacttagtgcattttatttgccaatgtaagttctaatttacaaaaagaggaggacgagaaatccttcaggaggtcagaggatgacaaagaagtggcaccaacagtttgtcnnnnnnnnnnnnnnnnnnnnnnnnnnnnnnnnnnnnnnnnnnnnnnnnnnnnnnnnnnnnnnnnnnnnnnnnnnnnnnnnnnnnnnnnnnnnnnnnnnnnnnnnnnnnnnnnnnnnnnnnnnnnnnnnnnnnnnnnnnnnnnnnnnnnnnnnnnnnnnnnnnnnnnnnnnnnnnnnnnnnnnnnnnnnnnnnnnnnnnnnnnnnnnnnnnnnnnnnnnnnnnnnnnnnnnnnnnnnnnnnnnnnnnnnnnnnnnnnnnnnnnnnnnnnnnnnnnnnnnnnnnnnnnnnnnnnnnnnnnnnnnnnnnnnnnnnnnnnnnnnnnnnnnnnnnnnnnnnnnnnnnnnnnnnnnnnnnnnnnnnnnnnnnnnnnnnnnnnnnnnnnnnnnnnnnnnnnnnnnnnnnnnnnnnnnnnnnnnnnnnnnnnnnnnnnnnnnnnnnnnnnnnnnnnnnnnnnnnnnnnnnnnnnnnnnnnnnnnnnnnnnnnnnnnnnnnnnnnnnnnnnnnnnnnnnnnnnnnnnnnnnnnnnnnnnnnnnnnnnnnnnnnnnnnnnnnnnnnnnnnnnnnnnnnnnnnnnnnnnnnnnnnnnnnnnnnnnnnnnnnnnnnnnnnnnnnnnnnnnnnnnnnnnnnnnnnnnnnnnnnnnnnnnnnnnnnnnnnnnnnnnnnnnnnnnnnnnnnnnnnnnnnnnnnnnnnnnnnnnnnnnnnnnnnnnnnnnnnnnnnnnnnnnnnnnnnnnnnnnnnnnnnnnnnnnnnnnnnnnnnnnnnnnnnnnnnnnnnnnnnnnnnnnnnnnnnnnnnnnnnnnnnnnnnnnnnnnnnnnnnnnnnnnnnnnnnnnnnnnnnnnnnnnnnnnnnnnnnnnnnnnnnnnnnngatcctgcctcctccctctggactcaggaagaggtgtctcctctctccccaaatgctgggccctgtcccttcctggtgccagaggaaaccaactaaccacactcccaacatccaggcccttgttcctttgggacctagtgagtctgatatacgatgctgggcctccaggcgcctgtaagatgaaaaagaaatgattgggaatactggggatgcccagcttacaaatcatgaatgatgacaccaggccaaggaaaatgcatgctgtcacagaagcatggatctgggtggggaggctggggaaagcatggtgcttattcgtgacagagctgctgtgtgccaggcatggcagagggcgagttacacgcatgcggctatctcattcagtccctaccaacctcatcttctcttaaaagggaaaactactaccaactgctagtagtttcccccttttttttttttgagacggagtctcgctatgtcgcccaggctggagtgcagtggcgcaatctcggctcactgcaagctccgcctcctgggttcatgccattctcctgcctcagcctcctgagtagctgggactacaggcacccaccaacacgcccagctgattttttggtatttttagtagagacggtgtttcaccatgttagccaggatggtctggatctcctgacctcgtgatccgcccgcctcggcctcccaaagtgctgggattacaggtgtgaggaagttttctcttttaagaaaaaagaacaataagcctcagaaaggtttgggaacctgcctggagtcacacagctgtaaagtagcagatctggaattcaaatccagctctgtctgccagatgatagtaatgataatacaaataataacaaggatgaaaagattagtaaaaaaaaaaaaaaaaaagagcagctaacatttcctgagtgctcactatgtgccaggcacgggttgagcagctgacgattggccttactctctccaggaaggctttgttcatgcagctcttacgtacgaagacaaagttacaaggaacgtgagcagcatgtccacagagcctcaaaaacagaaaagcaggttggaggttacgaggccccggggatgatgctgtctttctatcctcaaggtgactcagccaggtcttgctgcatttggccccttctttatgctggggaagtcgcttctcattttctgcgaaggtataatgggacaagacagatgttggctgatttcagggaactgatctgttcgaagctgaatcagctgtctgcaggccttaaatataaacttcacacaggtggaaagacgagatgggaataagtgtttttggtgagatgtgtacgttccccaagaggcggaagcgggcggcccctgtgattcagggttcagagatgctagatgctgtggcccaggacttaggcagcagtgaaagttcctgcatgaaagatgacaagaaactgggcatgcgagggtttccggtgggtgacgagatgagctgagctacaaggcatgggatgccgctcatatcattcattaatgcatgcaggcattcggtcattcactcattccactgatgagccttaggaaatggtgtctgcaacatttaataagcattaagggagaaaacatgggacagagtaactgagctcaacctgcttctactgtttctggagcttgtatttcagctttcagcccctcccctgctctggaattctatctcagagcccagcctggctcccgcctgctcacacgggaggtagagatccccaactcctcgcaaacgtttagagctcaactgtgaattcttagcttgcattctcagatttgtctataaaggcattttccttttattctctttccatttacaaatgccacacatgtgattggtgggaaggacaaagagtgacgtcccagcacactgtgggtcacactttctctgattcggccacactgtggcctcagtcaggtgcaccttgcatcgctttgcttttctgcttcagagccacctctgaccctgctcaagcccactcagtcctggcacaagctctgcccaagcaaagccacaggggagttaacaccctggggagccctcaacccctgcgaccagagccccgcctttggcccttcccaggcacactcctggaggcctcgggcaggctcctcagaggtgggacggagccctgagtgtacagcagcccagaatcatggggcttactcctctcagcatcactctcccgattcccttaggcctgtgatcatctccyaaacaggcratctgcacccaagcccttgctcttggggaaattcgagacagttgcttctgtaacagcaccatctcaatctgtcccggaacaagggccacaagcccaatacccgcaaagccctgaggctccatccggcactggccgtgggtttgctggcttcaatcaccctccgtaagaccccgcaggggagattggtgagcgagagaagggtggccctgtctgcactgctgcgacgcagcgacctgctctcacagggcggcatcgaggactcagaacatgctagtggccctaaaagccaggggaactggcaaaatgattcaaggtgacaaactctgccttttcagtttaatgagagatgttcaagctgggagaccagggtgggccaggacagtgggggctggctgtctactcggggacagcctcttccatcgcagactggggacagatactgcagagccgagggcactcctactcacgtcctgaaacctcagcacaacacagtgtatggcacatcttcggaattcaaaaaattacctgttggatgcatacatgagagttacagctccaaacccagctgtggctacagggagagttcagcagctccttggcagtgagtgcgctatccatcgtaagtcatgcaggaaggaaggcacgttcatgtctcctctgctgttcacctttctattcccacccagtccaggcgttcccctcctaaccacccactgcttgccagttcaccaacccacatgacccctcctatggtaccccccaattattctggatctcttctgttgccacccctggggcataaagggtctgaccacaaggaatctgacaaacgggccctgcagaagggctctcaaccacttgggagacagacggacagctcaatgccaggctgtcatgccggccgcaccctctcacctccacagggtctacactacaccctggtgggctgacactctggagcccatgccatctaagcaacaattctcaaaggataataataaaataaataaagagggcaggaggaaactttcggaggtgatggatatgcctatggcataggctgtggtggtttcatgggtatatactcagccccgaacccatcaagtcatggatattaagtatgtacagctttctgtaagtaaatcatacctcaataaactgtgtgtgtgtttttaagaattagctgcagagcttgtccaaatgcatgtcacctggccccccacccccagagggcctgctcattaggtttgtttcggcaagtaccctgggtgatgatggggcaggagggtccttagatcccacttggaaaatgactggtctctaccttgagcccaagagtagttctggccctactgttctcaggttagagacatgtatttggcagctctgtggcaaggcagaaaactgggccaagtttccagggcgtgaacactgcgtctgcacctgggccctctgtctctggggacactggggtattttcatgtctttaagtgtgtgcgtgtgcccttgcatgtccaagcatgcttgctgcgtgtgccttgtgtctttcaccacatggtgggcgtgtgtgcattatcagtagctctgtatggagggctgagtgtcagcttcttggtcaccatggttctcataagcacacctgtgcctgcatgtcacacatgggcttaaactgtgtcgcctgagtctgtgtgtgtgcatgtgtgtgtgtgcacctgtgtgtgtgtgaagaggggactgcagtaccagggcagtatacacagagcattccagttcagttatttcatacttataattaaataataatacttattaagagaaattttaattgcaaagtattttaccatacagctgaaggtcccagagatgaataagggaaacttgaagataacctaacagcctacataacttattgattacttctcttcaaaagagaagctgcaacccgaaacgcatacatgtacgtatttataacagtctccctgggcaaatgaagttgtcggtgggttgaacagttcacttcatatcttcaagtgcaaactagaaccttctcctgttgtttctattagtaaaagacaaattaattttaaaagttcatgcctgcgatgcacttgctttcagagaccctcttttcaatcaaacctaacttctagtcactcactttctatatgctgtaatctgcacaagctatgcaatttttgaaatgacttatatttatggctttataaagctatgcccctttttgaaatgattgatatttccagcccagagcatggcattttagaatatgctctgttctctgttgatcaggggatcatggagggttcccagtttcagctaatgaggccaaggtcaacccacaggagagaaaactgctccctggccacagactgaaccaccaattctggccaaccgcctcataaacacaggcccaggtcataatgggatccagatggaggagtgtggacagtcacagctgacattctactgaccgtgactcaatggaacacagcttggggcagggctaggactggtgctaaggtctctggtttctcctttcagagcctatttctttatagcagtggtgggatttgaaactaggctctgaaagactggagcttcagaactgagccttagagacagcaaggtcattaaacaaaagaaagcaaaataaacaaaaagctattccctctaagtcaattctgcaatcaaagcatcggaaaagttaaatgcactaacaatgtccacattcatactatcggggggtagaaccccccattataatctagggcctcatcccttcattcctgagtaacaacagttgtctcctagcctctggctctcaaaacatccccacaacttttttttttctttgccattccaattgatttataccatcattaattttcattaaacttctcctttgttccagaatttacaatggctcccagctctggcactttggctcaacccaagcccctcaagcctgtattcaaaactctctattgtcaggcttcactcaccggattattattttccagtacaggccttcgactcccgccaggtgtcactgtctaaggagtcaccatcatttctcccatcttcccttatttattccagtctccatgacccctagacttccccatccctatctcatgttaacttccctgttaacccatctggcaaaatctttcactgacttttaatttcttgaactggctttgctcatcattgtttccctagagtctggcagaaggtaggttcacaataaatctctgttgaatgaccaaacatttaaaatattgaagcatcagaatgacagtcttggcagttggtttgtgttttccatctcctcaaagagactgtgaactctgcaagattagggatcatgccttaccctctgcactctggagcacatatctactacgggacactcagtaatgaatgtttgatgaattgaactgaaaattaatctccaccctgatatggtttggatctgtgtccctacccaaatctcatgttgaattgtgatctccaacgttggaggaggggcctggtgaaagatgactgagtcatgggggcacacttcccccttgctgttcttgtgattgtgagttctcacgagatttggttgtttaaaagcatgtagcacctaccccacctctctctttctccttctccagccatataagatgtgcctgcttccccttcaccttcctccatgattgtaagtttcctgaggcctcccagccatgcttcctatacaccccgcagaactgtgagtcaattaaacctttttttttttaataaattacccagtcataggtagctctttatggcaatgcaagaatggaataatacacacccccacctaaaaccaccatgaaatcaacttgaagacagtctttgcaccccaaagaatcagacaaaaaaaaaaggctgggcgtggtggctcacgcctgtaatcccagcactttgggaggccaaggcaggcggatcacaaggtcaggagattgagatcatcctggctaatacagtgaaaccccatctctactaaaaatacaaaaaaattagccaggcgtggtcatgggcgcctgtagtcccagctactcaggaggctgaagcagaagaatggggtgaacctgggaggcggagtttgcagtgagtcgagatcgcaccactgcactccagtctgggagacagagcaagactccgtctcaaaaaaaaaaggttagattattctgaaaaagtggattatttgctatttttcatgtcctaattttttatgttcaatttttgggtcctggtaacagtcctacgtgtttcaaaaaactctagacaagaatattttgaataatccagagtagaaaccaaaaaaaatctatatattttaatcactgattaccctttgcctgaatggcatgtctttttgtttgtgtttttttctgagagtggagtttaacatttggtcttatttgtagtttactggttctgctgataatggaaataccccagtaccaatttattgcttgctcaaaaaaaaaacaaaaaaactaaaaacaaacaaaatgaactggcatcaatgtagaattaaataacaaaagggcaggggcgcccaaggtgaagtaatacaagcaaggattacctgcaactctgttcttttgggtgtcaacacctgaaaggtgacaccattaagaaaatccctctgtccttcagaatagtgtttctcaaagactggtcctaagaccccctgcctggctcacctccagttctctgaggcaagtctctgttggtggtgggtgtggactttctcccagggtactcccagggagactctgttcccagcaacctctccaggagattcctgtgcacagtaaagcctgagaacctgggcagctgacagttaatgacataactgaccttcgaattggaagggaatacccctgcttcagactcgagaaaaaaacttaaaaagcagcctttgtttcctgaaaaacacaccagtgggcttgcctcacagaataccaacagccactgtggccaggcacatgcctgagagctggggaaaacagttggctccggggacaccacctccttttccaagtccccaaggcgaggataacatatccttgtctcacaccgtttctgtgtcactaggtggggacaatggtgggatgagacacttagcccagtcccatgcaaaatgacagagggacacataagtactctaccttttgaaagtcagatgtcctgggacgataatgtgcccagctcagatacagggggccgaggggagaaagtccccacccaccacctgcaggacaaaggccaacctgctgggaggctggatgcacagcatgcaatgactcctccagcccaggcggctcaaacacacagccattccctcacgatgcagatgcagctgaaagcatctgaaagcgtcttctttctgggacatgggccttaacgatggacaattaaagagcttttcttgccccctttctttcctataagaggcaaagccaccaggaaaatcaacttgataaacatggcctagagctggctgtcccacacagctgggacgaaaagagacagagcactagagactgtcctcgaaaaatcggatcgatctatatggtggcaaaccactgcagggctcagacaaggcctgagggagaaacagaacattgcaccaacttagaaatgaagcctcatttcaggcagaagagccgctgtctttcctgctgaccgtatttttggaaccagggctgggcacagggaggctgacatgagggcctgaaggtgaccacagaaaggagaaagaggccttcttgctcagaattttaggcaatggtgatttcaggggtgaaaagagggtactatcacaactaaacggagggtccttcagagggatgtggggacacaggggccagatgtgactgtgcctgtcacgaagtggggaaaagagggctcctgagggcccaggaaccgccagcaaaccagcctaccacacccaccagaggcgtccaaaaggcctgatctcacccacagaggggggcaggagaggatcgctgtgagtccaggtgaaggagtcagccctccccaaccctcacaggcaaacttttactgctgccgcaggcttcctgagctaggatccccgattttgcgacctgtctcctcagcactaggggcaccagcaccaggcaggaaagcaaagaaaaactcgcagagtccaaggggatgggcagggagggctccaggaagcgtcacatgggcaccagaaggcaagatgacaagggggtcttaagaatccccaattcagcttactcgattcaccaagtttcgctctaaggatgtgctgccttttaaacagagtttgtcgaagtctttttacaagtcgccatgctagctttcagtgaatgttaataacactggtacgtgttcatgatgcagcaattcagatgaactacataaaagccctagcagccaagtcaggggctgttcaccctgaattcaggccaagaactagaaagagccagcctttggcatgctgaatttaccaacctaaatacgaagtggcacagcagcctcccagagccagcacagcaccagctagcccccaatggggctggtacccgggacggccaccagagctggctttcagaggcccaggcactctctacagagaatatgtgctgtcggtaccgggcacccaaccctccagattcactcaaccattgcccatccttctcctctggagacaaggagaggcttcttgtcttccttggaggctcctgccctgggcttacttctccctgccattggctctggggccagcggggcacagagtggatggcctggtcaggacgagggagtggagagcaagtggaggggcagcagtagacccgtctgtccgcacggggcctggtggtgaaagcacaggcctgtggagacctttctgcgcataggaaatgagcgggaaaggaatcctcagggcagggcagagaagaggctcgcagagagctgttctaactcaggaaatgcctcctaaagggaagagggaagagacagaaacagcatgggtgaagaggcctcgaaacctcctgtgtgagtcaggattaggatgaaaggagacggggtggaaggtgggagggcatctggggatccgaacggaggggctgttgctctcccagggaaggagggcctggtgcccagcaggctgagggaggggctgggaggagacttgcaacagctctgcctgcagccaggatgggggcccggacagggagcaagaaggggaagctggcccaggtcagccccaggaatgggtgacaggtcagctgtgtcgacaaggccctggggcatgttccagccttctctctgtggccttgaaaggcgcatggagaaagcacacgggcaagcgagcgtgcttgcttgcaagcaggatggcctccggggaccccggtcttcctgcctacgtggcacgctcttaaatgtgcatccgtcccatcttctcatgggagtttcagttttgtttcttgtgacctctatctccactgcactgttcggcaccaccccaaacacacccccaggctggttccacagagcagggtcttgctttccatccctgccgcctccccgctgtgcacccgccatggccagccacggagtgacacacctaagccatgttacagccatgttacctcccagctgcccacgaggctggtgagaggatttctcccacttcatgggttaggaaatgaaggcatggagaaatcaggccattaggagaggagggaccaggttcactctggcctttcctgactccaaagccagcactccgatctcagctccatgtcggcagcggttccaatcctgactgcatacaggggtccctgaaaagcttccagataccccaggatggcaagggccctgtctatatccctatacctagcactgcggctggcacatattagaagtgaaatcaaagcttgttgaatgactgcatgtgtgagtccatgactgaacacacttccctgccacggacactatcattcctccctcatcctgacccaaagcctgaagtcaccttaccacaggagccacccagctggccccagactagtctctcccttcctccagcccttctgcacgtggatagacaaggaaccttctcggaacatccctttcaacccgttaccttatgttgttcaaggtttccagggcttgctctgggtttgaggatacagttgcaattccttgatctgatatttaagacccccagtgacctggttccaaccaggctttcactcacatctcccaccactcacaaactgttctggccaggcgggtgtccttcttgtctcctgtaaattcccactagtgtgactgcggactgtggatggcacatccctctctctccaccacctgtctggatcctacccatccrggaggacggaactcttctgctctgcaccccaggtcccagggagcccttccaacgctgaacacctgtgccacggatcttacctggctccgttctaatgtgacttctaattgacatcgcaatgtgcacatgtcctaatttcgtaagtacattaagatcacttgaaggcaggaactgtagacatataattttatctccccacagtgactaaggtggcacattctctgtgagtgccactgggcattcagcagctcctgtctccttgtggacggtcttacctgtaatatctggactgcaagtaggtggagcacacagccttggasacgtggctggctgaaccaaagtcgatgaccttgactctgtatggttgtctagatggatccaccagcatgatgttttctggtttgaggtcagcgtggataagacctaggcttttgagtttcatcagggctgtggctacctgctggagaactgggcgaatgtatttgagrggcaaggggctaaacttgttttgcttcagaaagtcatagaggttctgctccaacatctcgaagaccaagcacgtgtggttcttgtgctggaagcattcgtaggcccggacgaagttatagtcatcggcactctccgtgctcaaccgggccaggatgctcacttcaatctgaccttgtcgggcataggatgggtggttcttcaggatcttgatggctacgatctcattggtgccccgtttccagcacttgaccacttgcccaaacgtccctcggcccaagaactctaagacctcgtaggtgttggtcatggagcacagcacctcatgctgcaccagctgatagtcgccctcgctgttggagccgctgtttttggaggtggcagtagacgtggtggcagtggcgacagtggccccgcttgcattattctgaatcatgggtggatgctcctcgatgatctgcacgctgcttgtgttctcgatctcctcgctcttacgcttgagtccacatttttggtaggtatcaaggaggctcacagtgcttcgacgcattaggttgtgtggtccgccgaggacttgcccggtgacagaagtgctgcttgctgaggtgaccacgatgtgcccggtgcttcctgggaagacgatggtctgctcgtaaggtaggcttgggtttgggaccggcaaggaggtgctgacggttgtggtggctggctgcgacagggggatgttcttgctctggctatacactttgctgtgggagccgtacccagtcatgtcccagttggaactcggctctattttcagtttcttcacactacagaaggcacttgattgaagggtgtgaggggagaaaacttgcacatgtgaggccatacctacaaggaaaggaaaacgaaaagtaagtatcggagtcaccttggtacaagtaaactcaacagatccccttcagttctcatctgtggcttgggccatacagaatatattcctcccacttgaaaacaaggttgaaaaagtgaatctcttccacccagaagcacattctggtcactgagtttgtggaaccaagtggttccagggtgccacttgccaccattaggtgccagcaacacagctgagactcagaaacagaattccaatatcaggacataggtcaycatttttttttgtaaacattacttgtgacagaaatggattcttcctcagttctccctgggttgctttctactgaaactcaggaggctctgctgtcacgtacttcgttgcccacatcatcagctcagccttgtccacagaccctgtcaagtttactggtttgagaaaacatcttcccacacaggccccatcaccaggccactcaggatcttctggatcctggatgaaccctaattaccagctggcatctttgtcatcgattctgtagggtttagtggatcagcagttggtctgacgtttttcatttcaacagcataaaacattttatcagccttactggtggggactgggtagcacaattcatggctccattcactcacgcttcctgctaaattcatatatcaatacatttctctagaaagtactatttctttttgtttttttttgtttgtttgtttgtttttgttttgagaccgagtctcgctcttgtcacccaggctggagtgcaatggcatgatctcggctcactgccacctctgcctcccaggtttcaagccattctcctgcctcagcctccaaaggctgggattataggttcctgccaccacgcccgactaatttttgaatttttagtagggatggggtttcaccatgttggccagcctggtctcaaactcctgacctcaggtgatccacccgcctcagcctcccaaagtgctgggattacagacgtgagccaccgtgtctggccagaagtactattatttcataccaacatctcatccacaatttagataaacttagaaacctatgagaccgttattctggaacacttgtacaaattacggtgatactgaaacaaaaattcatagaaaatatattaagcaaaaataataaggtgatgaaggataactccttaaaggttaaaagagtaacaaacattgcccatcttctaagccactatcaacaaacatttctcacagaagcacaaggaagtgcagcttctgcaagccctgttgggggttggctaacctagtgttcctgtctctctgagcccctggcattacctagagtggtaatcctttccactccatcaaccatcaccctagtccaccttctctctcagtagatgacccaacttccactttgtccagaagcctgaggtcagccttactttcctcctttatttccttcttcatttcagaacattcctgaatctacatcatcctccatccttcattccttctctccagtctgagagaaagaggtgttgctcttttccaatactaaaaaagttcccgattctcatgatccatatttgtcccattttctcttgaacctgcttccaccactgttctttctcttgtagctttccatttctccctgtacttaattggatccaagtatttagtaggaacttaatatggctgtccaaatgaatcggtcacctcatctttttcttctgccttcatgtgcgtgcacacacaaactcccaacatggaaggcaaaaggagtaacagccgcattcccccctcttaattctttccctcctctcacctgtgatcaatggtttatgctcccttttcttcaatgcccacatcttaatccatctcccccaactcgttaatgcactataggctcctgttcttgaaggtaaatgacttcctaattgcctaatccaatggccttgtttcagcccgttcttcttaacctctgcaacatctgatactgctgaccacgacttccttcttgatgctcttctctggacttcagtgaatctgtaatctccccatcccgtgtctgattgcacactgtgtgctcgggtggttcctcttcctcctttattttattattattattttttgagacagagtcttgctctgtcgcccagactggagtgcagtggtgctatctcggctcactgcaacctccgcctcctgagtagctgggactacaggtgtgcgccaccacgcccagctaattttcatatttttagtagagacggggtttcatgttggccaggctggcctcaaactcctgatctcaagtgatccactcccctcagcctcccaaagtgctggtattacaggtgtgagccaccgcacccagccctcttcctcctttcaaatgttggcatttccaccgttttgactctgttctctctggcagctatcatccattcaagcagtttaagccgtcacctctgtgtaggtgacccccacatgtttatcacaggctgggctctccctcagaggttacagtgatatattgcagcctcctgctacaatgtcaaagatgcgcttccaaagctgaaccccttattttttcctaaaaatctagccatctcaccctctatcctaacatctccatgactgttctagtcacttggctccaaaactatgaactatgatggttcttctttacattcatagacaagaaggtgctaagccttattaatttctccttccttcaaaacatctcttgcatccaattctttatttctgctgttgctgccacttccacagtgaatgtatttatcactttctagaaggactaaagcaaatctagacatctcatctacctgagcactctgtctccctttaatttgcctatatttggctaccagattaatcttcctaaaacatctctgagcatgccactcccctctccaaacttccactggctccttactgtcaaggagataaagctgagaactcgatacatttacatgttgattccaactaccttgttagctccagctctactaaccttcctgggtccttaacttgaatgaagytggtctattcgctgtttctagaatgtctcttatacttcctaycttcacactcttacactattcctttacctggcatgcctttgctgcttttctcaacttatccaaagaccagccagcttagattccttctctttccagaccactctaacccagtgatcattcccaactcactgttcctacagcacttaccatatgtaccatctgacttcagctctgacttcctaggggcagttctgctaacatccagcacctgattggagccccacctccaccctgggcccatggatctgctggagggtgttcccttcttgcttcaatcctgagctccgacctccayctacgcactgtgactgcacgtctgtaggaatcctcgtgcctgacaagactattctggcttgcttattcagaatccgtacttcacccgtttcttcccactgttctttttgttcaagtcaacatcccccttattctaagtcaacatcccccttattctagaacaacacagaatatggctattccctatttatcagtatcaagtgaatatccatattgttctagatgttgtatacaatatagaaatgaccaattacttggctttcagtaacttagccactgaagagtcaaagcaaaacagccatttccttcatcctttcgtgtcaagcctgctgcttatttttcagtctttaagtacccggaagggggcggtcagagagagcgacagcagaaatacgctgttcatacataaagaaggtgaggtgctagtctctgttttcactgtttcaaaaagatcttggtggaaaggccgtccacggtgcagaagtggaattttacagaggggaagagggtggcttatgacttatttgttattgggatgacagccaagggtcataaaattgtggaaatcatcactggctgcctctgatgacagatgcccaggatcagacaggaggcctacatggctggaaacaccctgcaccacagccggctgcctcagactccggcctggcctggtgtggcccctgctgcccctttatgaagtcaacagccgctattccaatgactggacccaacgctcagtgcagacgtgttacctttgttctgtagcagaggccactttgcttcaggcagcaaaatgctccaacaagatatagttaaagtctttaacagtaatacttttttaaatccctgaaataccttcataaggaataagacactgctggtggttttgtagcttaatcttaaaataatcttatggcaacacacttatttccaaacatttctccttgagagtatttctctggaacaaaccttccctattagtttagctttcagagagttgagcccacaacgtattacttctctatttattcagatcctaaagtgagggacaataaagtgggggtgcagagggggactcaatgtttttttccacttgaaagtaaaagctaaatgtctcctctcatttctttctgtattgacctctggactagtcaaggctacttcccgcctcatttgtcaatatccttttcaggaaaaacagaggcttaatgcacattgtcagtttgatccaatggcaaaatctcaastgctttttaagttatctctgcacttcctagttggctcttgaaagagaaggcggattttactccttctaggtgasagaccagggggactactggacttgggagggcaagtttcgagcccatggggagcagtaagaggaacccaggaggtcacggtaggataaatctgccataaccacacctgctcctacaggaatgacctgacccagacttttccacaaaagccttagtggcctcccaagataaaacctgtcaaaatggccacattttcattcactaaaggacagggagtcaccataacctagaactaaagcttttaacaagtagcatgcctattaccataccactctgtctcataaacaggctgaagtcataaacactgaatctcagatatgcatggggttcttacatgcttgttaattacacagacacgagttcatgtggttgctacagaagtgataagtaaaaagcactgaagaacaaatttattaaaatttaaaacaacttctattacacaactatatataataaactcttcattgcatatgacaaatgaaaaatagcacctataaaactgacattaaaatatatgctatagttagaagaattaaagtccactatttgtaagacattattccttattaccataaagctgacaaagtctctcatgccgaaacaaatccaggttacccagacttagggtgcactttgatatgctaaaggcaatgagggttctgacccttcttttagttactttattgaaattctcattttgcatttataaaaagcatgtatgcaagtctgcatttcaaaatactatttttaaaacatctgccttctagccttaattatagatgccatttatgtctataaaatgctagacttgacttcatctgctattcctcaggattcttaaaacacttatgagtctccaggttttaaaatcttgagtactaagtacacagcaggctccaggacagatgttttatggannnnnnnnnnnnnnnnnnnnnnttcaattattcagagcaccctccctactttcattctcacaaaggtcctactttgaaaactgggaagtcatgtgatgggtttaagcttctgtgataagtgaaaaaaatcagaccctgaccccagaagttcaaacctagatctaaattcttttttttttttgggacaggatctcactctctgttgcccaggttggagtgcagtggtgcaatcatagctcattgcagcctcgaactcctgggctcacatgattctcctgcctcagcttcccaagtagctaggactataggagcataacaccatgcccggcttcaaacctatgtaattctatgcaccttttggtttctctttgtcttaatggtttaatgagaaattcattggtctggggctacaaataatgtaataataagaatatctaaaaatcttcatgatttcttgaagtcttaactcacacagttacggtttttttctttcttcttttttttttttttttgagacagagtttcactcttgtcacccaggctggagtgcaatgctgcaatcttggctcaccacaacctctgcctctcgagttcaagcgaatctcctgcctcagcctcccaagtagctgggattatagacgtgcgccaccacgcccagctaatatttgtatttttagtagagatggggtttcagcatgttggccaggctggtctcgaactcttgacctcaggtgatccacctgcctcggcttcccaaagtgctgggattacaggcgtgagccactgcacccagccaactcacacagttttttaaaaaatgacatttgttaagggactggctcatttagcatattttccccccactatttacttagtttcttcataactttatatttcacaattagatgaactgaaaagttgcttcatatctgagtaacatttcctttccatttcaccacccctaaataaattatctactggaagatcagactacaaggatgagtgagggttcaactacaataaaaaaaaataaattgaattcaatttcactgaattctagcaaagctcaagccctgattcccagggaggtgatctctaaaatagtggcaccaattttatcggtatgtaatatttaatttgggtttggcagatgtaaaacagattaccgctcagaatccagttatattattcaagagaatggaatcatgaacacctgattttaagaggtactaacttccttacttcctaaaatcttctggacacaagctctggctgaataatgagtacttaatagatnnnnnnnnnnnnnnnnnnnntaacaaaattatagaatatgtcaaaaatatatgaatgttggaaatatgcatctaaatggacatttttaaacacctagaaagggttaatctgtataacccctgagaaccctggatgacatggtgatctaatacctcagggggtcaaaaagtacttggaaagtttccttcattgacatactaaataatattcataaagttttaataatcctgcttattaagtttatatttcacaaggagtacacagataatttcaggttagcccattctaaatgatacatttccaaaacagtgtatactgaatgtccctggggcttttataccattttcaatcaatgtctgtttacccactagttgtgcaatgttaaatatatagtatattccaccagagcacagcttaggatcaaccacaagctctacagaattctttttttttattattattatactttaagttttagggtacatgtgcacaatgtgcaggttagttacatatgtatacatgtgccatgctggtgtgctgcacccattaactcgtcatttagcattaggtatatctcctaatgctatccctaccccctccccccaccccacaacagtccccagagtgtgatgttccccttcctgtgtccatgtgttctcactgttcaattcccatctatgagtgagaacatgcggtgtttggttttttgtccttgcgatagtctactgagaatgatgatttccaatttcatcttgcagcactattcacaatagcaaagacttggaaccaacccaaatgtccaacaatgatagactggattaagaaaatgtggcacatatacaccatggaatactatgcagccatacagaattcttttgtcaataatgacaataacaatactactgattgcagcactgggcatttgaaaaaaacaaaaaacatgaaataaaatcaatcatcaagtctgtattaagggtcctctacataaaaaaagattagggttgagcacaacaggaaacacaaagacatctaagacatcgtcaccgacctaaaggagcttagaatctcatggggattgccaagtacaatgcaaattaaaaaggacagctggtaattctaaggcaacataaacaacttgccaaagtaaacactagaagtttagaggcaggagtcactatgcattgtggtcaggcaaagtttcacagcagaactaagactcaagctgcaattagaaagatggggcagaaggctagtgctccaaatcctgcaaacagagtgtacttcagtccatcaggagagtgagactcatggcgggagcggccagcactgcggtctctgtactagaaagctcaggctttgcttggagacaactgaggtgcgtttgcatagtggcaatacaataacaaatgctaaagcaataaataaccaccagtatgcactgtgtatacaactacctagttatccagaattgtcatcttctgataacttctatcttctagaagtaatttctaaatactcagagagctggggggaagcccaaccatgagagctgctcatctaatttctcctttcgccttctctctcactggctgccatctaacacatcaacaagtggtaggtgactgtcctgattgcctttgctctctatatgtcagactccaggtgtttgctcgatacaacaaaactacagtgtttccctgttttagagatgagtaaatggagctataatttgtccaaagtcacttcgcctctgctagcagggctgggatttgaactgaggtctgcctgactcccaaatccatgccaccagccaaacttcttcattctttaggttctcagactacaatcaccaaacaacgagatgagtcccacaccagccaaaggaaaaatgagggctgataagtgaaggaagacagactgaaactacaggacgcacctgactatacgtcacctgataaaatagtggatgtcaacaacaatgaccctgagtcatctctcatttctgtgtcttctggttatgacatctgagaaatataaccataagaaatgattaaaataaaatacatttacctatttaaagaggtaaccactgcttatctgatgcatagggggtcagtgcagagaagtggccttgagtaagaagagccgggctaagggagcttgggcaagtgctcagccaatgggaaagctggtccagaggggtaagggggacccggactaaggaactgcctgagaaaacaggaagcagcagaaatataaaactctgcagaggagaaaaggtgagacatgctgacagatgagatgtgagagcaaaggaaagaggggactagaacacatttggggtgccagaaggagtggggctccacgagtgagaaggaagatgggaagtggagttgaagtgttgggggaggggagaatagaatctgttttcaacatgttgaattatgagcactaacgggatatctacgttgaaatgtccagtgttcagctattcatactgaaactctgaggcaagaaattgcttaatttactgaagtgtcaggagctaatggtctttcctaaccagcacccagttcctacttgctaggttgaattgtgaatgacgatcacccactttgaaaagggaatggaaatcaataggatgggctgggcctgcatgggattaactggaaggggaagagagcaaggtgaccctgaactagttcatgggtaaggccaaagacagagggacacagccaaaagaccagaaggccagaatgagaaatagcaaatgggaaaaagatctaaatcaaaggttcatgccccaaagggactaagagaatggtgctgctgacggtaagagcacaggccagctagaagggcttggtttggggcagattttgttttaggcattagtaacaacaaagaggaaatgttctatatgcaacaagaaaaaagccaggttagggaatgggcgcaaggtcatgggtggagatgtggacctgaaggctgtcatcaacacctcggtggaaatggagtccccgtgggtaaagctgtttcccaggagaaatgctgtagaaagtagagcagatggcaaatcaagtaatcctcgggggcagagacattgtcaaatagtatgaggaggacaatatgagtcacagggaaacatcaaggatgaaatgatgataaacacaattaagggattgatccaggagaatgaaaacagagaaagagtggcagagcctggctgggaatgagccaatagccctcttttcccacagggtcaggagcagggaaagaagggtgctctcctgggaagagaaccaaatgcaccatgtcacgcctcctgctcttccaagaaatgtggttctcttaagaacgttcaaaatcttttatgtcatctgccttgaatctgcaaatgctaccataggctgtgtttctttgattgagaaaacatccttttcctaacatttgcaaattctccacacatctatctacttattgactcattatttgtcagagttacatgttcagacttaattctctttctgcaagctgctaacttggccccaaataactccttttggtaactctgctatactgctttgaatgaagccatcaaccactgtgggtgagccagccttgccctgcagtgggtgagtacagacaacccataattgtttatctacaggacatggtgtcaagagctcataagcaatctgaaaattcccaatccaatccagtgctgaagcaaacactgataagacacaaacgctttttcagcttctttctccaggaaactgatgggatcaatgaaaagaaaataaaacaattcaaagaatcctttttgaaacaagagtggcattggctaattgttttggttagtaaattccatgagacagggtctcactgtcacccaggctggagtagagtggtgcaatcatagctcattgtaggctcaactttctgggctcaagagatcctcccacctcagtctcccaagtagctgggattacaggtgtgcgccatcatgcctgcctaatttatttttatttttttatagagacggggtctccctatgttgtccaggctggtctcgaactcctgggctcaagcgatcctcctgcctcacactctcaaggtgctgggattacaggtgtgagccactgtgcctggctgggttaagaaccttatttagaaaaacacaaaacaccactttctaaacatagcatatgaatctgccagggttggggtaccaaagcaccactgactgggcagcctaaacagcagacgctgtctcacagttcaagaagctggagtccaagaccaaggtgtcagcagggctggttccttctgagggctggaagggaagggtctgttctaggcctccctccttggctcactgatgactgtcttctctgtgtgtctcttcacatcatcttccctctgtgtgtatctgtgtccaaatttcccttttaataaggacatcagttgtattgggttagggcccaccctgatgacctcactttaacctgattccttctataaagtccctacctccaaataaagtcacattctgagatatggaaggttaggaatttaagatatgaatttggcaggggggaaacacaattcaacccataacaatagttttaaggaaaccaaaagcattttactaaagtataattttctcaggttaaataattaccatattccaaaagaagtctcttcggttttcccttcttggagataagacatttcactttgtgctttctctatatcttaccttaaaggacctataagttcatttcaattagtctaatatcatagctggaaacaagtaaaagcatactatctactttaaattaagctctgcatgagttgatgttacaacgcttctgaaaaaggccatataggaatgtatctctcaatctactgaggagcaactgtagtcactttggtataaaagagaattggagccaggttcagtggctcacacctgtaattccaatgctttgggaggccgcgatgggtggactgcttgagcccagaagttcaagaccaacctgggcaacatggtgaaatcctgtctctacaaaaaacaaaaaaaattagccaggtgtggtggtgcacacccatagtcccagctattcgggaggctgaggtgggaggatcacttgaagctgggaggtagaggttgcagcaagctgtgattgcaacactgcattccagcctgggtgacagagtagaccctgtctctgagagagagagagagagagagagagagagagagagagagagagagagagagagagagagaattgggagtggcttattaataacacaaaaactaggtttccagttttgattctgtgtgtgtctgaggcagaacctaagtaggccccaaaagccacctcaagartggctggcagtgggcggccaagttcaggccacccctcttcatgcccctcagcatcgaggaggagccccggcttggttcttcctcgtgtgccctctctcacctgccatccacattgttctgtttttcaacactgcattttctttccaatggaggatctcaagaagacaaccttttaaataaacgtggtgggatgaaaaaggcaaacacccacaaactatgaaaacaaaatcagctgtacttctggtttcaacccagaggaattccatttaaatccacattttttcaaagatctagaaggctgcttaccttgtccctgaaatgttctaaataaggacggttaaagtttcagcagtaccagttttcaggtgtttgaatcacaaacctttacgaaagaaagcaccttccctgaatttttcagccacttcctaacatgacataccaatgtccctccattcactactggttcaaaatcctcactgaccacctcaagagacaagtaaaccagacctgcagcagatactgaggaggccaggtgtgtgcctggcaacggaaggtaagcctcagatggacttttcctatcctttagaaatgtttggtaaagtctaaatcaagactaaaaatctggtaggctttttctcttctgagcaagagtgaatttgttagccttaaatgtctggtactatgttggtaaagtaaaatgatgcgttttactagccaaacacccatttccggcccagtccacagctgaggtgcctttttgagctacctcaggttctacttcagaaatgtttgtggcacacagaatcagaactggaaatctactctattctttcccattttggtgttcttgttaccatgtcactgcaattttttctctctttttttttttttggagacaaagtctcactctgtcgcccaggctggagtgcagtggtgagatctcggctcactgcaacctccacctcccaggttcaagcaattctcctgcctcagcctcccgagtagtggggattacaggcatgagccaacatgcccggctaatttttgtatttttagtagagatggggtttcaccatgttggccaggctggtctcaaactcctgacctctggtgatccacctgccttggcttcccaaagtgctaggattataggcatgagccatcgcacctggccctaattttcatttaaactaaaaactgtgtagattctattactatgtgtcctcccaaaagatatgttaagtcctaacccccagtacctgtgaatgtgatcttttttggaaatggggtcttttcagaggtaatcaagttacaataaattcattaaggtgagccgtaatcccatatgactggtgtccttgtaagaggagacacagacatacacacagagtgcgggccacacatcgacagaggcagagactggagcaatgcagctgtaacccaagggatgcccagcattgttgggagccatcagaagccgagagaaggcaagaaggggatttacctggagtcttcgagggaaygtggccctgccaactcctccaaaactgtgagagaagacatttctgttgttttaggccacctattaatagtttgtgttaatttgttacagtcaccctatgaaactagtaccctctgcaaaataagtcaggatgtatttcattgaaaaggcatgtctgtactcaagctatgataaagtatttataacaatcgcaaagtgacgctggccaaatggcaggttgccctctcagcctcccggcctgtgtctgtggcctcttggttaaaaagcaacagaagcatctacagctttactcccacgttttagtcttaattcctgccagggcactatacacctcctctccttatgcaaatatatttgttcattgtgattgaggtttgacttcaaaacaacaaaatttctaaggaaggcatctaaagttcgatctgttctcatcagtgacgtccacagttaagaggccacagacggcacttcctcaaacctgccttttctaaacctcaacttcttgctgagttatacaaaggaaccaggacaaagggccgccaaatgggttctgcgctcagtgcaacacctgtttgcacaccccttgtactcatgtttatgtatttctttgagcatttctctcacaggctgttctctaactgcaaagaaaactttgtgaaagatgttttgcagacacagtgatgccggggatgtgagatgcagataaccctttcccccaggctctctttaaatacaggattcatttcatccccttcttaaagcacaataatccatccttcttacttgatttaaatagcaactgctatttacaacaggagctccatgttacaactgttttgttccttggagaattgtttcattcccctcagttgcctttaactgacacctgactaaactcaattagggatcacttcgggaaaggtaccacctccacaactcgcagggagagggaagagcaggaagaaacgaaaggaagaaagctggagtgtggggaaagttggcacggatgctgagaggaaaaggaaaaagaaactaaagatgagaaaaaggtgagaaaagagaaggcaagtgaaattatattggagcacactaagaataataaagtagcattgtaatgtgctttgtaaactataaagcataataaaaatgcaatgtggtattatttgcaatatttaaataggtgcttttgtgtgtgtgtttgtggatatgaaaatcagctggtacagggatcccttggcagggcaaccagtggcccattctaagctgtgcaaattaaagtgggttctttggtctgttgcaaggacatttttctactgtgagtcactgtcatcaagccagtcctggcgttattacccaacaactccatggcacggagccacttacacccagtgctgggaggaggtgcccactcagataatactggttcttgtagcggggcgccttccccacgtacatctaagatgtctgatagctctcctatgtcttgctttaaaacagacaggatggcatttggtgatgtaggccatccctatcttcataggggtctgtattccaagagctaattttcagattgtttctgcattctcaacaactaggtcagatgccagtgctgccctttctagctctgtgatctcagcaagttacttaacccctttctgcctcaatcccctcatctctaaagtggagacagtaatcatatttcatagggtccttgtgaggagtaaatgaacatatatatatataactatatataacatatattatatatgacattatataacatataatatatataacatattatatatatatgtgtgtgtgtgtgtgtgtgtgtgtataaaatagtgagtccctgatatggtttggatcagtgtccccacccaaatcttaaattgtaatccccagtgttggaggtggggcctggtgggaggtgactggatcatgcgggtggtttctcaagaatggtttagcaccattcatcttggtactgtccttgcaacgggagtgagttttcttgtgagatctggtggcttaaaagtgtgtggcacctcccccctcactctctcttgctcctgctctggccatgtgaaaggctggctcctccttcaccttccaccatgactgtaagtttcctgaggcctccccagaaactgagcagatgctagcatcatgcttcttgtacagcctgcagaaccagaagccaattaaacctcttttctttataaattacccagactcaggtatttctttatagcaatgcaagaatggactaatacagtcctaaacaagcgtttagtgaaaactgaggggagggtggtcagctagctcccagaggcctagctaacacagaatagaatttactttcaaagcttctgcatctcttttccatgtaacattttaaccaaaagcactatccttggtcataactgagacccagtttctatgtacaatatgcttattgcagatttgtatctactgtataaacaatgatctcaacttttttgattaagcacttaatcaggggaaaagagaacactcctgatatatgtgatttttataattaaaaataatctatgttttactttccaatacagtattgttaaccaaaaacacaaatatagaaaaatttaaaggataaagtgagataaaatatacatattcaaattttcttctgtatcctaatacgttgtcttgcacccattactttgaaaagctgtgctgtaattcaggtaagctaagccatgtaacttagaattagtcttggccaaatgatccaccttggacaataagaagtacgcaagaagtagcattctcaggcaaaagcctttccggccagtgtgtgactcctctttcccttatattacggtaaccaaccatggtctggggaggagcagctcctttgcctggtcagtgaaagagggtaacaaagagcagagaccccagctgacccaagatgtggcgcaagtgtgaagcaaacctctgttgtttgttactgctgtacaacttaggccatcctaaccagtgctggaatattcgttaatgctgccatccctaatgagtcacaattaacgtggtttagtgtaattctattgtgaggcacagcatgctcacctagcaaaaccagagcacacgtttttaaagacaacgttaaaattccgaaatagttcagtccctttcttccatgttttagcatcacttccattccccaggagaatgcttcaggagatcaatgtgtcaaatgatgaaactactctcatcaccaccagtgttagtgatttcaagtgtgcacgtactaatcccccacctaataacttttctgaacaagtggaaggcacgggatcttcagtgacaaatgctctggtttggtttgcaaactttgacgcaaatcactctctggtgactaaaattggaagatgccctacaggagtctggcactgctgcatacaggcctaagtgcccccatgggagaatcagcttttaccctgggctgatgttttctctgggaaaaatggactttccacaccctgccccctaaatgcattcccatgctccatgacgccacggttgtgctcttggtaaagaatatttaagttctgacatcatgataaccatgggtattattcatggtaagctcacaagcctgggaaggcacattctgtactctctttatcactgaagtcagcaatggttttaaaaatagcatggctcacacacccaggggaccactgattcattaatggccaaatacacactactgtggactcctaacttgtatggtgttttagattgtgatttctagaatcaaggcacacacatttatcatttccctcataggagtgttatgctgtactaatttataaatagagatctgcagatcctaaatgaaggaaccctcaaaaattacaaaaccaggatttgacaagccgtatgatttgtgactccaaaatgacgtaaaatgtaattaatgagaatatctaccaacttggtataactatgatatgtcatacctaaataaagagagatgatgttacaaagataattgacactaatcttagtgaagtctagaagtaagtcataggtttttcactgtcgaggkgggaagggaatatttgattctagatatcccatgcaggttctttaagagaagtatcccatgagcagagaatgttttcatgatttataaatacatttagaagtacatgacgacttaagccttttgcttaaattctgtgctaaataagcaactttctcatctcttactgggattccagagaggaccttctgaccaaggagaaaataccttgatatgtaggcctagcttctctggatgctaggattatctctctttaaatgattcagattgatccatcagccttttatagaattagttagtatgaaccagtcttttagaacccaataatccttaaatttatggagtcaaatttccaaatctgctaggctgaggactgtagaggacagagtgagcagcatccaggaatatctgctgagcacctacgatgtccaagcaccaccccaagagtggcaggtgaccactggcattgtgaaagaaagggctacctgtttttcaggtcaacaggacgagatgggccaaggggagaagagataactgaccacagaaggaagtcgcaactgttgcccattgaacggtgcaggcttcagagagtggatggagtgctctcagagtcagcgacccctttacacacgagagtgcaccccaaggcgaagccaggggtgagctgaaacacagaggccagtgagcactgggttccagggacagatgagacccatttttatttaagattcataagccatccactgcctacaggacctgggatagtgtgcagatacaatacaaagcacaatatgaaaataagataaaacaggaccaaacccatctaagggaacatcaggaagaataaaaccatgcctgtggttgagggctctgcattgcagtgagtgacaaaagggtctggaaaggctggagtcagcgtggcaggtctttggtgcctagtttcgattttgttctgttgaggagtcacaggaggtggctgagaggggagggaggaatggtaccacttctgagtgggaaatgaaagcatgtggccaggggcttggcacccaccatgaaggcgcatctgagaggcgataggaacctgcagggaaggtgcagacaacaaactagagggatgacccaaagaccctggcactgacaggtaggaaaggaaccacgataatgtggaagccacaggatcaggtgacaggagaatgaagggaaggctggtcccctttggcgtccttgctgacttcaagtggcagaggaaggcatgacctggtagacagaggggccaatgccctgaagaagcattcaccagggcactgcaactctgtttccagaaggggctcgcacacaccagtgtcagggtggccaaggtgcttccctgagggaactcccacagcaggacgcggagagcacaccctcctggcacagatgccctctgctctgccctgattcccagggagggcatctccaaggccagagctgacctgaaacaaaatcagctctcaggcactcctaggagttactgtcctgggccaataccctttgttgaagctgggaggatgctatcgaataacataaaaacttaatgcctacgctggagctatggagtacaacaggaactacaatcctacaaaacacagcaacccttgcggaaccacaaaggccaatcaaagccatttacccaactagggtgcctcatgttacgcataagatattaacagagaatgtccgaatgtatgttttccttccaacggctggatgcagggaagctctctggttctttcactagcatcaagtatactcaatttactcctccaaacaagccacacaggcccagcgctaagagtcttccctgtcagttctcaaaaggtggtcaaggggtagaaactctgttgccatcttgcaccatacggctctcagcagctcgccttgtggtcctgaccttgccagccaagcccttttcattccgttttagttaagcagaaaatgaagctatcagctccatttccactctctctgcatgaattcatttcccttttccatcctggctcaaactacatggctcatatagtattcctaccgaggtcttaccttgctaaagattcttctcttctaagacttgctgaatccaaacaaaaaggtgggaggacgtatgaggatacattctaaggggcaacttgaaatataggaaaggatacaagaataataagcccgttgatttcttgtttcccagcttttacacccacaaaatcctaagaattattaagggatggggaatgtctatggaagtgaagtcagtgacccaggaatctgttttccatacctactcatgccatgaaatcccattaagtcaccagaaatcccctggaggataagctctaacaccagttagtgaaagaataaaaatcactgcaatttgctcattaccccagcttttcacccaaaccatggctgaaaatcgctagaagcccacctttctcctggactgcaggaaaatgagctgccaagggccctgcacatccggcctctgctacaccaggagtttggggccggaagctccccagtgccccattggtcctgggccgcatgaagtgattcagagctacagggtcacgactaagccataaaataagaaacaaagaacaaaatgagccttttcttagttgcaagctaaaatttggggaaagtgattagaaaaaagaaaaacagtgcggttgctgggaaggccaatttccttttactcacaggaaatcttttctgctgatttaagagcagagccacacctgctcacagaccaaatgtcagcacaggaggaagctgcaccttgagttattcaaccagtgacaaaagcattaaaacaattctgagctaaggaaattcaacctgggctccagggcccagacccgatccatctgcacatgagttagagaaaggattcgagtttatggaaagaaagggcataggaaaggcacaggctcaattcaagacttagcagtcctgttttatacatgttccctgagtacagaccagcagatctgggctcacaaacaagacccaagacctccattctaaaaggaatgagaactccaccgggtcaactgacaaaactggaatgtaaacagtggctcagataaaaatattgtatcagtgttacattctcttcagttgatctctgtaccatgtatgagagcgccctattcttgggaaacacacgctgaagcatcgggggtaacgcggagctgtccagaggagctctgtgtgctgctgaagaggttctgtagtctctattgtctgatgcagccacacatgtgtctatgcagcccttgaaaatgtggctggtgtgactgaggaactgaatgtaaagttttgtttagttttaatttaaatagctacttgtggctagtagctaccattctggatggtgccggaataaagcaccatgatatttgtaacttaccctcgagtcatataacgatcattcgtgtgtctgtatatacaaacacaccacaggcacacacacaacaaccaaaagagcaacagtgagagacagcacattcaagggcatgacaaaacaaatggggtgaagtgataacaggaaaatctggatatggggtataggggaggggaatctgggtataggggtagtctttgtactatttttatttttgcaattttttagtaacttggaaactatttccaaataaaatgtttttaaatgtataaggatgaacatttatttattaatcactgaaatctaccaggcaaaaagaggaactcatttccgggcagggaatggaacccaggatgtccaagacattggcaaattttgaatgaatattgtggaggccacaggacactcctctctgaacactgctcctccacacccatggcacagtgcttctcccacagtggcagaataaatgccctcgcccaagataaattttctgacttctttccatctgacctctagcctgtccatgaaggacttggctacaaaggtaagtttcgggcaagttttgtttttgaaacagggtttcactatgttgtccaggctcaaactcctgggatcaaatgatcctccttgccttagcctctctatttgctgggaccacaggtatatgccaccatccccagcagggcaatttttaaagtaacagctttatggacataacaactcacataccataaagttcacattttaaaaatgtacagttcaggccaggtgcagtggctcatgcctgtaatcccgcattttgggaggctgaggtgggcagatcacatgaggccaggagttcaagaccagcctggccaacatgacaaaacctcatctctactaaaaatacaaaaaatagcagggtgtggtggcacatgcctgtaatcccagctactcgggaggctgaggcaggagaattgcttgaaccctggaggcggaggttgcggtgagccaagattgtactgctgcactccagcctgggtgacagagtgagaccctctccaaaaaaaaaaaaaaggtatagttcagtggttttgaacacaattgtgtgaccatcactgctatctaatttcaaaatattatcatcactctgattatcagaaaccccatacccattagcagtcactccccattcccccttcccacagcccctggaaaccatgaatctctactttctatctctgcggacttgcctgttctagacatttcatataaatggtatcacacaatatgtatatgtccatctggcttcttttgcttaacataaaattttcaaggtttactcatgtggtagcatgtatcaacattccattcccttttattgccaaataatattcagtggactattactgcacactttgtgtatccacttgtcagcttatggacatttgggctgcttctccttttcgctgcgatgcaaccatgtggacacgtgtttttattcctctcgggtacatacctgggagtggaactgccaggtcaggtggcgactctatgtttaaccttttgaggacctgacacttgttttccaaagtggcctcctgaagtccccaggagtcatgcaaagtcccccagaggtcccaggcaaagcgcacagaaggcccttctgcagagatgctgcccttctgtccttcggtaaaataccagcctaaattcaaagcaggagtcagggtttgtttgatttgaggtaaataaattagagaagctgtgactcgctcagtgccagcagcatgcttagcctggtatcgccccggagaaagagccagcacctggcatggcagacgagggttggcacaatgcatgcttgcttgccagatgaagaggcgctctgtgcaaagtgcagctgcagcaggacgcaaactggtgctctctctaccgtccctcaccagggcaaagctgtctgtgctcctggtcaaagcctcggaggacttatttgctgtcatccacacactgtgctccggaaagtgcctgctcagaaactggcagggagaagacccggagggagtgaggaccatgagaaatcagagagcaactagacaaggaagatatcaaaagagacgggtccttcgaggcctgcacacctgttagtcctaatatatttcagagcaagggatcagactggtgcacacatgggctgaagcccagggaaggagccaagtccaccaccaatgcaactggtgagtcagtatcaggcatgtgtcccctccaagctggcagtaaacaaacactcacacttcatgtttgggcactggactaaattaccaggcaaaagtacaaattccggccaggcgcggtggctcatgcctataatcccagcactttgagaggctgagatgggcggatcacttgaggtcaggagttcaagaccagcctggccaacatggtgaaaccccacctctactaaaaatacgaaaattagccggacatggtggcaggtgcctgtcgtcccagctactcaggaggctgaggcaggagaactgcttgaaccctggaggcagaggctgcagtgagctgagatcgcgccactgcactccagcctgggtgagactctatctcaaaaatacaaagtacaaattccaaagctagttaagcaagcttgggggttggtgaagagttggtgaggaaaggaggatttctgcagagaagagcagaagtcctggaatggctggctctctctttcattcccttcacttttcatccatgtgtgcgccctggggagacactcggtttcatcttagagtcactgtgctgagcctcataggcctcttctttcactctggaccccatccttcgtatcgtcctgtcctcttgcaacatttcacttgtccttcacctttgccccctcgggacaaactttgttggcaggcctggcattatttttgtttttgaagatattgtatttcaaaagcaaactgctacatatttaataaagaaagctcaaccacagtttgacgcggtggggatgcagaagtggcaggcaggtagcttgagatcctgaatatgtcctaccagtgcacagcctgttccctcagcccccattaatctccacactctagcctgtcccacctttgttatttctccaattccgtgaacgttgatcagttcagtatagctctgaattttcacaggtaactcctcctgtctcctgtgcattcattttctcagtcactattcaataaatactcagtatgatcaccaccattcacgttttgttgtttgtaatatggttcgtcttttgaaatcatagataagtggcacagaacctggtatgatgaaaaatgtcagagaaaacaaagataagaacgtgaacttgatctttacatacactctctcatctaagcctcacggcaaccctgggaggtcattattatcatcctcaccttacagaagaaagagatccagagagactggcaggattcgctcccccaaggtcatgagctcgtaaaatcagaggacctgaattcaaacacatgtcagtatgaccctaatgcctttacattttccattaggaatgtaaatgacaacatctttaaaagtcataaacccttactcagccacgacatggttataaattgtagaaagaacaatggagtgggagttagaaaatttggcttcaagtctggctttgtgttgattttgagcaagtcacttaatatttctgaacacagatttcttcttccatgaaggaggccatgcttaccaaactgggctgagtgtcctgtgaggtgctaatatttattatgaaaaaagaagaaaaaaatgaggtcaaaacagtttaagaaatgctgggttaaatcaaataaagcggttttcttttttgcaggacttctcagaggctttaatatcgcagtgcacaccgtggatctccaagagggatatacaatatgctctgaagcccaaatttatttaccaaagggaaacttcttttttttttctccatacaaaacacttactcttttttgtcaggataggagattgaaaaataatggattggataatccccaaggaatcttttagctctaacaatgggtaattttctgatttatcttatcattccaaatggacagcagattttctgagggtagaatgtgcttttctatgaaatcaagaaaatagcagctaggtaggggcatgccagaatgttcagagaagcaaaaggagcatgaagactcatcatagacagctgttcctataaaagacttgcacatctaggggtatcttctcccctttaaaataagtcagcatcatccaaatgccattgggctggctttgtcttccaaaacaaatttcccgggcattaacagagactataaactgtcttgactgacttatgaggaacaatcaataacgtctgtccaggacccatcaaatccatgtctaaggaaaggccaagtctttaggacagaaacgtggcatggcagtttcacaaactagtggagatggctctctggaggacagtctaggtgggactcccaaggccttcactgctttgcaggcacctcttccccaggtgtgcaggaagagaccccagccaaagaaaacctaagaggctttgttggggaggaacaggggaccctgccggaccctgcaggtttccctttccctactggctgaaagggagggctgcacacatcagggaggagaaatagaggaagaagatgatgggcacaaaagcagaggggcaacaaagtacagatcacatcttgggggcacagggtacagttctcagaatagagaagaatgtccaggtcaaaggtttcctagaaaactcccttctctttaaaacagacacatgattttccttgggacatttttatatacaacttacaactgccagatcactcttggaaaatccgctgctcatcttggcagtggcagtggaaagaagccagtgtccttagacatatctctttgtgggccccagccccaacatgcaggtgtccatagcacaggacagaggactccatgcagccaaaaatcagtgcagttaccccctaagtcctccatctagaaaaaaatgagacttggtagtagccactgccctgtggattcagccagagcccatctctagaccccacctatccccctgctgttccaagttccagactggggctccaggatcaaaatggctcagggctttgtgctaagaagagctctgaacaagacataaggggatggtttaagactcaggatgctgaggattaagtgtctgggcagttagttccagaggtcacctaaaagactacagggttctgcgagagacctggaatgaggaactaacattgattgtatgcctatttaaaagccaggtacaacatccagagtatataaagaactcttacaactcaataataaaaacacaacctaattttttaaatgaatgaagaactgaatatacatttagccagagaagacatacaaatggtcaatatgcacaggatgatcattattaattattagggaaatgcaaatcaaaaacacaatgggataccaagaaaactgaaaacatatgtctacacaaaaccatgtccactaatgttcacaggaggattattcataacagccaaaaagtggaaaccacctgcatgtccatcaagtgattaacagataagcaaaatgtggtatattcctaccgtgaaacactatttggcaatacaaagcaatgaagaaccgatacctgctacaacatggatgaacctcaaaaacatcatgctaagcaaaagaagccagacacaaaagatcacacattgtctgattccatttcaatgaaatgtccaggacaggcaaacccatagagacagaaaatagattagtggttgccaggggctagaaggagaagcgaatagggagtgagttaacaggaatgggatttccttttgggatgatggaatgttctggaattggacagtggtgcctgatgtacaacttagtgaacaggctaaaagctgatgagctgtacacttcaaaaaagtgaactttccggtatgtgagttatatctcaataaagccattttaaaaatagtcacaaaagtagatgcctgatacatattctcacccaccggacctgaaatacatatcatcatcccattttacagatgaggaaacttgaggactggtgaaaagcagctaattgccaagaggcccgctgcgaagccacgtgacggacttacggcaagtggattttaactaggtttgctgactccggaggccacgttctgctcgcttcaccacgctgctccctgccaagatgataagctaaccagcaactgcagaacggttcctctggaaaaaagatcactccctggacaaaggatcactgacctacataaaatgctagtgctggaagtcacgttaagcggcatctcgccaaatcccttcatttcacagatgaataagtagagtttcaaggcactgtactgacctgtccaaccaaagcagcaaggctggtgggcacagtcaccctctcattttacagaagacaagctggcgtattgttcactgcaattagttaggaatcaaaaggtagaaggagttcacccggttggggcatgcaggtcaacaggcattcaccaaccttcaaacatgccagcctcacatccaggtcccagctagaagatcactcgggccagttatagctcacattattctgcggttaccctgaaatttctcttctaaccctaggagtgctctgaaaagtcccaccagggtgcgactgttccaaggatcccttggagcttttgaactacttagcaggaatgaggagttctggatttagcattcaagtgtgaggataaaggctagggagactgaggaagcaactatcctccccccgagtctaaagtgactccatggggaaccacttgagaaggaaagggaaggaagctgaagccggattatttcacactgcaaccgcagggcctcgaggactctaagttgggggtctttttattgcctgcttaatgtctccagggaatgtcctgtctcaaacttaaaatgtcccaaatggagctcattaccccactgttctccatcccacaaatctgttcctcctcttgttttctctttcccccaggactatcattcgcattccccagtggctgaggctaagcaccctggctcaccttccacacccccctcaccccccaacttccaggcagtggccaggcctgctggctcgagctctgcctccacttgccggctggaatcacctcctcctctgcatgctcactgcaagcattgtcctggggactcagtaaatgtttactgaattgagaggtcaatcctacccactactagttaagtctttcacagcaagtagcagccacgattatttcaacacagaaaaggagaaaaagaggagctggatgacctcgtgtaaataggtgacagagaggttattaaagcaaagctcgagccaggaggagcagagcagatggggctgtgagccactctttgcacgcatcctgctggaacagaaaggcacaccaagacaccagggctaccaactgcatctgcaaattattcattatttcagtgcagtccctctgaactctccatctgctgatggctactacagtcaaataattacattcaaataaaaaaacctgtgacctggaacttgttccagtcagcccaagtgagacacccactgtcccccagccgggccttgtgcacccctgtgtggggcaacctcgagcttgctccctagccacctttccaaatcaagaccatccttcaaaccccagatcaaatgatgcatcccttgtcactggggacctcagggttttctctttgggcctaacagtgctcatcacgtattaccctgcatcgcttgatgtcttttgttgcttggtttaatcttgcctgcaatgagtttaagagtgcttggaaaagacagcgactgtgctgaagtggctaatgtatgtaaagtattaagctcagaactgggcttggcacactgtaggcactaccaatataagcatcagctactgactacttattgatgtcccctgagtccccaagcatgatgctgcacatgtggcacaagctaccaaatctgctggaggttgacaacaggtttctcgcacctcttttatcttcctaacctctactcaaactaaaactcctgccctccaattcaatgccaggaattccatctgcacatccaccaacctcaccactcagtcaggtggctcagctccttccttctaggctatcccttcactgttcagagtccagtcggccaaggtgacgtgggccaggggagaggcaggctgtagcctgacatagygtgtctctgcctcacacccctcgcttgtctcggggttagagatattataagacttggtgaaccatttgtttctttctgaaatcagaatgataactaagtagagctagaaaaagaggcaatttttaaattataccacgcaytgagccaaagccgctggtgatacaatgacaacactcatttgtccagggctggccaaatcagtcacagggaccccttttcggtgtgaaactgcaccaaatactgcccagttggggttccatctcagattctgagatgtcccatgtgactactctccaaacggcatcctctggtcacactccctgcagcagccatcaattcaggggctggaggcagggtggcaactgtgaagaacgcagaggtggctgagcctcagtagcttttgacaggcatctgcaatcaataagtctagtatgacagactcaggggaaaccctcctagcttcggagaaggtggtctgcatctggacgttcccaccttcctagcgttgggactagcggcccctctgggtacatcaagggccggcacttgaaacctgcaaagaaacatctcggtctgcccatatccagagacccagcttcctggcttttcttcaagtatcttaatctaccccatctctatcgagcactaaaccagtcgaagatactttgggatcagagaaggaacggcagacaaagcctcacattamgcatctctttagtaaagcatccagaaaattctgcctgtgttacttcacttttactcccacctaggcccctgtggctgaggacaagaccacacacaagggcactagccaagccagggtgacccatcagccccagccctcctgtggcctccactggatatccaggcacccccggtttttcccttgggtcccatcccaccactattctggtgatctggagccatactgaccaacacatagaattagctagcgggcacaagtggctatttaaatttaaattaattaaaataaaacattgagttcctcggccccactggccacatttcaagtgcttactggtcacgtggcaagtagctactgtgggagagagggtggaccgagagagacatcagtacggaaagctctatcaggcagagctgttctagatggtgacatttaaacttgcaggtggccaatttttttttttaactgtcactttgtggtcttgaagaaaatatttttccaacctgaaaggacaaaattgctttctctaaaaaactcagtgagggaaaaggtcacctccacgcaatgaccttcacagaacacccgtgttcttcggaagctggtctgcccatctgagccgcttctctgctttctatgacacttttggaaccctcagccctacatccagactcccacgctccgatggaaactttaaccaaagcataggaggggctctagcttttcttctggaatttgtaagtcactgtttttccatgggccctacgttactttatttggcctagtataacacagcaccacaagctggggggcataatcaacacaatttattatctcacagttctggaggccagaagttcaagatcacggtgtcgacagggccggctccctccgaggctgtgagggacggtgtgttccatgcctctctcctagtttccggtgggcgctggcaatctttgctgttccttggcttctatgcctattaacccagtctctgctttcgtgctcatgagccatggtccctgtgggcgtgtctgtgtctgaatttccccttcctatgaggacactagtcatactagactaggggcccaccctactttagtgggacctcatcttaactagccacatctgcaatgaccctatttccaaataaggtcacatgctgaagtactgggggttaggacttcaacatgtgagtggggagggggacacaaaattcatcccctgacaggccctcaaagcctcaaagaaaaagcactcctcctggcccaccatctgccttccatttttctattaatatgaaaagatttgtaagaaattactggctactcagctttgtgggagcagctggtgaccccaggcagaagctaacaccacatgaggctatttccatgatacaccaagtcattcaagcccactatcctcgatttaacaaggtccaagaacaaaaacctgaccttgaatacagtgtgaaggaaaaactgtcacaattgtcatggtcacaagtagagtgctggggagttcctccaagttcatcaaaccgccttcttttacagggatgttctctgggtgatgtggcaaaaacaaatgaagaaagtccctcctgacccagactccttarcatactgctggacggtcactgtcatcatacaaatcactgccaagctcatcagacgtgattgtcatgaacagaaagctatccaccagcacagtggacccagaaaggtgctgtggttcatggcccacatcacgtgtctgggttataagacacaggtgaattacctatgaattcaggcagcatggaacagaaaaaaccaataagctttagtgctagaaaacctggcttgaatcctagctttgacacttaatagataaaagatcttgcacaagtgaatttgtctctctatgcctcagtttaccctgctggaaaatgcagagcctgagatctacttcacatcaggctaagaaagctctctggatggccatcactgtgttaactagcatttactgggcgtggatgacgtgttcacggcagctcccaacaggtctgaggtaagacgccgctattatcctcgtttgctgggagaagactcgggcttagagcctctgattacacagctgcactctaaccatttcctaatactgcctctcaaaggaggtcagcaggtgaaatagtggcaggctctataaatgcttgttccctgcaccctcctctggtatccgccacgccgcacaacagttcatactgtcctggcactgtccactcccaacatcttcacaaggacagaagatcatcaaaagtggtttagaggaaataacacctctgccaggacacagtcattccctcatttgatatttcccctaactctcttccctaacctcttcccacataacattcctgacagctgggagaacatcgctgaccgctctccaacctcccgtccagacctgcctctgtctatctgctccttctcaccctctgttcatcccctggagacattaatacagaaaccaactgtctggcttctgacctccatactcttttaaaattgcagtataaagatgacggtgtccctgggtaaatggtggtgtcttggttatggcctcatggttttagcagttaggctttgtcccttggagtggttaaataaagacagacattagcacagttttccacccaattatcctatttacaaaaatagaactctcctctgtgagcattttaaatagaggccttaatttccacagatgtcaaccttaccaggtcgattcctaaagcctcaattgatgagctagaatacagcatggtgggcaatggaatctaccctcaaatgatctcttcctatatatatagtattttggatgtatacatctattcataaatatacagatatatttacacacataggcacacacatgcgtgaacacgccagttaaaaaaaagtaatagtcttgaaggttgtctgataggcacgtagactggcagttctgctgagtgttttgggtctttgtgttscatcaaaccagtagaaggataagaagaagtactcagacctgttattttggccttccagggaataacatttgctgagttgcattttcatgttaggccttgagcttccaatgaggactgctgtgagaagagctgtaagaacccagtttttcatctgttgtggggatgccaaacaccctgttcatgatacctctcagtgcttcctagataaaagtccacatgcaaaatttagttgaaaagaactaaaaaaatctttgctcctcttgaggacctggtgcaccttccttctctgacagcaagaatgaccgcagcgaccacatttgccttttctctttgatgttatgaagctcagctaagtagcaatgtaagggacttattgtctgcatatctgtaattctttttcttcctaactttgaacttctatatttatttgtatttatcctgatcctgtcctaaattcttttatgtatcatatggtttattgcagtatacgtatttatactataaaatcaatcaaaagttgtaaaacaaggtgaattacaaataatcaaatagaacttaattaaaataattaccatagtaaacacagccaaatttagagaatagtatagttaaaaaacacwacaatcagagtgaaacatttaaaaaaaaatgaacatgttgaagcagacactgtaagttgccttcctaatagccattccctctttctcttctggagagacaggatttagtttagatgtcactctccccaccaccacctccaaccaccttccacctcccctttgtgtgactcaagaaccaatcctggctagtctaagctaattgtttgctgtgcctgggagtgaatgatctgggctaggcatgttacccagttatagcctataagaaggggagagagaacagctgggacctttggggaaggttcccttatttgatgaatgatttggagggagggagggagggagggagggagggatggatggwtggatggttggatggatagatggatggatggatggatggatggatggatggatggatggacaaacatatttctgctgggccaaccatgcacacaaaccatcacttagtgctaggcactaaactgcatgcattgagagatatgagagtaaataattaatgactaagggcttgagaaggcagatgccataagaatcacaatcttcttcagaagacaccccaaagatagaccttccagattctcccagggatcatgttaatctctgagaaacatgttgagaaattctatgtaagtaccaaatttataatcactacatacaaatagctcttgctctcccacaaagatcacagaaggaaggaaggatgggaggaagggaagaagagagaaagggaagaagaaaaggagggaggaaggcaggccaaccagaaaagtttactgcccctttccaaagtatactttgtatattctctggattaggtagaattgcttccatattcaaaatcaattgtaactgctctcaggccactcacaaccttgcttttctctaaataccttttctctaagagacaccagccatgcatgtgcctgtgtgcacacacatgctcagaagctatttcaaatggtctccaacctcctcagccccccaccccacaggggcagctcctttgctagaaaagggactgaagtccaagctgtttgctgcatccactggctccagtgtcccccagacacctgtcatcgcccaccctgggagctcttctccactccccaaactatcttgttcacagcaaaataaaatactattcttttccactctaataagatgccctctgtccggccgtgcagagtctgtctcgtggtttatcactactcaacgtgtctgcatgtgattttctccctcacctctcccccttctgcaccaaatcatgcccacctcccttctgaactgctggaaaccaaaatcttcctgaaagcaccccaagctaacttatggggttaggatcaccacacccaggattcyctcagtcctcctatctttagacttcttttctttttgaggacacgattctccaaagttaacttctataaagcaaatcctatttctcactgacccatattttaccaaacagctggcactgcttttttcacagctgaaaaaaaaaaaaaaaagaaaaagagaaagaaaactctgctgaagcacatggagaaccggccacacagccctgctgaagcatgagggattttccttcccaggactttccaggctcaaaattcctgaacttcccacattagtcaaatgctgctgctacgggctggacttctgcacattagatgtcatcgtaaagagaatctaggtgacaaacgaggcagaaatgagcacaagtttgtccccaccactgggaaatcaattcccagtgcacatcccacaagagggtggtctaggtaggcttgggcaagcacaggtatgcctctgtcccaaggttctcctgtccctctttacagtagtcagatgggcatggttgttttctattccattcttggctgaaccagtgggcacagggctttgcacacagtgggccccccagtgctgctgagagactgacttctgagagggaggtgatggagactgaggctgcctccgcagaacagagggcagctgcattaccaggcatgccctctgagaggcctctgctttaagctgagtggcaggtaataaaaacccaggttccaaaggagcttaatcgagggtgctggcgtggcagctgaactggagatcagaggggaccagcaaccacgggagccttcctacatgtcacaccattccttgggaccagcagtgactctctaaggatgaaccacaccatcgcacacatctgaagctgggagtggacgaggagaagggggaaatcttcatggagaaagacaccaaatgtcatgagtcataaagcaaattctgacttggaaccatcgagggagattatctttcagctcagagtgcatttttttccagcaagatacaaaaagcttcatggatcatagtaaccagcttgcctgttattgagttgagcacagtagggaaaatgcaaaggtaaagtgtatgcttgcagagtggctctgaacacttctgaaaatgatcactcaagggctggagggccaagggagcgtctctgcgagggcaggcgtgcatacacaccagcggcccccagccaacgccctgacccagtacacataggcagcaaaggaggtgagcctttccctttaattatgccaattgtgagatggggaaggcgccagtggagaaggcatttaaagcagattgccccatttagggagatatgatacttggaaatgaagactggcacttttcctagactaaaggttgtgctgaatggccagagagcaggagggcagcagccctgcctgtggggcttccacctgacttcaaagacgggcgccacgctggagccagtgcacaacacaaagggaagcgggggctcgaggccccaggctgctatctgctccaatttaggggacagtcctgcttctttccaagagacaccctttggaagtggggagaaagtagctaaacaggcctgaatgggagggctagaaagaggagatactgcacctcaggccttgccctttaatttcagagccattttaagcataaatatcgtatctaagtctccgatagaaggagcacaaatggtaggcgctcaattaatgtcatctcacttttgagtcagagaaacatcttcactttgcattactgctgaacagaactgagggccatcaagaccactttgtggaggccataaggaaaagacctagaaacgcatgcttcagacacattccaccacatcagggctgaaacgagcagcaggaagatgtctgtgcacagagcaagaaagctggttccaccaaagccaggttagaatatagatacatgtacatgtatatacacatagaaaagctaagtgtgtgagagagacagagagtgtgtgtgtgcagtatgttaactaaacctcttacaaaagtcattaaaattttctaaaaattaaattctgaacaataattagtttgtgaaaccaacagaacaaagtgctaagagcctgagaaaacaccatctcttctttacatagatcactgaggacttgataagaaacttcctctgtcacacagcagcctccgtgggcagtgggaggggagctgaaggggagagaaggagagacgatgatggaattcgaaagctaggaggggcttccaatacgttctcttgctatggaggacacaggtgatacggcttcttggagatcacacagcgagtctctgattctctgactacagcctggatggttcatacggatgataccaccacggcacagagatctccataagtactttaaaaacaacatgcattgggtgatctttctgttcggatactgactctcagggaagacggcctcacttccrgcatgggggggawgcacatcctsgtcagtttaactcagccagggctcatcttcttcctgttgtcaatgacttgacttaggcactggcacacaccatcagcctggtcaacgaggtgtgaagggaggtctgcaggaagcttctggaaaaggttttcttgctttaaagagatgctctttttcccatggacactgttgagttggatgtgatgcctagaactgtggcagccatcagaccgacataccacaaaccatggggcagaaatacagaaagaacatcagttttttacaaccaaccctggagctgatgacctcagaacttcttgttaaccagtcagtcagttttcccttttgtttatacactttgtgttggtttctgtcccttgaagctaaaagcatcttaaccaataatctactaataaacagaccatgaaacaaaaaacaatttgttttctaccatcctactctctctgaagagaaacaaggtctcctgagctgacggggaaaatccccacctaactctttttccctgcttcttccttttytctccctcaatggaactgtaaacacgctcagaactaccagcctctctgagaagaagccttaaagatgctctggtcccacatccatgttctgttggatgccagtctccggcagtcccttcacaaggcactcatctggaatacctccagtaccagagaaatcgcaggccccatggatgtccacatgtggagggcttcggtacggtgtccttccttagggcctggtgggaatctgcctcctgtggctttccagccattgattcgagttgcaccacagctaccttctattatccatctgcccttcagatactgcttctgtatcatacagcttaattctcaattattataattcctttcagacaaatgttttcttacaggaaatgcatattcttctgagccatgttctaccttccccatctctcaggctcagacagttagagaaatcagtctgtcccatttaaccaatgaacgaatgaatcagtcaaccaatcaatctccctctgtctttttcctatccccaacccaaacacgtctaataatataagggtaataataatcttaacagtcacatattttgaaagaaaattggggcaatataaaaatccaatattgtcaatctcaaaatccttggatagtgtccaaaagtctcctgcaaacacacacgatctgatttaattaaaatacctttcttcaaacactgacattaaagagaaatatttcttcttcaatattatttttctgatatttaattatttcccttttcctaaaaagtatatgtatttcagctgtgttctctctcactctttttaaaaattactagactttatttagtttttgtttgtttgtttgtttgtttttttgagacggagtctcgctctgtcacccaggctggagtgcagtggtgcaatcttggctcactgcaacctctgcctcccgggttcaagcaactctcctgtctcagccttccaagcagctgggactacaggcgcatgccaccatgcctggctaatttttgtacttttagtagagatggggtttcaccatattggtcaggctggtctcaaactcctgacttcaggtgatccacctgcctcagcctcccaaggtgctgggattacaagcatgagccaccgcatccagtcagactttatttttgtagagcagttttagtctcacaacaaaattgagtggaaggtacagggagttcccatacacaccgcctgctctcacgcatgcatcaactatactctcccatatctcctttaaggcaagcttgagacccaaatcttagctgatagcactttattgttaactgtgatgtgtccacacaactagcttacaaaagaggttctggaacacagcccttggtaaacctagaacttgtaaaatacatatgaactgatccatctcattcaaaactcccttttcccaggcccagaactttacctaatttctcacctctatcttatacatattactaagtagttttcaataacaattagaatctagagctaaaaatcatcctcctgaaaagatgagacacagacacttagacatatgtaccagcaactctcaatcattcgttttaatgtaagaaaaaggaatattgaccagcacaaaccacatatcagtcaaaactgcttttaccaggctttcccggaggaaaaactcaccctgtaattatgtttcacctaggaaaagataaaaattaatttatatatgccaaactacattttaactttaaaatgtagaggtggcctagaagtatattaaatccaagcattcattcaataagcatttattgagtaccaaatatttgctagacactttgggaggcactggggatctggaattgaaagccagcctcctgcactcatgaaatctcacaaaagagaactaaatacatatagaaatcagcaaatctgagccacagtggtacccttcacactcacaaggatggctatcctaaaaaaaggcatgcgacaacatggatgaaccttgataacaagctaagtgaaagaagccagctgcaaaagaccatgtattgcatgattccatttatagaaaacgtcttgaatagaaatttgactagtggtttccaggggctgggggaggttgagaagggggaatgactgctaatgggtacagagtttctttttggggtgacaaaaatgttgtaaaattagatagtagtgatggttgcacaatttgtgaatatcctaaaaaccactgaactatacactttgaatgggtaaattacatgaattatatctcaataaagctgtcaaaaatacatgtggaaataaatagtcctcatatgcaaacaagaggagataatgaaagatattatttacaaggattaacttaagacatgtatacaacctatatacagaaaacttttatacattactaaagtacacacaaaaaaagaacacatagaaaacattgtctttgacgggaagactcaaccttgtaaagatgttaattcctcctaagaaatttataaatttaatgtgatcccaatggaaataccaacaggctttttttctggaatcaagaatgttgggtctaaagttcatatggaataacaaacatggagaatagccaggacaaggctgaaggggaagagcaacgagggagaactagtcttttcagatatgaaaagatgatataaatttcaaacattaacaacagatcaacccatggaaaaacatagagtccagaaatagactcccagacctataggaacttagtaaatgataaagtaggggttatgatactatgggaaaaatataaacttttaaacaaataatgttgggacaattgagtattgaaaaaatataaagttgcatccaagcctcagaacatactctaaaacaggggtccccaaccactccccaccccgccctggcccggccgcagactagtaccagttctggcctgttaggaaccaggccacacagcaggaggtgagtggcaggtgagtgagcattaccggctgagctccgcctcctgtcagatcagcagtggcatcagattctcacagaagcatgaaccctactgtgaactgcgcatgcgagggatccagattgtgcgctcattatgagaatctaactaatgcctgatgatctgaggtggaatggtttcatcctgaaaccacccccacccccagtccatggaaaaattgtcttccacaaaaccagtccctggggccaaaaaggctaggaactgctgctctagaagaaacaccaaacgtaccaagatgtaaacagaaaaaagtaaaattacaaaagtacccaaaggaactgaaaaatatgagacaggcaaagcctctccaactttgactaaaaatacagaagccataaaaaaaataaatttgactacataaaatgaaagagacttccaaagggcaaaccaccaccactaagtaaaccaaaacatgcatgatcaactggaaaaaaaatgcaactcatagcaaagactatacataaagagctttcagaataaagaagaaaaagaccaacaacatagtgggaaaatgtctgaaattcaaaacacactccacataaaaataaacacaaaatgacatttaaatacatgaaaatatgatcaaccttacttataataacagaaatataaattaaagctataacaaaataccatttctcacctaccagcaaaaatccaaaagtttgacaacagattccatgggtgatgttctagggaaacaggcactttcacatactgcttgcatgagtagaatacggtataaaccctacaggaagaatttgtcartaacttttaaaaatgacagatgtatctgtcccttgactatataatcccatttctaggatttcatttcacagatgcacctacaaaagtattaaatgacatgtctacaaggttatctattacaggtgatttgaaaagacagaggattagacacaatccaagattatgttgttgtgccatcatcacacatcaacaaaatggagtactctaaggttataaaaaagactgaagataatctctatgtacaaatatgcagagttccagaatgtattattaagagaaaaaagttaagacgtagaacaacagactgtatgtgttatgttatcctttgtgtaagggaataagaacacacccatacacacactagaacctctaaaaatgaaagacgcaagggttaagcgagatactaagaaaaatggttatctacgagggaacaaagtgcatagggctcatctgcaaaacagaaataataaaaaagaaaaaaaacaaagttcacaggttaagacttcattgtgtatacttctctatattgtttaattattttaactttccaatatcaaaagaaatgtagagagaatgatttaacaatttttcacatacccatcatctagattaaacatctacctagttgtttttttttttttctgagacagagtcttgctctgtcgcccaggctggagtgcagtggcgtgatcttgactcactgcaagctccacctcccaggttcacgccattctcctgcctcagcctcccgagtagctgggactacaggcacccgccaccacgcccagctaatttttttgtattttttagtagagacggtgtttcaccatgttagccaggatggtctcaatctcctgacctcatcatccgcccacctcggcctcccaaagtgctgggattacaggcgtgagccaccgcacccggcccacatctacatagttttgacccttcagccacgtaatgcattacccatcttaaaaaagctccattcaaaatgtcctaaactgaaaagaaactgaatgatatgagcctaaccatacatcaaactgggtgacatgctctctgaggaagaatttatttttaggaattttagaacacagtatttttaatacatacccttagtggaatgcattttaagaacaaaacaaaaattacaaagaagtattaaactttcctctgtagttccatattggtaataatataaatattggtatttcgaaactacattctttacatttataggttaaagaaaaaataaagatttktccataccagaaaaagggagttaaaataattactaaggaaagtgaaagcataaggattttaaaactaaactggacatgtccacctgaactcttaaattttaacagtatatattttccagctttgtccactgaagttctctagaaacaagtcacctctgcaccaataaccacccccaataccctgattgtactctctaataccattgtcccataccactgaaaagtacaagatgagcttggggcatttgtgccatgaatgaacacagattttcaagattatagaagttctgtcaaaaggtcacaggacctagctgaaggggtctcactgcctaaaagttgtaacaaaagagtaatgattagaacacaccagatcaataaaaatccatgaatgtataatgttagaaagacagaaaaaaaccacgtgttactacgtgaagtggttattaaactccttactgtgaaagttaatggggaaagggaaagcattagcacagatcctgcctttccagtgggaaccatgtgtcagggtaaccagacggccccaggcagtacaggaaagctctactttatagaagaaatgaaagaattacagaaacatttcccaaaacccaaggaaggtatggttcaggcaagaatgaccactgggtacaaaaccattaagtaaacgatttgtatgcaaagttataccacacaagtcacttgctggtctctagggggaaagtgtaactggacgatggtgggttcaggctgtcacagccctagaccaggggtcaatctcagcatccccagtagtgggcctttttagtaacagtgagtgaagcacactgaattagctctggtgagatctagtcaaaaacaacttgaatcctgcaagcttttccatacaggaaatcagaggatggagaaataagcctaaccataaagaagcaacctcacactctagcaggtcagaggttctggaggcaagaccagcaactggtctgctgcttcaataagagactgtgctggattaagagactaaaaggaagttacaaccagacatagggcacgatactcgattagatggtgatttcgacaaaccagccttgaagggtatttgagggccagttatggaaatcggaatagaaacaaggtattaaacgagatgaactttattgaaatacaaagttggagastgtcatccaaaaaaatcagataataaaacagtaatacatcattttggttaaaaaaatgtgcacacatctatgcatacaaaaagacctaagagatgtaacagtggtcatttctggacagagacagagagagagagagagagagactaactgtgtgtatgtggagtgttttgcttgcctttattttctaatttcctttaattagaaaatgttatttctgtactaaatacataaaaaagcagttacataaggctttaggtttcactagtaatctacagaaggtcatcttagaaatgatctgttacctttctaaaatatgctaagtggcctgtccatcagtggcatggaggattcctggaatgacttgggaacaacccccaagttggaacttcattgcttagatgattctctgacaaatcaaagatttcttccccagatggtggcaacactgtagaaagaacaacaactagcaccgacaaagtctaagagagatgaggtgatggtttgagagaagaaacaagagcaaagtcaatttttaagaggggtgctgaaatgcctcctcaagcaaactttacctccacttcctcatgtgaaaatgttaccagcaaagttccaaagctctaggggaaaagtgakaccagcaggattgaatgcagcactcaagtcccagggagaaaacttcacaccagatatacctgttcgcagagtgtctgtctcagaatcaccctttgacaatacggatacacgtgcacacccatttacaaactcacctatcaagatgtcttttgcttttaatcatcactgtcaatttttgaagatatactatacactctaaaagggtggcaatttcctcgattgcagtttcatacaaaaatctgtatgaacaaaagcatgttgtacaatcattcactgatttgccaagttttcagaagtgtctataatgtgcgtgatggtaacggggtagagaacacagagacaaccacagatgggtttctatcttcatggagcttgcagcctaatggggaaggcaggtggaaaacaaatatgcccaaataagtgggttcatgaaaattgttaagtgtcatgaaggaaaagaagagggtgctctgagatgagaagaggggaatatgatttacactggaggatcagggaaagcctcctggaggaagtgacatttgaggtgtgaccacagagtgagcatgaattaaccaggctgccaggcaggagaacattccaggaagggaagactgttgtgtgggaaagggtgctgaagcaggaaacagctgggaacagtcacagaactgaaagaggccaggatggggcaaacagaggggaagactggtgtccagggagatcagagaagcaagccgggactgtgctgtgatccatgctgttcaggattcaggattttcttccaagtgtgatggaaagcagttggacatctgaagtacggcagtgacagaatctaatgtgcacttaatatcactatgggaaactggctggggaaggtcaagaacaggcatggagggacaagtcaggaagccagtccagatgagacattatggtggcttaggctagctacagggatccaaactacagactggacaccaaattcaaacccaagtctgcttttaggagtaagattttgccrgaacacgcccccccccccmcacgcccctcccaccacgtgactcgtgtatgtattgtctgtgcagctttcactctacaacttcagtaacggcggcagagaccagatggcctgcaaagcctcaaatatgcaccacgtggacctttacagaaaaagtttgccaacccccagacaagggatggcagtggagacagaaatggatggcttcacgataaacagtctgtcgtcattattcctggattccacatttgcaaattcacctactcactaaaaggtgtttgtaaccccaaagtcaatactcagrgcacttttggtcatgcctgcgcatgcgcagagcagcaaaaaagttgcgctggtcaacacacacattcccagctgagctccacaatggtgacactctgccttcctgtttcagctcttatactataaacaagtaccctttcaactgtctatatagtgccacattttttttgcattttggtgtgttttgttggtgattttgctgtttaaatggtccccaagcacagtgctaaagtgctgcttagtgctcctaagcacaagaagactgtgatgtgccttatgagaaacgcatgtgttagawaagctcgttcaggcatgagttatagtgctgttgggcatgagtttgatgttaatcaaaactatatgctaagatatatgtttaaacagaaacacacataaaacatcatcacaccaacatatgtaatgctataccaacgtacaacatctaccaacatacaacattattacaccaacgaaactgatactacgtattgatcagtcaatggaaatatgaccagaggctcacaggaacctaactctgtatctcccttaggagtaatgattcagtattcactaattcagtgttcctggcgactttagagaacacagctatggcgaatgatgagaatggctacacctgggaggcaaaaatcaatacaatttggtgatgggttaaatgttaagtaaaacaaagtcaaggatgactctgggtttctgatgtgaactactgggtgacagaaggtgccatttatggaaataaagaattccagaacagcagtatatttcagggggttgaccaagatgtttcctttgratgtgttaaggatgagatatccaaagagagaggtccagtagcttgatggctttatgactctggagctgaaaaaagaagtctaggtaaagatacaactttaggagtccctaacagatagagggagcattgaaaacctgggaatgatatgtcacctggcgagaggggtagaatgacagcagggcccaggcctgagagcagcacccagacaaacaggtgggttaactcaatttttcatcttggtggtttgatttgtttaatataaaagtattatactttaggcttggtgtggtggctcacgcctgtaatcccagcactttgggaggctgaggcaggtggatcacctgaagtcaggaatttgagaccagcctggccaacatggtgaaaggctgtctctactaaaaatacaaaaattagccgggcatggtggcgggtgcttgtaatcccagctaatcaggaagttgaggcaggagaatctcttgaacccaggaggcagaggttgcagtgagctgagatcatgccactacactccagtctagatgacagagcgagactctgtctcaaaaaaaaaaaaaattaaactttggcaaggaaattaacctggtgatgtatctagaacccaacagatgttcaaatcccttgacctagtatatctactttggaggacctatcctaacatctagacaaacctcaatgttacatagaattacactgaggaataactcatgatagtaaataaccttaacatttggggaatgtttatgctgacaagactaataatattttcctctgtgagttcatctacagcttctaatcttagaaatttcaactcctccagaggtttaataaatatccacttccatttccttcaagcttttgtaaaaagctttgtaaaaaagtggaayrtttgtctttatctgctaaaacgcaagctgcttcagggcaggaattttatctgttttgctcaatgctgtacacttggcacctaggagagtccccagaacactgaatgtattttgaacatatttttgtcaaacctcacattttaatcaggcagaatttacattggtgtaatgatgtgaggtgatgatacccactgagatttttcagattgctctcatatagtcccattcccattcaggtaatcagccttcctttccccatggcctcacagcacctcctccatcttctgttaaatgctcacagactatggaacctgaaatctgcctccccccttctgccccatggatgggtctgtcaaattttgtcccagatttgaagcattatggtttgacactggatagagctaaccccttcaccactcttatggtccatgcctaacctatgtcctaccaccttatctttcaagaaaagcaacagaaattggtctctcaagttttaaaatacttatccagattttgatgaaaacaaagaccattgatacttggagaagaaccaatgtatttacaagttgccctctctcatctaggagggatgaggaagagtctctactgtgcagctggtggtcaggagtcagctctggactcagactgcctggagtcgatcccatctctgcactcaggagctgcctcacctgcctgtgcctctgtgtaacactgtggaagtggaacctcttttgagtgttactacagggattcaatgaattcacacatgtaaaatcttagtgcagaactggcaatagcaagtgtgcggtattagctgttatgatcatcttcccataacatgtttttccttagaggtctcagtaagagtattcctgaatatttgatatgttttgctctcaaaggggactcatggcttggctgccctctaccacattcctacatgccagccacaggtccaagtgctgtacattcaccacctcacttgaccctgtttgatgaacaggacaaatggaacaagagtgtcacagaaatctgtgttagcaccttcggtctccagcttgattgcctcttttccaaggaggatcccagatccttcttaccggagtcagtcttgcacatggcatggatcactctaacttacctgcaagaagcagggtggcctgccagtgaagataagggcatgcgctggcgacaagtggactgaggttcaaactctggctctaccaattacttgttatgagtccttgcatacattatttcatatctctaagcctcaatttcctcttctgtaaatggagaaaatcatagagctcttaaatattagttaataatagtgtattactattgtgaggatgatatttggcccattttattctggggccccaagaccaaactggatgaactacacagaccagctggctctgaatgaacaagagaaagtggctcctgcactttgtgaccttccctgagaagatgtgaaggcaggtgagaggagaggaagtcggaggctggatctgcatgtgcctatggcttctggaagtcacagccacaaaaggcagtagaattgcgaagaatgctaaggccaggtccctgactctctcacatccaagaaaagctttcaccaaaacaaccaccatctgattctaaatatttctgactttttgttctgaatgtactcttccaaaacaatggtcctcaactggaaatgcaaatgctcaagcctaccacagacctactgaattagagactctgggggtgaaacccagcaatctgttgtaacaagccctccagagaactgaagggcaaaaaggttgaagaaccacttcttccagacagtcccttacacaaatacaccccaaagaaggttctgtgtgtacatccacttagaccttcacacctacaagtaaaacaaggcaaatacacgctcaaggaacacacagtcaaagaataaacaggtaggtaagggagcctggctctgtgggtagacaagtgggaaaaaataaataggtggaagcagagagcagagacgccatcaaagaaggatggtaggagaggccatggaagtcagtggctgaaacccacaaaacataacagctgtcagaattaccaggttctctgtcaggtttcaccagcagaaggaacatactggttactgaactactttggcaagcaacaggaaatgggtcagtttcatcagctttgctttaggaagcaatcatatgtatgagaccaaggttgaggaggaaaaggagagcagaggatgcagaaatgcaaccaccagccatataaacaggaaacatttcaagttgcctttgttgcttcagtttttgaagcaaggtgtccccttatcagtactgcctttaggacagggcaacaagggctcaagccctgaacctcattgggtcaaggcccaagctcacccctcccaacatgggctgtgcccattcataggctgagcacccaccctcttcttcaagaccaggctctgggtccctggggccatgagattccctgcccaaaaggcttcatgcctgcttccaggccctttcccagggcctgtgggtgtacatgtagacctggaaggtgggcaagaggcaccccagttccaagcggaggtgggagtggtcgcagcttggacacacagaccaggagtagagagagagaattgggtggatggcagactgggggcctcgcttcacactcttgacccaagacccacaaatgtcagggcaagctcactccctagtttgtgtcttataaccgtgaaagtctgagtgttcaactaatttcaaatgctgctcatctggactgaaatgcttcccaggcaggtggggagtagccccagacagagactacaacaggaccctatctgaggtcagactgtcatgcctggagacaagaggcagggctcaagttttggtgatgtcaaagagataaaatgactttaaactgtaccttgggaaatcagttttttttttaaagctgcttaatgacttaaaagtgctttgaggttctgtgaaactcatcatgatcgtactgacttctctcctgtgatttttgttgttgttgttattaagtagctcatggtgacaagctgtgaactttctcagggaaacacaaggaaccactgagggcactgtggccttgctttccttgggacagagggaaacactccctgcaggaggggctcagtgyagcactgtgggctgcaaggggaccacgagaaccagaactcaggagcttccgtatgcctctggggaaaaaggaagtggctctgacagcctggtaggaaccactatacctggagccccacctggcagtgcagcctagcaaagctccactcggcattctggagtgttctggggcttctgtgcacactgctacaggggaagggagaggaagagccctagctctgctcccccagcacacataacattggaacagcctcttcattgctctggcctcagattctcatgtgtcaaagactgaataataacgcatgaagaccccaccagggttatactatgacccagtcagattctgtgaaatgcgagtgagcctacaaaaagagattctttagaaaaacagaacatcatggtattgccaatcccagcaagttttcctgatcctagatcactgccataaggtgtggggaggaaagcaaaaagaaaccaacatttattgaacctctggaccaggcaagccgacaagtgctcgatgcgtgttctcctgcaccaccccaacagcagccctgccccaactccacggccgcagtgccttccaccgcaccacaaggcctcccagcatggcccacctccatctccacggccgcagtgccttccaccgcaccacaaggcctaccagcatggcccacccctggctgtctggttccttctattatacccaggccagtaaaaattaccttgttcaagtatcattctgataatatcggtccccttctccacaccacaaaatgtcacttgaattagaaccccttttaaaccttttaacaactgatcccaaacacttaccattctcatctgctagtctattttgtgcttaccactccagccaagcaaaaattactttgcaaatgaattccattatgcactctgcttattcaccttgttaagccaacaccagagctttgcctattgctgttgtctctttctataggaatacctcatttatccgacatccttggaaagaagctatccacaaaattgatctacataaattaatttccctctctaccagaaacttaaccatttaagcagccttaaatcctctttggagtacatcactgtaacaagcaaatgaaagaatttctttaaccactgactagtggaagcatttctgtaatacattagagaacctcccaggctcagttaacagaacataatgaaactgatgaatcttttcctgatggtacaggtcacacttaatgaataatagtaatgacactgtgctggagctgcagaggtgagtggttcaggggaaaaggccraaagcacgtgtgcattctctcttggtgctccttctccctgtcacgagttcccctgacacttactatcctccagaagtccctgctatccgctcagattctggtgagtagatgccgtgacacagaattcaggaaggtgtaacttgctgtctttctgtacagtttcaaaaacgtacatgctggtttttgtcagagccctataaatctttcattagatacaaaataaacaaattttaaaagaacacatttccacaatcggcaataagctggagttttccaaatctccctgccctgtgactttttaaaattttttaatttaatactcacaacctcggcattataaccctgtgacttttaacagaaatccaggcacaaacaccattaaaatttgcttccttaatgctatgaaactataagttctatattgtatagagctggcttcttatcataagcccttggacgaatgattttacttgggaataacgattccataggttgaatcaacagggaaatattagtgtgaaggaaaatggtaaaaatacacaaacaaaccctttgttcttcaagatgcaaatctgtgactgtgtgaagccagaagtgctttcgtagtcaatgtcatggaaggttctatggtgatctctcactgcggatggacagaaccacctggaggaaaaatacccttgtccactcacatattaggctgcattctttttgtgacaaaggtttttatagagtcgacagcattaacacatgcagaagaattgatcaatcttaattctgcttaaacacagtggcatttaattgatcagaacctactaaggcaaaagtacttaggcaagaattgttaaaacagactactgtcaaaaacattacaaatttgttcaatgctgtattcagaaataagtagctataaaaccacaaagatattttggagtttcaaaggttttctgccttttcttttttggcaatgattttactagcttgctttctaagggcaaagatatctgtcagaaaaaacacaacctgcagtgatgtcgttcattacatcttttgccttttccattggctttaaaccaaagagagggaggactaccctctgaaagtctgacttgtaaccactctcataaacacctagctcactcaccttggagaacctagtaaaacaggtatggctttagctgactcagaatctataacgaatttgacaaacggtcccttctaaatgaggatgacctgacactgctctgaatcatcaagattcttctgtgtgcttgctcttctttcaagtgtagttcaagtttttatacttatggcctctgcattctgtttgtcagatctacgggagataattaagcaagattctaaagagttggaagttgaggggtgaaatgcaaagtgatcagtggagtcaagcagaaggtggctttgttggggtgagggatgccagatacaagtacaagaaaaataaagacggccgaaatgaatgcgagctacagatgagtcaccaatccagggctgcgtaagttataacttagatgcattaaaaggaacagtcaattccagaaatatttatgaagcgcctactaggtttaaggaactgcacggctattgtaggggacaaagatgaatcagacatggttcctgccctccaggggttcacgatgatgcaagaaccctgaagtcgtttttctcttatatgcggtactaatgagaacattattaaagagctgtattcagttttaactgccaccatttttttaaatagggagaaactagagagagttcagaagagagaaaggagatgctttcagtgacacaaaaccggctctgtgaggaaaaagctaaagagacccagttattatctttaagtatatgaaaggttttagagaaaggaattgagtaaaagaaaacaagtttgaatgacagcaggcgagatttcagccaggcccaggaatttcttgacaatcaggttaatagaatactggaattggtcactcagggagttccaactgccctttcctggaaaaaataattaaataaataatgaactgacaatttcaagtcacagacattcaccttcctgaagacgggggtgaactatatctgtgtcaaggtcttctgctctggggctctatgcccctgaagctaggtcaggcttttctttttccacaattccctgaatgatctgctctgggtaagtagccactgaatgcttcggagtgacagcccgatctatatccccaccaccaagtgccacacaactacctggaatacaaggtctcagccaggcgaaaaggctgggaatcaattctccaacagccacatatgatgcaagagtccactcgcaacaaagcctacgacacaccaaatatcagaaacgaaagtctctgagaacttgtgcaaataagaaacgtatttgcattggcaaggatataaaatttaagtaacaaatagaagaagacaggatcttctgcaagttacagacagtaatatttatggacatttctaagaaagcttgtaatgagtattttctacactcagaaacacttttttgagtctacgtaaagaaaacacttcaagagagataggaaaatggggtcttcccactctttatttatttattgagaaagactctcgctccattgcccaggctggagtgcaatggcacaatctcagctgactgcaacctccgcctcctgggttcaagcaattctcctgcctcagcctcccaagtagctgggattacaggcaccaccaccacgcccagctatttttttttttttttgtatttttagtagagatggggtttcgccatgttagccaggttggtctcgaactcctgatccacccgcctcagccttccaaagtgctgggattacaggtgtgagccactgtgcctacccaagtcttcccattctagctgaagaaagcataggcatgttagaagtatgaactgccactaaaaaaaaaaaggagaagaaaaaattccatcttgaatcagacccatggtctagtgagtctatgcttctttcacttcccccaccctgtaaagtcagggacagggattaagattttgtcatttcgacaaacccagaacctgccacagggcctgacacacagcaggtcctgcataaatgtttgctgaatgaatgcgttaaagatgggccctcgtctgtcaagaggtggaacatttgagttcatgtgggtgaagggcgcagggcggtgcacagcacaaagtcaatatggcctaagtcacagtgatcaccgtgaccctcaagcatctgggtttcttttataggaaaaataaasatctgcctatactgtaggtttttcttttcttttttcccccaaaagagaatagctatatgaaatggaactcttgcgagtttgggcctttcaagttcacatcccatcggtggttatataaagtctactgccattattctgaagcccgtctttgacaccaacccaaagtccttgaattgtcatcaataagactaccagaaagcacaggcgaattacacgttcagagaacaataagaaatgctcacatatcacaccctcttgatcatcactactttgctccacacaaacctcaaaggtggttccccaagactggtctctatgggaggaagggagagagagagagatgaagaaatataaaacataaaatacaaagaatctgagcccctgtaacttacagaaagcaccaaattgtcttttgtaggaaaatgatgtttaatgcatggtgaggcagaccctggcttgtggtgggcgaggagmctccccttggaggaggctcttggtgaaccacctctgggtgctcccttgcccagcctgctgccttgtttaggaatggatcttggttaacggcaaaggttatctttcatacttggggatactttccaagaggcacagctgcagcccctgaaactctgccccagcagtttatttccacatttttcaagtagcacagaaagtgccactatagaagagaaattctctacctgaaaccagcagaagctcaatgcaaataaagaatctggaaaggtcacagagggagtaaaaagaaggttctttcttctatggctatagggggtttattgttgctggtgcccaaactggaaagggaatcgcaggagattaataattgaaatgttgctattattggttttcgaaactatttgtgggttattctttccctggagtcatcatgtctgtaagcatctcagaagatagagggatttaacacactctgagaagatgcctactacagccagggactttacgtgcactagtttctaatggagttcctgcacagtccaataaagcccaaagtcgtatcactagattcaaactcaggtttctctgattcaagtatcatagcacattgtctgaaatcaaggataaaattaaggcaccttactcactactcaaatgtggcgagaagaaaagcaacatttatacttactcatttttaaaatataaaacctaaacacaggaacagatattttagggcatgtgtcatcaaactctgctaacccaagatgattcagaatctcatttcttggtagacagcttggtagataggcatcttcaggtccatctgatgatgaattgcagcagacagtttttggaagtctgtgaagtgttcctttacataagccaatagtaatcaacacagcatatctcagggagaggaaaacataaataacttggaatttaggctcctctcattcagaacccataatagagaccttggtggttggcctttgcactagatattgaaaaagcctcgcaaagcaagttgatggaggaaatacaatcacaaggcaaatgtttaaccttctaaagaaaataaacctttttataagaagttcagttccaaaccaccaaaaactaacatgctatttataaacctatccttcaagcaagccctggaagactgattctctttgccacccattaattggtattatcaaataccccttgtttcaaaaacagcatttctgtctaaatctctggcggttcagaacgctccattaatgtatctgggccttcacctggtattccaacttggtgcagcagcaccccattgaaacaattccctctcgtgtcgttatacttttcctgagaagaatcatgcacactctttaggagctcaaaacccacaaggaatccctcttcttatagaaatctacaggaaaagctctgctcgtttagcatgcacacagggagtccatgtgctctgattgagacaggggaaaaatcaggtttcctgaacccagaggatgtcaccacggcaggagaaaggaggtcatcagagtcttggcacactcatcacagtgagtgaatgcgggtcctagcaacctaatccttgattctagaagtcacctgtctgttttagagcatgtccaacaatctctttcaaaaacacccagatctgggcttttggcagactgatgtgggccagttgaggtgggatggggaggaagattagaaaaataattataaaggtgcacagataaacatccggaataaaagggtgcacagcgcaggaacaatgaagagggcacacggacaagatggagggaaactgagggctgaaagaggccaccgcggaggtcacctgagacagggaaggaaggctggcaaataaaaacagttcatgagacttttgagatccatgattattcttaaaccgtaacaccctacacacctgcagttctttatctggcgtaaggaactggaagaacaatgtagcaggaacggggagagccaagtctcagcctcgggggcatggcctaccttccatatggatttaaaatgaaaggagcaggaggagaacagtgcagttcccaagatggctttccacaaagttgacaaaatacaccccaactcacatacccggtccctagtaacagggaaaccagccgtttactatagttctgaattcaatgccaagttccttctctcaactcaccgggagtgtccagcagagggagtctcaaggaggtacttaataaagagaaaattgtttcattttaacactctagacagtgggagcattgactgtagccccctcctgtagacgcagatgaacaatgaacgcccgacatgggttctcccgcatgttcacatgtccaccggcatgttctattctgcgtggtggagtgatcagaaatttcgttttgttttgtcgaatggttaaatggaccttgtgttcttcagaatcaaagaggaaagcccctggaataacatctctctgttgccttctaaacagcccctttgtttctaagagagtctgaaaaaaaaatatttacagtctataggttatttacagcctcgttatccagggcctgactggtaactttattccggccagaaacctaattcatttggagccctgaaactaataacagattttcttttaagtttttttttttttaatcagcctcttataacagagataaaactattaatgccttccctgtctcactggccacaactgttctccggatttacaggaggattacattcccccctcgtgccctcctctgtgccacacaaaccctgtcccctctcatttgcgatttcatccacagaatatctgaacaaaaccgaaagaaagccgggggacccacgctaaaagtatgtgaaggctgcgatttcaatgatttcatgagacaaacatttacacgatgaaacgactgaaaaatcagacacacttgggtttaaaatttctcctactacaagcacacaaaaacacatcgaagtgtaaaaacttagttgattctgggttgctttctggctggaagctgacagaacggactgaagagaaacgaaagacagtgtgcgaggcagacctactgcttttctgccttgcgttcttttctttcttgctaaaggcagtcaaatggggaaaaataccccgatgccaggtgaaggtgcacaacacagatcgacccagaccgagccagaaaaacgtctccgccgctcccccggctggaaaacccaaagtccacgtccccttccacacgctaatgaggggagattttcgcctatttcattgttctgcctggctctgacatggacttttcatctctctcctctctccccacctagccccgtgcattccgattccacagcccccccaaaatcggaggctcgcggagaataaaggagcgtggggtgggcgcggaaagaaatgggaaggggcgcggggcggagagcgaagtggaaaggaggtgctccgaaaggtaatgtgggggggcggtggaagctaagccgcatcaccttcatttatcgcaaataaataaaaagcacagtcaccggtccgccttccccggcgtccctgccctccccgggcagccgcccaccctcgcacacgccccctcccctcctgcgcccccggcccctctccccgccctggaagcaagaccctgccggcgccgggtcccggtcatcttccgggcgagggagggggtcgcggccccctcgggccccgggtgggggctggggcaggcgccgggggctgcgggcgcggggccgcgggcagaacaaagctgcgggggccgcggagggcggcgggcgcggggtcggcggggccgggcgccccttaccttcgtacacgggggccatcggggccggggtgtccgcggttcatggcaacggggacgggaaagcggcgcgcgagctcggcccccccagcctcagtcggaatctgccatcttgagcctgtgtctccgctctcggcgcagccgaggccgcccgcgcccgcatcaccgcctcccgtggccggcgccgggggagggggccgggcgcgccgccgccgccgccgccgccgctgccgcccgggcccggcgcggggggctcggggctcggggctcggggcggccgggcgggcggagcggccgaggccgaggcgccgagcggccgcggcccccgagcggatccgcggaggggcgggagccgggggcagcgcgcggccagggccggcggggctcagctcagcatggctgggcgcgggggctccgcaaaagttgctggcggaggggggcggcgggcgggggcgggggcggggcgcggggccgggagagccacagggagtccgcgcgcaatcgagcgccgatggcacggatgcgaggcggggaaggccgaaccgaagggcagagccgcgccggcggcccgaggggaccgcgctgggaggggctgccgcgcagcgcggggggactgggcgcagggcgggccccgggtagtgggtgagagggccggcctggacccggcgggcgcacggctccgagtccagcgcagccgagccggtctgcagaggggcccccagaactttgtgtgtgtgtgtgcacgcgcgcgcgtgtgtgcccaggtgcgagggtgcgcgcgtgtgctggcggggagggaaccgacccgaaagagagccccacgctggcaaagtggctcgcccatctcacagccggttggcgctcgcggaggtaggagtggaatgaatgaatgaaggagtgggcgcgcgccgtgctccggaggagggcgggtgagtggaggagcttcggaaagccacacgaggtcagaggcaccgaagccctgccgtgcacgccgcggaaatgcagcccccggggtggtcgctgggttcctgccggagtctggcttccacgccaccctgatcttctcctcctcgcgtctacactgtcccgagggccgccactccatcacttgaatgggagctcacaactctctgggtcctcgcttttctcagcgctctctcctatcagggcttccgctaaacactctccagactctccccagccgggagcctctccaggtttgcttctccagctgcctcccggatgcttggataggatgccctgccatcccctccaacttaggaagacttgttgagtctcctcttaggcactgtttttaaaactgtgggtcgtgacacagtaatagatcataaaataaatgcagcggaaggcaaccagctttcaaaaagaacgaaatggaatccaatagaaaatattagagtccattgcccttagtaagggcaactattgtttcataaaccttttgtttcgattataggtactggacaagtgtactggaccatgatgtcaattttatttccgtctgtgaatcgtgggtttaaaaaagttgaaaagctatctgtgtaaaataatgatctctaacactgtataactttcttaaaaacaacctcgtgattttctcactacttcttatcctttccggtctccatcctccgttcccatccttcagtccttcccaaaaaaggcaagctctttcacacttttttagtggtacatcacgacaccttcctctgtgtgatcttgtactctgcggtcttccttgcccccataatcaatgctacacttcctatcccttctcttaacctaatgccattcacgtttgcagaatcctagactactgttgctaaaaggacctcagaggtcatctgggccagccctgcccttttagagttgaagaaatggagtccagagaagtaaaatctgttgcccaatgtcacacagtattgaagcttaggaataggtctcgtggctcccactctagtgttttttgctccacaccggtcatttatctccttcccttctatcctccctgcaatctttaactttagtcttggcccaggtcatcctaaatattgccatcttcataatacgtggttctggccatgccacgctcctggctaacatcctctaaggactcaacctctgcaggtggggctgagtgccttggcttttcatcaaggcaggcgagtcctgacttagctttctaaggacatgagttcagcaagtcactgcttctctagccaaactggtttacttgtagcccagtgccagcttcacccatctctgtcactgtgcctttgcccaagcggtcactttcccacccactttcccagaggggtaccttctccatcttctctctttaagcagattctacctgtgcctggctcacctcctccacaaaacagcccgagatagcgtgggagtaagtcagacctaggttcaaatcctagctcttccacttaactatgtgatcttggtcaaaatgcttaacctctctgagcctcagtgtctgtattttgattatgagaaggagaacaatagtaatgttctccttttgcatctgtaaatctctatcatagccttcaccacacaggtatgtaactccctgttaatacataccctacatgcatgtctctctgcccctttctagtgctggccattagaacttgctgccataatggcagtgtagctacttatgtctgtggagcacatgaaatgtggctagtatgactgaggaactgaatttttaattttaataaccatgggtggttagtggctaccattttggacaaggtgtctctagactgtaagctcagtaaggacagaaaccatgtttttcttgttttggattgtatgtccaataactgcattgcctaacgcatggtgagtactgcacacatatttgttgaatggatgatagctgcaatttgttgcatgctcccttgtgtccagcacaacactacaaactcgataaaaggcatttcatatagtcctcatcacagcctctgaggctgggttagattagagagagagttttatatagagggcagacacatagtaggggttcaataaaagttattattattctaactcctccctctgaccagccccactgacttttgtctcatctttccttaggctcacagaacatttcctgcctgttgctcacactctgttgtccacagcatacccgcaccctagatggctgactcttgtcttctgtgtaggtaccctgtgttcataactggattggcagcgtcttggagcaaggccctgctttataggactgcccctgaattcagcactgaccagtgttcagtaactgcctctaagtccatcccagctgctgtctagcagtgagtgattctaggcagtcttaaaatgaatatcacttgtgtcaaccgaaaacattttacaggtagtctcctccccataagaagggaacaatcttgggcaaggaaatagagtcccatggaaggggaacaagatggagccatacagacagaggtccaccttctcttcagaccaccatgactgaagctgtatccatgagatgcaaaacatgcattcaattgagctagcgaagttcgtatgatataacggaaaaatattcttgaaatgagcttagattttccttcatgaattggcagactgagtatactaattgtctcctttccttccggtgactgcagtcaagtggcagcaaggtataaacctaacagtgaaatgtcactgaaggagagcatgggagctgggaggagagaggatctgtgacagaacctggggagtaccagtatttgagacatgggaagaggaaaaagagctccccatggacaagagggcagagaagttggaggacagccaggacgggggattcctcaacatcccagcaaggtcaacagtgctgcatgctattgagaggcccacgtcagatgaaagcagaaaagcagctgggtgctgtggctcacgcctgtaatcccagcactttgggaggctgaggcaggcagatcacctgaggtcaagagtttgagaccagcctggccaacatgatgaaactccatctctactaaaaacacaaaaaaaattagccagacgtggcggtgggcacctgtaatcccagctacttgggaggctgagataggataatcgcttgaacccaggaggcagaggttgcagtgagccgagttctagtgccattgcactctagcctaggcaacaagagctaaattccatctcaaaaaaaaaaaaaaaaaaaaaaaggcagaaaggcatcaattggatttagcaacaagagttgcattagtgactttggtgaaactagtttggagggaaatacaggtttcttaaattctacctgaatatgtgtcctgttttatgggtggagatagtagaaggatggggagggctaaggaggtaccagaaaagagcaccagagattgctccaagcagagagggccttaccagtcatgggcctgagacaatgagaggggtctgggagctgtcccatttggctagagatagtgtgcattgtattttatttatttaataagcacattagcagtcagtgttctaaggagtttaatcaatcatttaaaaaaatcacttttttttttttttaacagtacatggaactctaggttgccaaaataccatttaacttcagggtgcattgaagaacaataataaaggcaagaaaactggaaaggatttagtaaccatttataccagttacctctccttaatttgcctttctacaaaatggtgcaagtcatatctttctcaggagttggtagagtgaacatgggggagctttgacctcatttcaagttcattttgcttacaggacatggaacaaagggtcttttttttttcatgtatgcctatagttgtgaaactgcacaacatcacaatatcttcaaggccacaggatagagataaccctctttttggtgtatgcatttaggtgtgtatgtctctcttactctcagggtattcttagcatgatgtctgtgtggcttgtatcttattctcacttggtgtgtgttgctcttattttcctgacagctctttattttccatgtgtgagcctgtgcctgtggtttatctctggaggatgtgcctgagggaggtaggtcactatctcaagttctgtcttttgatatcacacctctcttttggtctcttgctgtatctctattttcctctctttctgactgtgtgtctaattttctttttctctgtatctttctatcttttccacacattctttatttcttcttcctctccctttattttaattctgtttcttaacaagtcataatagagacctatttttgtttggattattcttaagaaattaccttgtctttctgctttaaacctttgatcggtttcaatgatacagtttgtaacagagtagtatttaataacaaaactctttaactgaaagcttcagtaacaagacattacactcacagagaatttaaaagagtagacatttcattcaaatgaggaacaatagagctgtggctttaagggcaaaggggagagcgaggcttggcagggtgaagggaatctgattgtggaaatggcagtcttggagaaattacactggcaaaatcaggggaatagggaaacatcattcatttttctgcttttgctcctagaagaaaaatgatcagacacctgaacaggggtgcaggaaaagcaaagcgatgccataagagcattgagcagaaaggaaatatggcaaaaaaaaaaaaaatgcaatcagcctatgaatgaaaagaagctgtaatgtagatgcacagaaggtagggcgattttgttggaggttgcgggaatggcagattaggatggatttgcacatgagaagcagttcagagaagcaacccaaccctgcagagaaatttctgtgattatgggaggtaggtaatagcttggttttcctgacctgcagtccaggctgaacttggacagactaggtagaaatggtgcagaaagaagcttggggtggaggcagaaataaaggtagactgaggagagctcttttaaaagcctgcaggtcctgttaagcctacctcagccatgaatcagtggacctgtgcatttctgtacagtgtgaagtttcaattgtaaggtttcctcccactgacatgaaagagcttgctcctatctggcaacccctggaggggcttgactgtcacggcagagggcagttaggactgactctttgctctgaggttgccagtggcttcttagattgcaaatcgcatgccctttcttagcccctccc

SEQ ID NO: 96697 - DNA, 199041 bp, Homo sapiens
  misc_feature (1)...(199041): n = A,T,C or G
ctgggatcacagacaggagctaggtgcccaagactctgcctagggcgacctttctgtgtccagtcatctgcaggctatgtcttcaggagactctcaagcccagcgaacctctggcccttcttcctcagggcccctgtccagcaggcatccctcgttcccttcttgtctgcctaccctgctccctgcctcctgcctcactcacctggcctcctgtatgacaccctgctgtgtcaggaaaaaagccagacagcctggactgagtcctgaccctagcctttctgtgtacattttgtgtcccctatagaatggggtggtatcagcacctatcccagagccaaggactgaacgtgccaatgtacttcaagcctagtaagagcacctggtagagaaaaagtcctctatactttaaagtcattattatccacacaggagaaccccttagatgctctgatctttcactcttgctcgtttcctctattatttgaacctttcctgacagacaactttttccctttgaaggtcccactgcccgcaactaatttcccctgctggtttcagacaagctaccctgttctggcctgtatttagccactgctagccgtgaagatcaccctatcctgccactgattcatgagacctctacaattttgttgttgttgagatggggtcttaacctgttgcccagactggagtacagtggtgcaatcactgctcactgaagcctcaacctgccaggctcaagtaagcccgtcacctcagcctcccagagtgctaggattacatgtgtgagccactgtgccttgctaatttcttcttaaaaagagatggagtctcttatgtcactcaagctggtctcaaactcctggcctcaagtgatcctcaaatctttaaaatctaatttttttttttttttgagacagggtctcattctgtcacccaggctggagtgcaatggcacagcctctgctcagtgcaacctccgcctcccgggttcaagcgtttctcctgcctcagcctcccgagagtagccgggactacaggcgtgtgccaccatgccctggtaatttttctatttttagtaaaggagttttgccatgttggccaggctggtctcaaactcctgacctcaggtgatccgcctgcctcggcctcctgaagtgctgggattataggcgtgagccactgtgcccggccaatagtcacatctcttatatcagaaacttcaattaaatttaaaaagtatagggggttcataagtatataggataactgaatctatattattgtcaatttataatccgtcaccttgactaccaccgccaattacttctttcataatttctcaatgaaaacaaggctattttcatgtaaggcattttccttcaacaaaagtaatcctatgaaaaatacattaccttctggattcaggtttctcatattcttagtcttcaatgcgttgaatggtcttacttgaatctgatgttctaagattgagtcagggtaacggtcaaagaagatttcattgacagccatgtcaaaagttggaataacttcctgtaaaaacaaatatgaagatgtatttgtattcatatctcagtgttaaatataataaaggcatgtcagattagcaaagtataaaaagacaacatgtcatgtccccaaagtattaccctacagaatcatgcacgtgctgttttcaaatttaggtatgctgaactatctatttctgcatattttcaattgggttaaatttcataatttatacgaaagtgccttcttgatgtatactggcatattctttgctttctattagaagggaaaaagattttgacctcacactttattttccttctataatgaagtgataccaaagtaagttttttatttatttatttttaatttttgaggcagagtttcactcttgttgcccaggctggagtgcaacagcatgatcttggctcactgcaacctctgcctctgggattcaagtaattctcctgcctcagcctcccgagtagctgggattacaggcatttgccaccacgcctgactaattttgtatttttaatagagacggggtttctccacgttggtcaggctggtcttgaactcccaacctcaggtgatctgcctgcctcggcctcccaaagtgctgggatcacaggcatgagccaccgtgcctggcgataccaaagtaagttaaatcatatttattcaaatttcttaacatatggttcccattttacagatgaggaaacagcttttggttggctaaggaacttgaccaaggttatgcagccagtaatcagcaaaaccaagattcaaaaaccaagtctgcttgcctccaaagactacacccagagtcaacagagctgatacttcattaatagaaactgacctgaggcttagaagtaaaagtctacagtacaatatattctttcaaagcagcaggaagtatgtaattcatttaaagtatttccatttaagataacttacttcatgaaacccaagaagctatcagttttaagattcatcatttttctacatgaaaaacactgccaagtaaaccataacctgtcattgatagtaatacaagtcccactttcaggaacattaaaatgtgaaaaaaaaatgttcatcttaaaggagatgatacatagtttttttttgtttgtttgagatggaatctcactgttgcccaggctggagagcagtggtgccatctcggctcactgcacctctgcctccggggttcaagtgattctatcgcttcagactcccgagtagctgggactacaggcatgcaccaccatgtctggctaatttttgtattttttagtacagatggggtttcactttgttgcccaggctggtctcaaacttccgacctcaagtgatccatttgcctcggcgtcctaaagtgctgggattataggtgtgagccaccacaccgggccaaaggagatgatactcagtttcttaaagtgtttgcgcatactatcttcattactgaagaatttctgttatctggaaacattctttctagactgttactaaaattcatcaaggtcaaagctaaattcttacctgtgggtaagagatgagttgtctgtacaaatttttgtcaaatgatttgatgtgttcacagttcacatttaaaaatggctcaccaataacattaatctagaaaataaaaatgaacaagttatattttgctaatttaactattttaaaacacgtaacttgaatttaaagagtatttgattacctccccaagtcgttgcatgtatagaggttcagtaatatctatgccaacattttcttcttctttagccagagggtcaataaaacgctgaagaaatctctttaagtggagagaaaactgtattaggcatatagcatttgggaacaggcaactactaaaaacacacaaagttatgagtatgtcactatcaggagacagaaataaataatatttttcttcctttttcttttctaaaatttaatttggagatggagtctcactatattggtcaggctgctatcaaactcctggcctcaagtgatcctcccaccttggcctcccaaagtactgggattataggtgtgagccaccacaggtggcccttctagtcattatggctacttagatatagattataaacacggtctcccaacattttcagagcccaaagtaagaattttaatacatgtagctcacctgaaagttttctttgcatgctgccacatttacatctgttccccagatcacaagtttttggcctagagactgctcacttgccactatatcttctgctgctgcctacacagaaaaacatgacagaatcatgaaaacagagttacccacatgatacccgccataagatggtttcaggagactgcatactcaccccgtcagactgcagatccacttgcaggcccttctgtgcagagcccaggtcaggcctctgtctcacaggtgtgcccctaacaccacttcttggggttccctctacccgagagctgggagtgccgtatgtcagtggtgaactaacatcaaagtcaagagggatagctataaaaacaaaattaggaaattctggtggcatatcaaacctgaaattacagcatgttgtctgttgatctataccatctaatcgcaacagcaaactgaatatttattgcaacctgcggtggctgagattctgagcactcttaaatgttctattaaaaaaaagcaccagagaagctgcttcctctgctcactaagccctaaaactactattttctgcactccgttcagctcctctggttaagaacatgctcagtcacgtgcagaggggatgctttaggcgttatgccaactgttataaagccagtaaacctgagcagataaagcatcagctgtgtatcaagcacagcaaaaccaagatcttcagacacgcacctgaagaatgcatttggggagggctggaaaacagcacgtcctgcgcagcagggctctgcaggtccactccaggcgaggttggcatcggctgcaactcccccgtggaggtggaatcctcgcctctacgtctctgagagggagatgacctggcatcctcactccgagcttgtgtcacacaaaacagaaaagacagccattaactttcagggccggccttcctggatttgtcttttccttggggcattatgactcaccactgaaccaaaccaaacagaggcaaatggcaatcgaattaagcagcacccaggccacagcctgctgtgggtgtctgtgcgcaccaagcggcagcgcccagcccgaggctgagcgcccgggtcccgcgcacccacccagcgctgccagctgcggcgagagggcagacggggcggcgccgggggctgtagtgggcccggctcgggggactcacgcgtctgggcgggggtggcccttccacgccggctgccgcggcggctcggggtcgacgccggggacgacatagtgctcggagtacctgcgcgacaaggacaagctcgggccgggcccgcctcccggcttccctgccctgctccgcagcgcggacgttcccgtcggctccgcgccacgccctccccgccggcgcgcggttaccgtggaaaggcggccgcttgccgacgacgctcgcggactccgagtccacctggcgagtagcgctcccaaaccgcgagacccagagttcccgccggcggcaaggtcgtctccgcccctggcggggcctcaccaatcacagcggcgctcgtacgtggctccgcctccgggaggcgccactgcgcatcggcagggggggacagtgccgcttctttcagcgcccgtgcgtaaaccagaagtaggcctcgctcggccccccttggtccagatggtctgaccccctgcgcggcagcgttttcgcgggaaaactgggtcctacagcaccagctctcggggtgtgttcctctagcgttggctagggagcgtgtgcttctttatcccttaggcgtttttggttaataaggacattacagatgcatttctcacttaaagattttttttattaaaaaaaattaaggacgggaggtggtggggatggtctcattatgttgcccagactggtctcgaactcctgcgatccccccgcctcagcttcctaaagtgttgggactgcaggcgggcatcaccgcccccgaccgcgtttgtcgttttttatcgaggaacaaacttggaactcttgacctaggcccctcgcttgttttatctgcctctggtatttatttagccaagtccaacaccaagtagccacccaaactacctccgcaggtcagacgtttttccttaggtttccatgttgattcgggccaaagaggcgcgcttactggccaggccttcccgcaggggtccccgggaaagttcctgccgccgcgccccgcagccccgcctccgcgcgtaggggcatttccgggtccgggccgagcgggcgcacgcgcgggagcgggactcggcggcatggcgggctccggakccggtgtgcgttgctccctgctgcggctgcaggagaccttgtccgctgcggaccgctgcggtgctgccctggccggtcatcaactgatccgcggcctggggcaggaatgcgtcctgagcagcagccccgcggtgctgggtgggtaccggcccgagctgggccgcgggtgggtcctggcttcccgrgtcgttctggagccgggcagcccggcgcttctctgtgtttagatgacggtattttgaagtacagcaattagattcttgggggaatttctgtgtatgtgtataaagggatttgtcatactgctttttaccccctagtattagaggaaagatattttaaagccaaagttggtgaaaacgacccctaatatggcaatcattgctatgcagagtggggggcagggcaagagaaataattttttttttttttgagacggagtctcgctctgtcgcccaggctggagtgaagtggcgcgatctcggctcactgcaacctccgcctcccgggttcaagctattctcctgcctcagccccccgagtagctgggattacaggcgcgcgccaccacgcccggctaatttttttgtatttttagtagagatggggtttcaccatgttggtcaggctggtctcgaactcctgacctcgtgatccccccgcctcggcctcccaaagtgctgggattacagacgtgagccaccgggcccggccaagagaaagtattttctttcacctgaatctcgcctaatcccaccagtaccttttccaaacccctctatttgccgttcctactttgagaaaaattgaagaaatgtaattgaagtcatgttcttttaactctttagcaatgcctgggtgggaactttttcccctttgtagtaaaagtgcctctttttagcattttaaatattcaaatacttaattatgtggatctcctgtattccttctttaaaacacgagtatgcagaccttgatgttgtgccctattaaaaggtgagattttcttccggagggtctagtagtgaatatggtgtaggaataacttaaacagtttaaactagatgctatatgtggcacggtgcggtggctcatgcctgtaatcccagcactttgggaggctgtggcagctggatcacctgaggtcaggagatggagaccaacctgaccagtatggtgaaaccttgtctctactaaaaatacaaaaattaactgggcatggtggcgagcgcctgtagtcccagctattcgggaggctgagacaggagaatgtcttgaacccaggagaaggagattgcagtgagccgagattgtgccactgcactccagcctgggcaacagagcacgactccgtcccaaaaaaaaaaaaaaaaagatgctatatacatgtatcctatatgtactctatctgttgtcaagaatatattaacaatggggaaatatcaaacaaaaaactaacattgcgtgattactttctcttctcagggtttcaaatttagaattcatttttgttcgtttagtaacttgtttctaaagcacttccaagtttaccttccatttatgccatatctcctttcacttgagagattccaggggaagtgtattagttccttattgctgctgtaacaattaccacaagcttagtggtttaaaacagcacaggtctgttactcttacagttcccactgtaagggggattctgtgagtcagaatcccacacaggtctcaccaagctagaaccaaagtaccagacagggctgctttctttctgaaggctcttggggaggatccattgccttattcattcaggttatataggattgaggtccctgacattccatacttcttgaagctgtcccctttccttggatcacagctcccttcccttggtcttcaaggccagcaacagcatgtcaagtccccctaactagaggtttggaatctcccgctttcccaacttcctgtctctctgacccactcttcttcatctccttactttaagggcctgtgtgattacattgggctctctggataatccagtatgatcttcccattttaaggtcagctgattagctaccttaattccatctgcaagctcaatttccttttgctatatacatttaacatattcacaagatgtgaccccagggattgggatgcaggcatctttggggccattattttgcgtactgcatccctgtggaacattgtctagaattttctgctttgttttaatacagcaaccttgggttagtgttttatatttataaggctgccttgaaaaccgttgcaaccttggccaggcgcggtggctcacgcctgtaatcccagcactttgggaggccgaggcgggctgatcgtgaggtcaggagatcgagaccatcctggctaacacggtgaaaccccgtctctactaaaaatacaaaaaaaaaattagccgggcatggtggtgggcacctttagtcccagctacttgggaggctgagataggagaatggcgtgaacccgggaggcggaggttgcagtgagccgagatcgcgccgctgcactccagcctgggcgacagagcgagactccatctcaaaaaaaataataagaaaatcattgcaacccctttaggagtggtttacatgatgctcttggcactctcttaacttgtttacttatttttttgaacagcattacagacatctttagttttttccagagatttcggtttgcttgtatttgtccggaagtcactcaacagtattgaagtaagttgacaattttggttttgcttttcttgtatattcctggagtgactcctcttacccatatttacaatatgtatctctttcattacagtttcgtgaatgtagagaagaaatcctaaagtttttatgtattttcttagaaaaaatgggccagaagatcgcaccttactctgttgaaattaaggtaagaattaaaaaacataccttattacattatatatcaacatctgttttaacttatggtgtgaggaacttggatttttattttaaagataaaacattttcctttctcattggggaatttgcttatttctgcttcattgtgttacaaatgaagtgggctcttcattaggtttttttttttttttttttttttgagatggagttttgctcttgttgcccattagttatttagatttagtaagctaaggcctttgtgagagaaactactttgataattttttttaataactatcttaatacttttttttcctgaggaggtggcagtggcaccctgggctccctggggccctgatggcctcttgataacttcactgcagcctgggcgacaagagcaaaactccatctcaaaaaataataatttttattttgtatttttttatttttattgtttatttgtttttattttgtgagacagggttttgctctgtcatccaggctggagtgcagtggtgcaatcatggctcactgcagcctccatctcgtgggctcaggtgattctcacacctcagcctcccaagttgctgggaccacaggatgtgccactatgtccagctaatttttgtatttttttttttttttgtagagacagggtttcgccttgttgcctaggctggtcttgaactcctgggcttaagtgatcttcccgtctccgcctcccaaattgcttacaggcacgaaccacactgtaatcctcaaagggattacaggcatgaaccacactgtaatcctcaaagggattataggcgtgaaccacagagtcccgtgaatactttcaggctggagtgcagtggcacagtcttggctcactgcaacctccgtctcccgggttcaagcgattctcctccctcagcctcctgagtagctgggattacaggcgtgcaccaccgtacctggctaatttttatatttttagtagagatagggtttcaccatgctggccaggctggtctcgaactcctgacctcaggtgatcgcctacctccgcctcccaaagtgttgggattataggcatgagccactatgcccggcctaatgttatattttccacagctaaatactgaattttggtattgctcctcttggagaagtagtttcaggtattgctgagtcttagtttttatatcttattgatgattttggttattttttttttaaaacctagaacacttgtaccagtgtttatacaaaagatagagctgctaaatgtaaaattccagccctggaccttcttattaaggtaattatgtttctaagtacacgtattttacattaaacatgtaacttttaaaagaaaatcagagttttgagttgtgttttgggtgatgtgtttggggaaggataggatctaatcacattgatgtgtgggtaagatgcacattctccaaccatcacctgacaataccctggctttttgttttcagactcttctgggtagtaaaagaagaattctgagttgtgaggagaatgaaggaggaaaatgactaaggaatttattgctctttcatttatcacccttactggctttggcaaaacctaatgctattaggaattgctgaaagatcaccttatatctctgaggtttttcctaaaaccttagcaatgggaaagagttcatatgttttcttttttttttttttttttttttttttgagacggagtctcgctctgtcgcccaggctggagtgcagtggcgggatctcggctcactgcaagctcygcctcccgggttcacgccattctcctgcctcagcctcccaagtagctgggactacaggcgcccgccactacgcccggctaattttttgtatttttagtagagacgaggtttcaccgttttagccgggatggtctcgatctcctgacctcgtgatccgcccgcctcggcctcccaaagtgctgggattacaggtgtgagccaccgcgcccggcccatatgttttcttttctttctttttttgagacagagtcttgttctgtcattcaggctggagtgcagtggcgcaatctcggctcactgcaacttctgtctcccaggttcaagcgattctcctgcctcagcctcctgagtagctgggattacaggcatgtgccaccatgcctggctaatttttgtatttttagtagagacggggttttactgtgttggtcacactggtctcgaactcctgacctcgtaatccgcctgcttgggcctcccaaagtgctakgattacaggcgtgagccactgtctggcgggaatcagttgatacgttgcagttaagtggttgttggggtcactgtgacctgtttctgttttttttgtatttgtattttagaattcctttgtttctggttgctccttggttttgtaggcttctgggagaaaggttctagtcatgttgttggtttcttgggaasgtaacacacctagagcattcttcccctgatgttcttccaccatacccatctcaacctctaattcccagataagctgggtggatgtgaatcctgtgagaccaagtgtaaatccttgagacacacctaattctgaacctttgctgtggacagatgcactgagatagaggaatcccgttatttccctctttagagagaatgctaatttgtattgtgttttttttcttgattcccgcactacattgatgtactaatttgtattcttttagttacttcagacttttagaagttctagactcatggatgaatttaaaattggagaattatttagtaaattctatggagaacttgcattgaaaaaaaaaataccagatacaggtgagatgcatttacatgttattttcaaatagtttagcaaattaatattaacaaattattagcataagacttaggttttctctaccaaggtcttattttacagtcgaatmctttttgctgaaaataaaccaaaatggaaccaaacaaaaacaacatgtgaagacttcccttcacaaaaatgttaatttttacaaaattattcctgtaaatagaaaactcacaagatatgacaaatatgattaatacatttgcataaaacttaggaaagaatgcagtcctaaaagctttatattttatatctcttactgtaaaatcaattttgaactttattttattttattttcttcatacattttggttagtttaacttatttaaatgtagtttgaggccttcacttgtctaaaattttcttttcagttttagaaaaagtatatgagctcctaggattattgggtgaagttcatcctagtgagatgataaataatgcagaaaacctgttccgcgcttttctgggtgaacttaagacccaggtatgatgaactttatgacattctgcttccatagatgtggttgtgtttttctcttgtaatgacatcttcttaaatcttttcttttagatgacatcagcagtaagagagcccaaactacctgttctggcaggatgtctgaaggggttgtcctcacttctgtgcaacttcactaagtccatggaagaaggtattgcttggcttcacttgattttctttattcaaaaactgtaagtctaaccagcaatgcctgattatttctttgaactcttaaccaatcctgaatttacatacagtagtgagaaataatctagagggacctgtgggccctcccgagttcccctgatgatgacatctttcccaactacagcacaacagcaaggtgggcattaacattgatgttgtccactgagctttgtcagatctcaccagtttaacgtgcacacatttgtgtatgtgtatttagttctgtgcagttgtttaaaattttatttattttttttgagacagaatcttgctctgtcgctcaggctggagtgcagtggtactttcttggctcactgcaacctctgcttcccaggttcaagcagttcttcacttcagcctcctgaatagctgggactataggcacgcaccaccacacctggcaaattactttctttttttttttaaacagagtctcgctccgtagcccagggtggagtgcagtggctcgatctcaggtcactgcagcctctgcctccctggttcaagtgattctcctgcctcagcctcccgagtacctgggattacaggcactcgccactaaatggcaaattttttttgtatttttagtagagatggggtttcaccatgttggccaggctggtttcgaactcctgacctcaaatgatctgcctgccttggcctcccaaagtgctgggattacaggcatgagccaccgcacccggcctaatttttgtatttttagtagagatggggtttcaccatgttggccaggctgttctcaaactcatgggctctggtgatccgcctgcctcaacttcctaaagttctgggattacaggcatgagccattgcacctggccctttttaattctttttttttctttttataattgagacagggtatcattatgttgcccaggctggtcttgaactcctgggctcaagtaatctgtccaccttgatctcccaaagtgctgggattataggcatgagccaccacacctagcgagttttgtgtaattctgtcacgtgtatgtaccattgtaatcaaggtattgaacagattgattagcacaagggtcccaatgtgctactgacttagagccatagttaatctcttcccccatcttggccacctgataacccttcatctgtctccatctgtggtttcgtcatttcaaaaagttacacagatgaactcatggtatgtagcttttcctgtgtggcttatttcacttagcatagtgtctttcaggtttgtccatatcctgatatgtcagcattgtctttttttttgaaggctgaatcatattcctgtgtgtatttactgcattttgttgattcattcatccgtatatgggcacttggtttgcctctacttactggttattctcagtagtattgccatgatcattgttgtacagaaatctgttggcagtccctgctgttgattcttttggatatatacttagaattgtgattgttgggttgtatggtaaccttagttttaattttctgagaaatcgtcatactgtttttcacagtagctgcagcattttacattcccaccaacagtgcacaagggttgcagcttctccacatccttactaacttgtcattttctgtgtttttggtagcagacatcctaatgcctaatggttgcgaagggatatctcgtggttttgatttccgtttccctgatgatgagtgacgttggttgtgcatcttttcatgtactcaccatttgtgtgcctttagagaaatgtctgttcagatcttttgcccattttttaggttaattggtttgtttgactttttgttgagttgtagatatcattttctttctttctttcctttttttttggagacagggtcttgctctgtcacccaggctggagagcagtggctcaaacatggctcactgcaccctcaacttcttgggctcaagggaacctcccacattagcctcccaagtagctaggaccacaggtgtatacctgatattaaaaaatgttttgtagagacacggtcttgccttattgcccaggctggtttcaagctcttgggctcaagtgatcctcctgccttggctccccagagtactagggttgcaggtgtgagccactgtgcctagccagataccagtttcttaacagatacatgatacatgagttgcaaatattttctgtctccctttttcttttcttttttttttctgagacagggtctcactctgttgcccaggctggagtgcagtgatgctagcatggctctctgcctgcctccacctcctgggctcaagtgatcctcctacctccgcctcccaagtagctgggaccacaggcatgtgccaccacagatgggtaatttttgtactttttgaagagacatggtttccccatgttgcccaggctggtctccaaccaagagatctgcccaccttggcctcccaaagtgctgggattacaggtgtgagccgctgcacctggcccttctctcattttttgagttgccttttcactgtgttgattatgtcctttggtacacaaaaatcccttgttttgctaaagttcagtttttttattttttttatttttttaagagatggggtctccccaggcaaaagtacagtggctactcacagatgcaatcatggctcactgcagtcttgaactcctgactcaagcagttctcccacctcagcatcaaaaatagctgagactataggcaccaccatgcctggctccttttatattttgcagagatggagtctcgctgtgttgcccaggctggtattgaactcctcccatcaagtgaccctcccmcctcagtctccaaagcattgggattataggcatgacctgccacgcctggccaatgaaattcttttctttttttgaaaggacaaatataactttttatcctgaaataatcttttttttttttttttttccggagtcttgctctgtcgcccaggctggagtgcagtggcatgatcttggctcactgcaagctcccccttccgggttcacgccattctcccgcctaagcctcccgagtagctgggactacaggcacccgccaccacgcccagctaattttgtttttgtatttttagcagagacggggtttcaccgtgttagccaggatggtctcattctcctcacctcgtgatctgcccggctcggcctcccaaagtgctgggattacaggtgtgaaccactgtgcctggccgatcctaaaataatcttaaggggagggaaaaagctcctttgctcttccttatcacttttttttttttttttgagacagagtttcactcttgtcacccagcctggagtgcaatggcgcgatcttggctcactgcaacctctgcctcctgggttcaagcctttctcttgcctcagcctcccgagtagctgggattacaggcgtgtgccaccatgctcagcggatttttgtatttttagtaaagatggggtttcaccatgttggccaggctggtctccaactcctgacctcaggtgatccacctgcctcggcctcccaaagtgctgggattacaaggcatgagccaccacccctggcctccttatcactttatcttcaagtaattaccaaatgtttggacctactttgtttttcttccattaggttgaaacttacaaaattacttatatccaatgatttttttttaacctatgtaggcagcagtttcattttaagctaatgtttctacccatgccttcttccttgcttatcaagattgttagagtagccctgtgtaattttccttcgtgtcttctctctcctctctcctgtatcctatggctcccacttcctcagcttcttttcaactgtcacccctcttaggaagcatttatgattcccctgaggtgagcacttcctctggcctctgtactcccctctgtgacagcacttacggtcatattttaagtttgttaggtcatatgtttaattctctcctttgaccctgttggcaggtgatgttgcttatttgtctttatgtttacttggcttataaatcagcactcagtgaacatatatagtggaaggaaaatagtagcacttagtgctcatttattgtgtgttaaggactattctagacgtgttgcaaggcaagttcctgtaatgactcttcatggcaggtaaaatgtctctgttgtatagattagtaaactgccactcagacaggttaagtaacttgccccaagttacacagtgacttgcgtggttaggagaataatggccaccagggtgtcccatcctaatccctgttatgcttcatggcatagcggaattaaggttgctaatcagctgaccttgaactgaagagatgatcctggatcatccccatgggcttggtgtgatcacagggtccttaaatgtggaagagggaggcacagaggaggtcagaggaaggggatctggaaggcggcaggagccaaggcatgggggtgcctctggaggctggagaagtgagaaaagggttctcccctagagcctcttggaaggagcacagccctgctgatgccttaaatttagctcaatatgagaatcatttcagacttctcacctttagaattataggtaataaatctgtattgttttaaactattaagtttgtggtaagttgttatggcaacactaggaaactaatatagctaacaaatggcaagtctgggatttaagccttggtctgaggctaaaatttatactttttttgtgatgccatgatcatgtgacttcaagcactaaatactaattcatgggtacatatatataaggcacccagggccgggcgcggtggctcacgcctgtaatcccagcactttgggaggctgaggtgggcggatcacctgaggctgggagttcgagaccagcctgaccaacatggagaaaccccgtctctactaaaaaatacaaaaaattagctgggcgtggtggcgcatgcctgtaatcccagctactcaggaggctgaggcaggagaatcacttgaacctgggaggcggaggttgcagtgagctgagatcgcgccattgcactccagcctgggcgacaagaacaaaactctgtctcaaaaaaaaaaaaaaaacaaggcacccaggaaatacagactgtatgaatgacttataaaaataattgtaaggccaggcaaggtggctcccgcctgtaatcccagcactttgggaggctgaggtgggcagatcacaaggtcaagagatcgagaccatcctggccaacgtggtgaaatcccgtctctactaaaaatacaaaaattagctgggcatggtggcacatgcctgtaatcttgaacctgggaggcagaggctgcagtgacccgagatcgcgccactgccctccagcctggcaacagagcaagactccatctcaaaaaaaatttttatatatatacatatatataaacgcgtgtgtgtgtgtgtgtgtgtgtgtgtgcaaatatattttttttgagacagggtctcactttgttatccaggctgtagtgcagtgctgtgatatgggctcactgcatcctcaacctcctgggctcaaatgatgctcccaccgtggtcctccccaagtagctggggactataggtgcatgccaccatgtcctgctaatttttattttatttttctttttgagacttgagtcttgccctgtcacctagactggagtgcagtggcgcgatcttggctcactgtaacctctgcctcccacgttcaagtgattcttgtgcctgagcctcccaagtagctgggattataggtgcgcaatgccatgtccagctaatttttgtgtttttagtagagacggggtttcaccatgttgcccaggctggtcttgaactcctgggctcaagcaatccacctgccttggcctccaaagtgccgggattacaggcataagccactgtacccggccccaactaatttttgtattttttgtagagatggggtttcaccatgtcggtcaggcttgtcttgaactcctgagctgaagcaatccacccgccttaccctcccaaaggtgctcagattacaggcttgaggcactgtgcctggccatgggtgccatctatctaaagagtgatgaacttggtgttaaaccagtaattgaaatcaccaagttcctaccatcatgagctcagtctagtggaggagacagatgaacaaataaagcagctctgctgattttggggttcagcagtgcccagaggtggggtgtagtgaagaggaatgccagaatttggagaggtggagcacacgacccacgggtactttctgaggatgtaacgcagaagtcgtgatcagaaggaggagagggagacagctggggaagtgctgggaagagcagtcattccaggcagcagctgctcagcacctggccccatgctcggccagtctctagccctgtgcttagcctgcgtgcagtggtccgagggtccacaagagctggtgtgtcaagagtgtggaggtacacaaagtgggccagggtgagatgggaaggacgcagggttggtgtttgacagttttctgagctgggatctcattccagatggaatgggagccagagcttttcaaaaaggagtggatgtgggccaagagatgtttcacaggggtctgcctgactgctgttgggtgtgggatgtgagttagtgtaggattgagagactgtgagtgagggactgagggctgtgcagtgactcctaagctgaatgggatgggagagaccgggttttttgtagaaacctggccttttgtgttggatatatttaactagagacacttaggaagcatccaggcttagatatcaggtgtgcagttgtgcgtgtaacaggggatcttgcagcagaaatcagacttcaggctatacatttggaggtcttcatcacgtaggtagtatttaaagttaggagtgtgagcaagatgaggagggggtgagagtgcagagaccaggcggagggtctcaagagagtgctgaggaggcagtgcagggctgcctcgcatccggtggagtttggggaggaggaggaactggcagtaagtggtgggttcagctccacgagaaccacatccattgaacattggagaaatgggacctctagagtgaagagcgggaggaagtggaggccatttgtagaaaacatgctagacaaatcttgtaatggaagagagyaaagaaatgggctgtggctgatgggagatgtgggggtaagagaggggtttttttttgaggcagagtcttgttggagtgcagtggcacgatcttggctcactgcagcctctgcctcccgagttcaagcaattctcatgcctcagcctaccaagtagctgggattaccggtatgcgccaccacacccagctaatttttcctatttttagtagagacggggtttcactgtgttggccaggctggtctcaaactcctgacctcaggtgatctgcccaccttggcctcccaaagtgctgggattacaggtgtgagccactgcacctggccaagagagggtttaaaaagtagaagtaggccgggcgtggtggctcacacctgtaatcccggcactttgggaggctgaggcaggtgtatcatgaggtcaggagttcaagaccagcttggccaagatagtgaaaccccatctctactaaaaatacaaaacaattagccgggcgtggtggcaggcgcctgtaatcccagctactcgggaggctgagacaggagaatagcttgaacccaggaagtggaggttgtggtgagctgagatcgtgccactgcactccagcctgggtgatagagtgaaactcggtgtcaaaaaaaaaggatagaattttcacacctatgttcctagcagcaagtccatagtgagccaaagggccagaaccacccaagtgttcatccagggatgaatggataagcaaaatatggcacgtagacacaatggaacattacttagacttaaaaaggcaggaaagtctgacacatgctgcagcatggatgaaccttgcagacaggatgctaagtggaataagccagccacgaaaggcaaacaatgtgtggtttcactcacacgaggtacttagagtagtcagattcacagagacaaagtaaaatagaggttactggggctgggggaggggaaatgggagttagtgtttgatgggcacccttctgttattgatggtgaaaacattttgggtatagacaatagtgatggttacacaacagtgtgaatatgtttagtgccaacgaattgtatctgtacacattgtttaaatgataaatatgtctgttttaccacattgaaaaaaacagatacaagaccatgcttctacagggagtgggccactagagggaggggctgcaggagagtggactgtggagggcagagcctggagaagtctgtccttgctaagtccccaccctaaacccactgtgtactgtgggtgtccttgtgtctgcacacttgcgtttattaacatgactattttctatctgaatgaccttttccccaactagtacctattctttcagtcttagaacaaatgctaccatatctggaaagcctttatagaatactcatagtcagaagaaatctgcttgtcatgaattccaaagtagctttttttgtatctcatttatgccaccattctgcaaccatacagatgtttctctgctttaaggcctctctgaccacattctctctccacctcctatcacatcatcatcagggctctgtctcaaatatgtcagtccttgcaatgaaaagcaaacagttcttgagtctctgctgattacaagtcactgttagaagggtagagaaattagtgatgaataaagcatgactctatagctacaatgaataatgtggtgggagacagttatgcaaataattgtgatgtcagtcaggccaggattagagcctcatgttatagttatgtgcctgttttatcttcccttttagttaataagtatgctgaggtcaaagatcataatttatttgtatttgtaattgtcataatatcttggcatgtactatgtttttttttctgttttttttttttttttaatttttttcttacatgtactaggtrttgaataaatgcctgggtgtattggggagaatggtatgtttggccatgagtaagttactttatttaatcctccagactatcctaaaaggtatatacggtccctattgcaaataagaaaattgaggctctgagagattatctaacagagcttttaagtgatgagttggtgtttaaatctcttagagcttgtaagtgataggttggtgcttaaaccatgtctttgttattccagattttctttctgttttctcgcagtcataaccgtgcagcagtaataacttgcaactttagctggatggaatgatgaaagatgtttctcctgaattcacaagagattaatggggttaatataggtgtcaagctgtctgtaaagtgtgttatgtgatactgttattacgatttgtaacaggcttcttggtatttccctagatccccagacttcaagggagatttttaattttgtactaaaggcaattcgtcctcaggtaggattaatattactattaatattattctaatgcctttacagtgcagactttcaaatactgatggtgaatttttcttttctaaaatagattgatctgaagagatatgctgtgccctcaggtaggattctgtttataatgaggtataatattttagattactaaattaacatctcaagtaagcttttgcttaaactttgaatgaaagcaaatgtgataacatctgtgatgtttcacacacagttatttacagggaggctttcggtgacttagtaagctctggttgaaatgctgatactcaggttacatggttgaaagcactttattttagggtatctttcaggggatccaggctgtttgattctgactttgcctcaatgaatcctgattccacttctgacccttgttttgggatttgtcagccaagttatgggcctgttaattggtagtgttagagctctgacaggaatccctgggttactgtagtgtaatggtactagatcttcctgagcacagtgttgactttgacatatccctgcaggtttgttggttttctgttctgtgttatgtcgtctgattttaaatataatggcatttgcatttgcagctggcttgcgcctatttgccctgcatgcatctcagtttagcacctgccttctggacaactacgtgtctctatttgaagtcttgttaaagtggtgtgcccacacaaatgtagaattgaaaaaagctgcactttcagccctggaatcctttctgaaacaggtaccacaaattcaactgtcatttaacaatatttctttcacacacagaattaaattccctttgcatgcatgcatgtttgaaaataaatacaagttgatctgtagcttctgtagtatttaaagcagaaagatgttgatcagccagccatatgggaggcagccagactgaaagagagctagggagatgccagatttgattagggcctcagagcctagattgagacaagtgtaatggagcaaagacgtggtgaggtgatggccggaagggctgggaggtcagggctggagagtgggtggagggctgaggggagccccatctctcctggaagaggagggctagctgtctccaggggatagatgcttgtgtgtcaacttgaaaacaaggggtgcctctttgccattgtggattttccacctggataggaggtggttacagaatctgtacctgcgtatgtggaagcttgtctggtcggctgaggagaccgtgcttgtcattctgagcactggtctccaggatgtcctgggtgtccagaggtggctgcaggggcctggccattaaggaagtggacttctggggttgctctgagggaaaggactggagattcacaacaaatgttttcttaggggccctgctgtacatgggtaaacagtagctgcattcacagggtatccatgcaaacctgtgtgaacagtgtggcagttgtgttagcctgagagtcacagccgggatgtgtggaaggagaagagagagcactggcatccttttttcatgtctgggcctgccttccaaaaaactgagccgatgggcctcatctttggcctctgcctctgccgcctgtccctctcgcctccttagtctccctgctgtacttggccttcccgtcagacttgtgttccccctgaagtcactcttggctttgaggttaccttggtccttctcataaaactcctgttacgctgaacttggctggccttacttgctaagggaaataaaaatcagaggaattattttttactgattcatatgaatatgtttggatctcagtaaacatttactgcgataaacatcttgacagagagaatttcatgccttgttagcaaggaggagtgtccggaatgtgtgcagagggatcatccctggtggcaccctgggggccttgttccctagcgatgcctgcctttcctagcacagggctgggtggggcgtgggcctgcagggaagccggccagccctccctccactgcgctggttgtctttaatgagccacgcagacatctctgtttcacatccttgccagagacttttcagtcccccactccaattcttaatgaaaactacattgaatagattttagagtttcattgaggaaatatattctacctgctaatctctacctcgtgagaaagttatttgagcttagtcaggggagaagttcaagagaactatcctcaatgctgccctcagggctgatgcctgttgcaagtttgggagtttgcaatataccctcaaatttgatactcacatctatggtttattacagctaaagggcccagataaaaatcaaccgaaggaagcggcacacagtgcagagatgaagaaagtaccaaatgtggatcttccctggtcctctccccgcagagtcagggcagcattcctttcccagcatccatgtgtggagcattgactgggtgctcccccaaacctctgtgtttggggtttcccttggggccccaccctgtaggcatagtgggttgttgggtctcggcttccagggatgctgtgtgacccaaagctcccattccgagtcacattgttaccaggtgtggtcagctccaccctgagtcccattattagatcatcccttgtgacctgaggccccaggcaaggagaggcaccctctttccctccttcttcagaatagggagtgaggagagaggaagaaagagggaaagaggactttacataaaggatacataattttttggccttttttccactatgttgaatatattttcctcacagtgacatctatatgatgtgttttttttgttgctgtttttttggtttttttttttttttgagatggagttttgctctgtcacccaggctggagtgcagtagcgcaagcttgggttactgcaacctctgcctcctgcgtttaagcaattctcgtgcctcagcctcccaaatagttgggattataggcacctgccaccgtgcctggataatttttgtatttttgttagagacagggtttcaccatgttggccaggctgacctcaggtcatccacccttcttggcctcccaaagggctgggatgacaggcgtgagctactgcgcccggccaacatctgtgtgattaattttcagtggcagtgtaatatatgatatttatgagccatagtgttttaatctgtcctctgtctgctactgttgaataattattttcaagtctttaatactatatccaggaaatagttgaataaagatgcgttaaaaacatgcttactgggaatmcaataatagaaaattagcattatagtatataatatttgctattctgtaattaagtaaaatgctgttgtttacttcttgagaaacatttatgatatgttttgtgaagaaggaaattatgaaacagtatatacaatgtttcattcttctaaaacaaataaggagcaaagttccccgaaggtcaggcgctaagacctagtggctttagggggattgggaagtgtatggataagttggcagtggaaggtggatttttttttctgcctttgataattgtctagatagatttcttccattcttattctgggcagtctttgtgctgaaatggggaatgctctttgaatacctgtattagttcttgcatttaggctcttgtctcttggtttggtaaataatgatctatttgcttctcagacgacattttccccttgcatcacttaatttaagctttatagtttgtagcttatttttttgaaaactgagatgctttgtctttctgattgttctgaactctatttattgatgacgtctgaagtcactggtcccctgacagctctctttcaccctgtgggtgacaggtgagattgttctgaactctgtttattgacgatgtctgaagtcactggtcccctgacagctctctttcaccctgtgggtgacaggtgagctctaaagactgctctttgcttcctcagagagccttaattcaaaacctgtttttggttttttttktttttttttttcagacttatgtgtatccttggtctcttagtcccttctctaggaaaaatgtatcacatagccttatttaagacacttttctgaacctgatagagactaagcaaaatggaagcaaagggtctttatgattaaaagcaattgcgtgtaactataacagtacattagtagcatctaaacagttctartttttccatgtttgtatagattccattgctattaaatatttccaaaaaaataaatattatktatttgcaggtttctaatatggtggcgaaaaatgcagaaatrcataaaaataaactgcagtactttatggagcagttttatggaatcatcagaaatgtggattcgaacaacaaggagttatctattgctatccgtggatatggactttttgcaggagtatgtctcattaacttactctattttgtcttggtttcacgtgattgtttaaaggaatctaattcattgcattttgaatagtgtctaatacttgtaacaatacagtagacccttgaataacatgggcgtgaactgcacaggctcacttacatgcagatgtttttctaccatacggatcaaaaatacagtgtgtgctggatgtgaaacttatatagagggctgaccttttgtatatgaggcttccacagggtgactgtgggacttgagtatgcatggatttaggtatactgaggaggcctggaaccaatccctcccgcatgtactgagggtcactgtattagtattgtttattaacagttaagatttcttcagtgtctgctgtgtactagaattctttacatgtggtatctcaaaatctcctaacccttaggagctcagtattactctgttttgcagattagcaaactgagatgcagagaaattaggaaacttgtcaagagactcagaattgacagaaccaaggcataagtccaagtgtgaagaatagaaacaccatgtttcccctctgtgctatgctgctccttattcctaaagtaaaattgtagttgatttcacaacgttttaggaagagaagttaaaaaaaaagtttatatgacagaaagagatatatttaagaatattagctaggtgtggcggcccacacctgtaatctcaccatctcaccgctttgggaggccgaggcgggcagattgcctgaggtcaggggtttgagaccagcctggccaaggtggtaaaaccctgtctgtactaaaaatacaaaaattagccgggcatggtagcacatacctgtaatcccaactgcttgggaggctgaggcaggagaatctcttaaactcaggaggcagaggtggcagtgagctgtgatcgagccactgcactccaatctgggcaacagagacactatctcttaaaaatttttttttaaagaaaaaatattgagaataaccctagttatttcctcttagtggaattctgtgacttctgctttgtagaaaaaacaactgatttcttttttcttcctacaatctctccctttttttcttctttctttttttctttcttttttttttttaatttttgagttggagtttcgcttttgttgcccaggctggagtgcgatggcatgacctcggctcaccacaacctccacctcccgggttcaagcaattctcctgcctcagcctcccaagtgctgggattacaggcatgctccaccacacctgggtatttttttttttgtatttttagtagagacggggtttctccatgttggtcaggctggtcccgaactcccgacctcaggtgatccgcccaccttggcctcccaaagtgctgggattacaggcatgagccaccgctcctggcctctccctttttcctttctttttcttttttgcctctcaggctggagtgtagtggtacaatcataactcactgtagccctgacctctagggctaagcaatcctgctgccttaacttcccgagtaactgggaccacagacatgagccaccatgcccagcaaattttttaatctttcgtagagacgatatctcacttcgttacacagactgttcatgaactcctggcttcaagcaaacctcccgcctcagtccccaaagcactggacttacagctgtaagccacagtgcccagcctttccctttttcttaatcttcatctccatttgtctctgttggcgactttaaatatgcttagggcagaagaaacagaatggcagaaggctctgagctaaaagattgcatgagattttccctttacacagtgatctatccccacttgagcttgtccctgtggctagagcatgataggcaggagaggggaaatggatctgaagaggtgcaccatcagatcctcggggagcctggactagattcagaagtcctagaaaagaagccttggaaaagtctgaaattgagcaattacattagcgcatttgtgagtctgaaaaaatggctctggtgtggtagggtgtgtgacatggagcatcttccagtcatgtatggactcctggcctctcctgtaggtggacagccttggggcagggactgcctctcatttgtcctcagtacccactgtctaaacagtgcctagaacatagctgacaaccaataaatgcttcctgtgtgaataaatatttaaaatgtggttacagattattatacaaagcatctttataatgagatatattttatttatttatttattttttgaggtggaacctcactgttgcccaggctggagtgcagtggcgcgatctcagctcaccgcaacctccgcttcctgggttcaagtgattctcctgcctcagcctcttgagtagctgggattacagttgtgcgccaccatgcctggccaatttttttttttttttttttaagtagagacggggtttcaccatggtggtcaggctggtctcaaactcgtgacctcaagtgatctgcccgcctcggcctcccaaagtgctgggattacaggcatgggccgccgcacccggccagatactgtattttatatctgtatttcttcttaattaaaaagcttgtggctgggcacagtggctcccgcctgtaatcccagcactttgggaggctgaggtgggcagatcacctgaggtcgggagtttgagaccagcctgaccaacacggagaaaccctgtctctacttaatacaaaaaaaaaaaaaaaatagccaggcgtggtggcacatgcctgtaatcccagctactcgggaggctgaagcgggagaatcacttgaacctgggagttggaggttgtggtgagctgagatcacgccattgcactccagcctggacaagagcgaaacttcgtctcaaaaaaaaaagaagccttgttaaacttgtgtttataatcacatggcttaacatgacaccttaaatattattttgatcttgataagattgatgaagacttctgttttaccttttctaaagccgtgcaaggttataaacgcaaaagatgttgacttcatgtacgttgagctcattcagcgctgcaagcagatgttcctcacccagacagacactggtgacgaccgtgtttatcagatgccaagcttcctccagtctgttgcaagcgtcttgctgtaccttgacacagtaagtgaactaaactgagcacaattttaagtatttaatcttcatttcttcaaataatttgatggartcatacaatacatttagtgtaggcactgttgggaacaacatgacagttttagttagtactttgtggcaatagaattattgtcatgaaactcgattttttgttatccagaacaggaaaaaaatatttgtttctccttccatctttctgaaagatttggaattgttgcttgggatagaattgcacctcaagacaatttttactctgagtgtgtgttttttttttaaggcaatcacagtaatacatgttaagcagcaggttagatgacaaaccatgtttttcttttaataagtatctaattcagttgtaattactttgaatatttgtattattcctgtattcattgattacctcctctaactcacggtttgctgattatttccggtaggttcctgaggtgtatactccagttctggagcacctcgtggtgatgcagatagacagtttmccacagtacagtccaaaaatgcagctggtgtgttgcagagccatagtgaaggtgttcctagctttggcagcaaaagggccagttctcaggaattgcattagtactgtgggtaagtttgcaatttattgtatttatgagtaatgatggataattaacacattatttgatataggtaaagagaatctggttaccaaattcttttgtatctttgacacaacttttgaactcctaaattttggtagaccaaaatcttttcctttttttcatcctattacctctgaattttaatagttctattaatagaactattaattttaatagttttttttcattttttttggtgacaagagtctcgctctgtcccccaggctggagtgcagtggcatgatcttggctcactgcaaccactgcctcctgggttcaagcgattctcttgcctcagcttccagagtagctgggactacaggcgcccgccaccatgcccggctaatttttgtagttttagtagagacagggtttcaccatattggctaggctggtctcgaactcctgaccttttgatccacctgcctcagcctcccaaagtgctgggattacaggcatgagccaccgcgcctggccaatagttttaagttttaaaattaaagccgtgaatgaacttagaaaataaattgagaggtaaagttgggttccaaaatataatgactgtttgtttttttttgtgagttttgattctgtttttcagtgtttccttcatttttgttttctttttcttttttcagtgcatcagggtttaatcagaatatgttctaaaccagtggtccttccaaaggtaaattctgaatttaatgtttagaaaattaatctgttatcactgaaagctaggaatgttgctgaggttttcgaatataattttgcaaaagtggccgttcttttcttagttattagcaatgccttacattttgaaaagtgtaggacataatacctctatattttgttaggtgaatacacttctaaggtatgaaacatctttaagcataactttaggttttatacatttttgtaaatcagaaatgttttctctcttgaaactctaggacaaattgctaagggaggcatatcttagttcccagaaattataggacatatgatgagatgaaagattgaactatgtacgaaagcaagataaatgatgatagcacattcagtggatattgtattgaagtacttgttggtgtatcacagttttagtcacagaagaatcacatatttttccgttatctatttatttatttatttattttttgagacagagtctcgctctgtcacccaggctggagtgcagtggcacgatcttggctcactgcaaccttcccctccaaggttcaagcgattctcctgtcttagcctcccaagtagctggtattacaggcgaccgccaccttgcccagccaatttttgtgtttagagtagagacattttgccatgttggccaggctggtttcaaactcttgacctcaggtgatccgcccaccttggcctcccagagtgctgggattacaggtgtgagccaccgcacctggccttagctttttaaattatgcttttttaatacgatgtcttccttaatcatatggtctcctatgggtggcagtttaatttagaaaattctgaaaaccagcatgttctggcagcagtgctgcttctgagaatccatcactacatattgtcatgctgtctttctggccagggccctgagtctgaatctgaagaccaccgtgcttcaggggaagtcagaactggcaaatggaaggtgcccacatacaaagactacgtggatctcttcagacatctcctgagctctgaccagatgatggtaacrtttaccattgaaagccataaatgtaccttacttcctttattagtctccatagtttagacataagacttatttcagaattatattttactaactttcaaaagtttaaaacagtgtacttcaaaaataaaaaattaaaaccgtatgaatcaggaagttagaatgagagtggaaataaatgaattgaaagaaacacagacatagaactcctttaacattagttactgtagctgagtcctcattttagctttaaatagcaggatggtatagctcatgctaagctgttcttcctaacaggtccagcctgaggatggatatatatgtatttgtacgtatgtatgtatgtgtacgtttatatwtgtgtgcatatttagttatgtatgcacataagtatatgtgcatgtacttacatgtacacagacataaaagatatagtgtctatatatgcatattacacatatttgtgtttatacatacacatccacagattaattggggtaaatgctttgacaaggattggcctaaatcttctcacttactgctgtatacagagtaagtatttgttacatgactggataaatgacatctgactgaaatgatgctgttataataatttaggaaggtatcttgcaacttgaaaacttccaggtaaatctgctgcagtttatcatcactgtttccataatacccaaaccggcacatacatctgtgtatgtgtcttaatgcttataaaatactaatacatttttgcacaagattttgaagtttattgtttttctttatttaaaggattctattttagcagatgaagcatttttctctgtgaattcctccagtgaaagtctgaatcatttactttatgatgaatttgtaaaatccgttttgaagattgttgagaaattggatcttacacttgaaatacagactgttggggaacaagaggttagaaatttttatcagtagtaatttttcatcatttttgtatcagctgtctttgcatataaatatttaggggacaatagcacatttgtagaggagaactggagaaaatttggttcttcaggattattatgtgccactgatgcatttctgttggatgtaacctattgtatagaaaatgttgttactagatggttcaaaaagtaatttatatatgttaattttttttttgaaaaaattatttactaggttcatttgtttcttattccttagcaatagtaaagagtgacagaaatcttattttatgtagaaatgactttgtatgggatagggaaacctggggttgctcttgtttatagttaaggaaactccaaattgtggtacaaggtgttaaatgtgttcctgatataggaaaatatagataataggaagagaaataagaaaatgccctccctttttttcacacccaattttcctagcctgagttaaagataagtcatggcttaggcctggcgcggtagctgaaacctgtaatcccaggactttgggaggccgaggcaggcagatcacgaggtcaggagattgagaccatcctggctaacacgatgaaaccccgtctctactaaaaaatacaaaaaaaggccaggcgcggtggctcatgcctgtaatcccagcactttgggaggccgaggcaggcggatcacaaggtcaggagatcgagaccatcctggctaacacggtgaaacctcgtctctactaaaaatacaaaaaattagccaggcatggtggcgggcgcctgtagtcccagctgctcgggaggctgaggcaggagaatggcatgaacctgggaggtggaggttgcagtgagccgagattgcaccactgcactccagcctgggcgacagagcgagactctgtctcaaaacaaacaaacaaacaaacaaacaaacaaaatacaaaaaaaatgagccgggcgtggtggcgggcacctgtaatcccaggtactcaggaggcagaggcaggagaatggcgtgaacccgggaggcggagcttgcagtgagctgagattgcgccactgcactccagcctgggtgacagagtgagactccatctcaaaaaaacaaaaggataagtcatggcttaagtctggagctgccctgctctggtccgaggcattggtggtaactggactccatggtaatttggctggtgagaaagaactaagatcctgggaaggtgtcttgcttgctttcgactgcagtgattgtttcagaccagatggtgctgattcgagttcatgcgtcagtacctccactgcagtcctgagaagttagacaagaggcaatggggaggatgtgcagaggaaacatgaagggacacagtacaagccggtggtcacatcagctttattgcacttggagtattctgtttttcatgcgggatgataggtagcaacactgatgtgtggtttattgctctctgtgctttgcaaatgtctaaaataattttattaaaaaaaaaaaaaacttgcccaaagggacttcctggaactgtgtcagctgacagacctgcattttagaacatgtgtgttcattgctgtcttcagtggcttccctttctcctctgttccctgcccttccagcttcattccaacagatcaatgaccacctgttagcacttcccagatatatttggtctccagcctcctcctcccttgttggttcctgctctgtatttctaactacttgtgcaacattttaatttgaatacacagttgtgtttggtaacacaaatttggtgacacaaacttagcgtgtttaaaactgatcttcatgcacttccaaaataccacatttttcatttatctttcttactactgttaataatttctctatttctctttttcttcacttgaaatctctaggtcacctattaaaattctatctctgtcaaggcattattgctagctccctcaagaagtgctgcccacctctggcattttcctatttgtcccattctctcatcacttcctgtgagtccttttggttaacgctttctgcaagtcctgcccttcttatcagaccataggtcttgagcacccatcttggtctttctcgctgttgcaatctttcttcgtagcatcaggccttgaccatgaagtcagttggaaagttatttgttgagtgattcgtgattgaatggtacaatgtttctttgctacaattactctttaagaatggagatgaggcgcctggtgtttggatgatcccaacttcagatccagcggctaacttgcatccagctaaacctaaagatttttcggctttcattaacctggtggaattttgcaggtatttggtaaaattctaattatttaagaatgaaaatgattgttagttattggctgtaatataggaaattccttatatagatgtaagaaatgaaataataggccgggttcggtggctcacgcctgtaatcccagcactttgggaggccgaggcaggtggatcacgaggtcaggagatcaagactatcctggctaacatggtgaaaccccatctctactaaagatacaaaaaattcgccgggcatagtgtcaggcgcctgtagtcccagctactcgggaggctgaggcaggagaatggcatgaacccgggaggtggagcttgcagtgagccgagactgcgccactgcactccagcctgagcaacggagcgagactccgtctcaaaaaataaataaataacaaataataaaagacaaaatctgtaatcgattatatagatctttaaaatatatctaagtgtactaggttacagttttcattttttatatttaaaagatcctcaggtagagaaaaatggattatagatataactaaacattttaggatacctcaaaatgttacgtgatgggtttgtagcttagttgttcgattatgtcccttacaattttaagatcagaatgatacaaatttctaccttcaatttctaatttgtttttacagagagattctccctgagaaacaagcagaattttttgaaccatgggtgtactcattttcatatgaattaattttgcaatctacaaggttgcccctcatcagtggtttctacaaattgctttctattacagtaagaaatgccaagaaaatraaatatttcgaggtgagtctttcttgcaggatgttgaatcttgcgtttttttaggtcatgagtatatataaatgtatcataaaatatgtgattgtggcctatgcagttttaaagtctactaattttattctatgtgtttaaaaaaattgatatgtgaatggcagttggatagcactctaaaaagctagcarcattttttgccctgatgctcaaacacctggctaattatgtaagattaacaaggcctctcaaagtatggtcccaggaccrgcagccttgagcattgctttctgcatcacaaaccttgggggcaggtctctgctgccctgctaagcaccaccaggtgattctggcacccagtgaagtttgagaacaactggattagcattctcgacgctccagtcagtcacatgaggagcccacctgggtaattacagggtgagatgaggaagagggaatggacttagctgtgtgcttggcttctcactagctgccaccttccctcctcttgttctgactagcctgtgccttgaaatgtctgcagagctgattctgcctcctgtcttcattagatgttggtaacttgaaatggattcacccctctgaagacaggctaggaactactggattgggatacagtctcccgattcttgttcagtgtactaacttgctgttttatttgacagggagttagtccaaagagtctgaaacactctcctgaagacccagaaaagtattcttgctttgctttatttgtgaaatttggcaaagaggtaatttttaaatgatttatcttagtgttatcatgaactgtttttaaatgaatatctattgaaaaaatcctagtgatcataaataattattttaagaattggggctgggtgcggtggctcatgcccttaatcccagcactttgggaggccgaggtgggaggatcacaaggtcagtagttcgagaccagcctgaccaatgtagtgaaaccgtgtctctactaaaaatacaaaaattagccaggcgtggtggtgcacgcctgtaatcccagctcctcagtaggctgtgaggctgaggcaggagaactgattgaaccctggaggcagaagttgcagtgagctgagattgcactactgtactccaggctgggtgacacagcgagactctgtctcaaaaaaaaacaattgtgtcaggttaggaggctgggggaggagaatcgcttgaacccgggagatggaggttgcagtgagccgagatagtgccactgcactccagcctggggaacagagcaagactgtgtctcaaaaaaaaaaataaataaataaataaataaaaataaaaatgtgtttgctaaatctggagcgggactaaggtcctaaaaaaactaattagaggaagttattgtgcttcaaaagtccctcagccaggcactttggttcgtgcctgtaatcctagcactttgggaggccaaggtgggtggatcacttgagggcaggagttcaagaccagcctggccaacatggcgaaatcccatctgtactaaaaatacaaaaaattagccaggtgtggttgtacatgcctgtaatcccacctacttgggatgccgaggcaggagaatcgcttgaaggatggcagaggttgcagtgagccgagattgcaccatgcactccagcctggctgacagcacgactctatcttacaaaaaaaaaaaaaaaaaaagtccctcaagctctcttaacataattcagttgagtgatgacaactcaagatgaaatagattcttgtttttccatgtagtaggtattaagcatttcgacaaattaactttcctggaggttagtgtgtaatttgtaagtgaatgtggtcatgtcaataaaggctacgtgccaatttttgtatttgagaatagggcaaatactttttagttgattttcaaatgtaggctctattcagatatacattactgtcttctttcttgttaaggtggcagttaaaatgaagcagtacaaagatgaacttttggcctcttgtttgacctttcttctgtccttgccacacaacatcattgaactcgatgttagagcctacgttcctgcactgcaggtaggcgttgtcttgaacagagccatctcttcatcrctgttgtgagtcccagagcacatagaaacaccatcctcttgccctggcagtcccagcaggcgtttcctcacaggcgtgcccgggtcagggtctgcttctgccacttactggctttgggacttagacccttggtgactctgaactgcacttggaggtcgatgtgagagttaaacctgtgtgccttgaaaggctgcrgtataccacagccacagagacagctgcttgctttcctcctaattacctggactgaactctccagcggtgtcgggcatccagtaataaaaaggagtattaattagaaatcacaattacttggtgtttttttcctctaaatcttatatttcctgcgtttcagtttaacttgtttgtattaacatacagatggctttcaaactgggcctgagctatacccccttggcagaagtaggcctgaatgctctagaagaatggtcaatttatattgacagacatgtaatgcagccttattacaaagacattctcccctgcctggatggatacctgaagacttcagccttgtcaggtaatgtttagaagaattgtgatgtgtattgtaattaaaatggaaatggagtaactataataggtaggactgtatttttgtaacttctgaaatttaagcccagtgtgttcaaaatatgtttgattgctatttttgtaatttccctaatttatctgactctaattgtgataaagaaatatagttgaggtattaaaaaatttttcatttactcacttatagcttactaagatttataaaatcttcaaagacaagtactgtcttcaataccttgaaatttttatgactcctaatacactgctttgcaaaaaaaacttgttgaataaatcagtcaggaattaaacacttcagaaaattcaacagtaattttgtatttttactttcactagatttttattgctttttaaaacataactggtgaagcacactaatggtagctaagaattgcgaaaaaaatgtcatcatagaaaaaacaggtttgggaaaagagtcaaagaaaaaaattatctgcccaggtcaaaatattactagtcaagaaaagaaaaagtaggacttcagagttggggtggggcacagacttaaactggaatgaaaagagacattgtcatccgatgcaagcaaaaagattctgttgggagaaagactgaagtatttgtaagaatttaagctttactatcttcacagtagaagtcaagtattaatttataaggtttttttcttcatgaggccaaaaaaagaaatacagaaaaaaaattgtgaggttttacctgtgtaaatcattattttattgttaaatcttattggcttggaaacattaagtgaaagttgtgtgacagatttcatgcactgtgtctcctttttctgacatcctcagtgcatatgcagagttcatgaagaaagagtcacgatttttttacagattgtaataacaagcatattttagagaccaaaattacaaactagttaacctttatagcttttaaaattcacatttatataaggagtgccattatttgagtattcatgacaaatacatcacttagtaaaatgaatatatctgatagcatatatctttatagtatttaattttcttttttgagttctgttaactcattgaaaagttttagattagtaaaggaagttactgtgattgttttaaaggatttgcctgttaaacatgtaccctatctagatgattcgataattgagaaaagcagaaagtaagcaaaattaggtgacaaaacaaaatctatcatgttagagacagaagttagtgttttaataactttttttgatgtatcaaacttccagaacaattgcaggaacagtaaaaagaactccatgtgttctatctagattcaccagttattaagattttgtaccatttatgttgttgcatgtactttctctattgtgtgtttgtgcatgtttttatatttacatgggacattttttttggaaccgtttgtgaataagccgaaggtgtcatagatcttgaagacttcattgtatatttcttaagagtgaggacattcttttacgtaactacagtattattatcaaaatccagaaaaataacatggatacatattcttccaagtaacagtcaataggcacatttttcacttgccctattaatttctttttttagctgcatttttcctggtttagaattcagtgtaggatcatgtgttacttttagttgtaactctttagctttctttaatgtgggatagttcttcaacctttcttagttctcatgacttgacattttgaaggctgcaggccagttattttgtacagtgtccttctatgtgggtttgtctgatgtttcctcttgatgagttttgggctgtgcctttttgacagacgctgggttctcttcaggacacttggtgcctttgctggttgtttccactgtaaccatttggtcagtgtttgcatcatctttttgtggttgtcaggttactgtttttctctctgtgtgagttagtaatttgaggcattccatgctccactttctggagtgatcagtcctgaggcctttaggtggtacagaggaaggtagatgctgggcagggggaggtcccaggtgctcccaagggtgtgaggaggtcatcccccatggggtggcctggcatggggtttacccaagccagatgaggcacccacgtgttgggacagctgtctgggatgttggggtgcaggcagggtgagaagggcgatggaggtagtagtttggttacatacaggagattgaacaaatacataaattcattgagaataagggaaactaggtttctcatgttgaagtgagctacaaatacagaaagacaggaaactggaatggacactgtggagttgcattggaagtgggtatatcagtgtgaacccatggtcctccgtctccctctgcctctccccagttatatatgtgcattcacttatggatgcatctaaataaatgtgaaaatagaactgagagagagagagtgtgtgtttgtgtgttacatgtactctggccactgaagggacctctaggagtgtggtatctgaatagtaacaagcaaacctggcacccaggtcatggcctccaaatctcattttccttttttttattattattattattattttgagacagagtctcactctgtttcccaggcgggagagcagtggtgcaatcttggctcactgaaacctctgcctgctgggctcaagtggtccttccacctcagcctcccaagtagttgagactacaggcatgcaccaccacgcccagctaatttttgtatttttagtagagatgggggtctcactatgttgaccagactggtctcgaactcctgacctcaagtcatctgcccacctcggcctcccaaagtgctggggttacaggcatgagctaccatgcccagacccacacctcattttccattaatggaaccaggactccttggttccaacctggggccgggaaaatatattatgaacttagaatactgtattttatagaacatccggaaagtaaggacctattcaaagcatgatgggggaaatgtcacaggcaaaagtagtgatgacttgagcatcaaaataaataactttagaaacgttataacccaggtaatcaaataggaagcagtgagcatgtgcagatataaataagtaaaatgagtaagttaaagtttcctagtggttttttttgtttgattgtttggtgtgtaataagttcttataaacttagcttaaattagcacccattgattatttcgtagatttgtaggacacaagtccaaatgggctcagctgggttctctgttaagtcatgtgactgaattcaaggtgttggctagtccaggcttgttcactccccatctaggttgttggcaggattcagttccatgtgattggaggaccaaggttcctgtctccttgctgactgacggctggagcatgattctcaattcctggaggcctctgagtgtcctcctaggtggcccctacaccttcacagccagcatggcactttttgaagtaccatggttttaaagtacctcagccaaacacgtactaatgattgagagtgaaaatggtgattttacagcatagacacctggtagagcccttctttgcccactgactagcagtaggacttgtgggccacacgtgcatcctgatgtgacttgctgaggggaactcagtgccactctgggcctcttctgtcaaagacacatggcctgaatctcctttttcagacagtgaagtcagtgtaaagctcagaaaatttttctggtaagacagtgaatctttgctgtcttggcagattacatagaatgatttcttggctgcacacagtggctcacgcctgtaatcccataacttgggtggatcacctgaggtcaggagtttgagaccagcctggcaaacatggtgaaaccgtgtctctactaaaaagaaaaaaaattagcctggcatgatggcgcacacctgtaatcccagctacttgggaggctgagaccagagaaccacttgaacccgggaggcagaggttgcagtgagccgagatcacgccgttgcactccagcctgggcgacagagtgagacttcatctcaaaaaaaaaaaaaaagaatgacttctcatggtacaggcaaagtccttgatcagtaaaccaaagaagcaaacttttcaagattaagtgacctttgctaaaaatttaactcatctcatactatctttttaggctcagatagtcgctttccgagatttgtcctgtgttaatgtcctttcatattctgaaaccaattgacacaactttcaaacaccagttcccagggtgtctgggagatcagaactcttctcattgaaatacagagatgttatgcatgttaacatgacctccaaatcaatcaataagtctttaaaacattatttctgtttccaatatagtaactgctactagttctaacccacaaaacaaagatttatggggtcagtcctaattctggaaagagatccagacatgaaaatgtctgagattcactgttttatgaggaactaccctccttacttaaaaatgaaaagcaggctgggtgcagtggctcacacctgtaatcccacgtaccattttgattgaccgagggatgaggatcacttaaggccaggagttcgagaccagtctgggcaacataaggagaccttatctttacaatttttttttttttgagacgaaatatcgctctgttacccaggctggagtgcagttgcgtgatcttggctcactgcaacctccgcctcccgggttcaagcagttctcctgcctcagcttcccaagtggctgggattacaggtgcgcaccactgcacctggctaatttcgttacaaaaattttaaaaattagctggatgtggtggtatacgcctgtggtttcagctacttgggaggctgaggtgggaggattgctcaagcctgggaggtcaaggctgcaataagtcatgattgcaccactgcaccatagcctgggtgacagagtgagacccttctgaagaaagaaaaaagaaaaatcaggctgggtgctgtggctcacacctgtaatccaagaaaaatgaaaaatcaggctgggtgcagtggctcacrcctgtaatcccagcacttagggaggccgaggtaggcagatcacgtgaagtcatgagttcgagaccarcctggccaacatggcaaaaccctggctctactaaaaatacaaaaattatctgggtgtggtggcacacacctgtaatcccggctactcgggaggctgaggcagaattgtttgaacccaggaggtggaggttgcagtgagtggagattgtgccactgcactccagcctgggtgacagagcaagactctgtctcaaaaagaaaatcaaaagcatgcatgcaattgtatttctgtactattcttctaatatagccacacaaccacttgttaattatataattactaaactcatgtttcacgtagaaaactggagtgggaaattgagaattgccttacacaccagcagtatgtcagactcatggagctcacagataccactgtctgcagccccccaagagacagcatgcacgtgcctgttagcatgacccaaggctcctaccttcaacggcctataaaagcaaaaaggaaaagcacataaacacaaaaattgtgccttttcatcagtatttcagtattctattaatattttccttagaaattatcaaagtacccaaccatccaaagtatccattaactcagtcagtccaaggttgcaaattgcctaaagataatagagattatcttccagttggcatgctgcacaacgtaattacttgggaaataaaaagtttacccagataatgattcaatttagttggacataaacttattacatttttcatttttttttcttttttttttgagatggagtctcgctctgtcgcccaggctggagcgcagtggcgtgatcttggctcactgcaagctccacctcctgggttcacgccattctcctgccgcagcctcccgagtagctgggaatacaggtgcccgccaccacgcctggctaatttttttgtatttttagtagagatgggggtttcaccatgttatccaggatagtctagatctcctgacctcgtgatccgcccccctcggcctcccaaagtgctgggattacaggcgtgagccacccgtgcccagccacatttttcataatcttaaaagttgtatgggactgtttcagatgttgaaaaatttctggagatggatgtggtgatggttggacaacattgtgaatgtaattaatgccactcaattatatacctaaaaatggttaaaagagtacatttcatgttatgtatattacaccacagttttaaaaaacgttatgagaagtaatgttagcttattarccggaataactatagggaaaacaaacacaagtagaataaagtgcatgttcgtgttatatttaatactgatagataaaatacatttatttaaaccaaaatattaaacttgtctctttaccacagatgtgccttaattatgtgaatattcctaaatgatcccaaattgttttctgtacgatttttaaaatctagcacatttaaaacactgttagttcaacttccttatttttggagaattttaggaatactcaatttacatatctgtataaatcaggacagagctcctttaagagactttataatctaatttatcaataccccccaaatacaggagaacattatacacaaaattagatataggcctttgttaattatagacacatacttgcaaagacacatagagagcttagtaaatagtttcagttctgcaatttgagccaaaaaccaggagatacagacatagccgacaccagctcggtcatggagtccctaacccaggagcgctagaggaattaaagacacacacacagaaatatagagtgtggagtggtgaatcagggggctgacagccttcagagctgagagccaggaacagagatttacccacatatttattgacagcaagccagtgataagcatcgtttctatagattatagattaactaaaatgggaaacaaagggatgggctgaaacaaagggatgggctctggctagttatctgtagcaggagcatgtccttaaggcacagatgcctcatgctattgtttgtggttcaggaacgccttaagttattttctgccctgggtgggtcaggtgttccttgccctcattctaataaacccacaactttcagtgtggacatcatggccatcacgaacatgtcgcagtgctgcagagattttgtttatggccagatttgggggcctgttccccaacagacatagaaaatgctgaatagtccagatatcaaagatctgttttttccagtgaactaaaaattcttaacttattggagctcaaaaaaaaaaaaaaaaaaccactaaaaactggattctcttatcatctctggcccatcagagagtagaactctttaacatcttatagaaaggaaaagaactagctagagagagcagagctaagatcccactgccagggattcattctggaaccaagagaagacttgctggagttaaaccaccggcaggtgccctcccgcggcgcagctcacctggctgtgtcagtgaatgcactggacatctcagaacttttggaaatgactttatagttgtagaactatgactctgcagagaaaaaatgaacatgtgtcaaagtttaattcagcagttaataaaggaaatagtaaaatgttacaactggttcccataacctgagtctaatcatgagaaaacattagacaaatgcatatggagagaccacgtatgaaattactggcatatgattttttaaatgtccaaattatgaaatgcaaggtaatactgaagaacagcttcagtctaaaagagactaaagagataggtcaactaagtgcaatatgctgtcctgaattaaaaacattcttaggtgaatgctgaactcggagtggtgctgaggagtgaatgttgataatctggtttggatggttgtgtggcagttgtgtgggagactgtccttgtggaaaacacacattgaagcattcggggcagtggggtgttgagtcggtcacttaccctcagtgcttcaggaaagaagttatatactctccatcctctgtaagtttatgattgcttaaaaaaaaaaaggaatttattcggggtacttcaacactgtaaatagtcttgttcctcatcaagctcaccataatagttttagtatccactgactattcttctgaatcaggtattactttgatggttgcaaaatggtgattttctacccccatcatttctttcatcctagttgatgttctactgcaagaaacaattttccccrttatttatttatctgtattagtaagatttgtggattcttattttttcagtgggtctaatcttttgccatcatgattggttttgaagcccacattgtcccagatttggcccgagtgtgatgcgtgggagccactcctgctccatgagatgattcatgctcttctcgaccctggagtcagacacttcccaaggagccrtgttccttttggcagacagtgatgtttaaaagcaaccaccatttatattttttgttttagaaacttaatttttttaaatcataatttaggattttaatgtttctatttgacaatatagtttgttgcctctaatgtacattaaatgaatgaatgagtgctattttaaatttattttcgtttactattgatagatgagaccaagaataactgggaagtgtcagctctttctcgggctgcccagaaaggatttaataaagtggtgttaaagcatctgaagaagacaaagaacctttcatcagtaagaagtcctttgtattttctgtaccttacataatgcagagatcagattctaacacttgtgaaaagtaaaaatcttcatttaaaatgttagttgtttttgtatacaaagtagagtacaatataaaaataattttaatatattgaccaggcatggtggcgcacacctgtaatcccagcactttaggagggtgaggtgggtggatcgcttgagctcagcctgggcaacataggaagaccctgtctctattaaaaaatacaaaaaattagctgggtgtggtggcgcatgcctgtggccccagctacttgggaggctgaggtgggagaatcacctgtgcccaggaagttgaggctgtagtgagcaagatcacaccactgcactccagcctgggcaatgggagtggcctgacaaaaaaaattaatatatttttagctatgaaaatataaactatattaactgttttgtttatttttttggtcttgtttttctgttcattcctgccctcaaatgtatttagtggataataaaaggtaaactggttcatattaaataagcaagtcagaatactgataccagggatatgtaagactttcatttatgcttagatcttaaatatgtcatattatcaggttcagtttgttccagttttcttttttgttcttttatggctttttggtgataattccttggggcaagttttctcgagatgagccatacgatgtgatagtaaaatatgacgtaaatagagaaaattgagttagaatagggaaaatagctatttttggaatgaagtaagaattaaaatttgaaaaacttttaacatctaaaactgataatgcaaactctagggtcagttcttctcacctcattattttgggcatcttttgattgagagactagaatgaaactagaaatggcggcataaaagtttttataattttatggcacagcaggataaaataaatatatctctagttttacaaataaaatttctttttttcttatcgatttaatttttttttgaggcaggatctcatgttgtcacccagggtggagtgcattggtgtgatctcagctcactgcagcttcaacctcccaggctcaagtgatcctcccgcctcagccacccgagtagctgggaccacaggcatgtgccactatgcccagctaatttttgtatttttcgtagagatgggttttgcattgttgcccaggctggtcttgaactcctggggttaagcaatccgcccacctcagcctctcaaatgctgggattacagacgtgtgccactgtgctttgccaaaatttttgtacagatacacaatgcctgttccttagcactatggttctctaactgtgacccctgggggatccagggtgcaaggccaaagctatttttactccgttaatttgcaccacggtattatgatggagaacactgttgattctctagcgttgactctgagcacagatttttaaaaatactccgtgtgtgaggcaggaggtgcacctgaagcaggcctgcgtagaaaagtgtgacagctatctggagaaaaagcactgtgtggtgctttgaactgggagctgaagtagccactgctttgtggacacaatttttattgaaatgacaactgaaaggcacactgaggttattcataggtggatatatgcagacattttctctaaaatgaaccgagcctgccactttgaggaaaacttctgaaaatctgttgccaatgataaaatttaagcttttaagtgaactgtaaagttttggagaacttgtaactattgcagtaagtttgatagcttctcattacttaaagatttttttttttttattttgagatggagtctcgctacgttgcccaggctggagtgctcactgcaacctccacctcctgggttcaagcgattctcctgcctcagccttctgaggagctgggattacaggtgcgtgccaccacgcctggctaattgttttatttttagtagagacgggctttcaccatgttggtgaaaggctggtctcgaactcctgacctcgtgatctgcccaccttggcctcccaaaatgctgggatacaggtgtgagccactgcgcccagcctaagatttttttctaataagattggtggtgatatttgcttatgtgattttttgcatatataatgaaatgtgtcaacatttggaatatctgcacaatccagtgaaccagtattttcagatgaggaatacatgatgtttccaaattatacatggatgaaaaatccactcaaagtgcaagatcagccactggattttaacatagtagagtacgtagagttcatgataagaattcagattcgacattgtaactaacctttaagaaactacgctggttcagttttggtgtgatatcaaagaagaataactacagttagctaaaaagactatttaaaatttcttgcctggttttccaactgcaatatcggtgtgaggaccaaactgtctcccagtgagctacactgtaaacggatctgcactactgtggaatggccactttgcccagagtttcatttgtttgaaaaatatagttactttttataacatgtaatgggtttagtagtttaactatttacatagtttctgtgtttcaatttctaatgtcattaatactgataaacaggacctacataaaacagctctttgggggtccttgatatttcttaagagtggaaaggatcctgccaaaaagtttggaactgcggttctaggaaatggacatccaagtgggtggcaaagagttttttcctatgtcttctatttaatctttaacccatttgtaatcacatatatacaattgttcaaatttacagaacgaagcaatatccttagaagaaataagaattagagtagtacaaatgcttggatctctaggaggacaaataaacaaaaatcttctgacaggtaaacttcttttaaaataaataacctctgtagatatatttgtgcttttatttggatgtatccaggtcataatatattctgaatatttgctcctatatgtgatttatatatttctaaataagattataaagaataatatcttgcctaatggtttgactgtatccgtaaaattggaataattcagtatactggtagaacatatgttctagcttgacttgttaagcatgttatccagtttgaaacaatgtaatttgatactcttttccatattagtgtcgggaattccaagttaatctctttgagatccaatattgttaatattatgatatttttagaaatttttccaaatgagaattaccatttttgattagtaggctgcgtgtggtggctcacgcctgtaattccagcactttgggaggctgaggtgggaagattgcctgcgctcaggagtttgagactagcttgggcaacaacatggcaagaagctgtctctattattttaatttaaaagaatcagcttttttttttttttttcccctcgctctgttgcccaagctggaatgcagtggcacaatcttggctcactgcaacctccgcctcccaggttcaagcgattctcctgcctcaggctcctgaatagctgggattacagacagacgccaccatgcctggctaattttttgtatttttagtagagatggggtttcaccatgttggccaggctggtcttcaactcctgacctcaggtgatccaccagcctcggcctcccaaagtgctgggatcactggtgtgagctaccatgccccactgtgcctggccaaaagtctacatttttgattagtaaaaattcctctgtatttttacttttgaaatttggtgttaaatataccagtgacttttggttatttagggagttagagcctgtatttggaaagtgtttcaaagagattttttttttaagtaaaaattttgttcattgactttcttctacaaaatactttaagtaactcttactgaatttggatattaaacatttgagactattaggcttgtttaaaagtaattttactttaaattaaatcgagtgatttctgatgttgtaattacatatctgaggcaaaagaaaagggaaagatgaatgaagtgcttcactttaatagaatgtagaacagctggcattagaaatgttttgatttgtgaataattctgacactaataaaaagaaaaaaagtgtttcattcttcttaaatcttttctaacagtcacgtcctcagatgagatgatgaagagctatgtggcctgggacagagagaagcggctgagctttgcagtgccctttagagagatgaaacctgtcattttcctggatgtgttcctgcctcgagtcacagaattagcgctcacagccagtgacagacaaactaaagtacttctatttttcatttcacccattatttagatcctattgctttaaaaatacatattgcttaggatatagagaacatgtttcagccattccaatattagtaattttgtattttctgtaatatagtaattagaaaactacttacttattagaagtcagtgtcattgataaatgtaagttaagtataaatcatcttaataggtaattgggctgggcatggtggctcatgcctgtaatcccagcactttgggaggccgaggcaggcagatcacttgaggtcaggagtttgagaccagcctggccaacatggtaaaacctgatctttactaaaaatacaaaaattaggtgtgctggcatgcgagtgtagtctcagctactcggtaggctgaggcaggagaatcgtttgaacctgggaggcagtggttgcagcaagccgagattacgccactggattccagcctgggagacagagcgagactccgtctcaaaaaaaaaaaattgcctttcaaaacgttaatataccaaaagctcttcattatataaaatggaacataaagggcatttgagagtgatattcgggctatgcttggttatccccttaactctgggagattagaaacagataatctcaaattttcatacaggcatagcataccttggtgatactgcaggttcagctccagaccaaagcaataaagttaatatctcagtgtagcaaatcacactagttttttggtttttcagtacatgtaaaagttatgtttacactatactctggtctatttagtgtgcaatagcattagaactttatatacatactttaaaatgctttattgcttaaaaatgctaacaaagtgagcacatgctgttggaagaattgagccaatagaatttctcaatgcagggttgccacagaccttcaatttgttaaaaaacacattgtgtccaaagctccataaaatgaggtatgcgtgtattaatttgtaaattttctatagtgcttcaaaaaatatttttacttaaagtgatagttgaaaatgtgctaacagatgaagcaaagttatatagttctttaatatggcaacagtgaaatatacttcccagtttctaaagcttttacattttaattctttgttcttggataaaaaaacaaagtgaacagaatcattagttttatagaacaagaaatgttaattccagttaatttatatttgggttacatgatagttatgtgcaatgaaatttttcttcttaaaggctaaattgagtgacatttcaaatattctcttgtcatcaacgtgataacttaaacattgctgacctcctggtctgttttaggttgcagcctgtgaacttttacatagcatggttatgtttatgttgggcaaagccacgcagatgccagaagggggacagggagccccacccatgtaccagctctataagcggacgtttcctgtgctgcttcgacttgcgtgtgatgttgatcaggtaasggctttgaatctgaaatagttgtaaaawttctaaaagtttggtttgtctaattcagtggtcagcagagcagtggaattacctggagatggttaggaacgatactgctccctgactgctaccccaggtgctctggtttaattggtcatgggcatgacctgggcaccaggacttctaaaagytctcccctccactttcagtgtgtctcggagtttgggaatcgctgttgtagttaaaagttactgagagtccaggcatctaaaggtgaattagctgtcacccctctcatggacaaacgtagtctttcacaaagggaagaagagagaaataaccatgggccgcgcgcggtggctcacatctgtaatcccagcactttgggaggctgaggtaggcggatcacctgaggtcaggagttgaagaccagcctggccaacatgataaaacccccgtctctactaaaaatacaaaatttatctaggcgtggtggtgcgcatctgtaatcccagctacttgagaggctgaggcatgagaatcacttgaacccaggaggtggagattgcagtgctctgagatcacgccactgcactctagtttgggagacagagtgagactcattctcaaaaaaaaaaataaataaataaataaaaaatagctatggctggcaagtggcctatactatgactttatggacaaatccttcactgctgccatgaagcagaaaaaggtaagaaatcttctcagttcattttatgaatctagcatgacctggatatcagggtacacacttaaaaaagaaaatgaaatgcaaaactcattcaaaatgcagctggaaaattctgcagtatacatgagtggatatagtccagcagtatgttcagatgcactgtgattaaatagagctcatagtgaaaactggaaacttaccacagaaatagatttaacgtagcaatgaacctctccatggaagcctggaaggcatttggcagctcctgataaactaggagtagtttcacatgatgtttaatgtgatagaatgtctgcctgaatcttgcagccaggtcatcctctgtgtgaagcactgacactcccttgtgcttccacccagcatgggagcatgrcctgtttctgggagtggtcagtgctttacttggagttagttaaactctgcatggacagagcctggtgttccttgcttcctctccagcatctaccccagcacttggcacttggcaatcaaaagacacttgtcagcgggccagtaaggctaggatatcagccccactaactatttgggagattctattcaatactgtaagataagaaaatcatagaaggactattaagaaggagaaaagattattataattgttttcaaaatctggaaggcccaagagtaagcatatcagctgataaactctaagaattaataaaggaaaaagctgatgaattataaacacataattctcatatatcttttttcatatattattctcatatatttcatatattagtattgaccacttggaaaatatgtctataaacatcttattcataacagcatcaaaaaaaaaatgtctaggaataaacttcaatgtgccaggcaaacatattttatgactatagaagatgaatagcttatgtacctgaggtagaagtcattattgaaaaaaacgtcgtttccccaaatcaattgataactctggtgtaattccagtaaaaaatccagaattaattttatttttgaacttaaaagaataatctgaaggagtaattgcttgagcctaataagcaagacacattttgaaagggttgcacgctggagggartcttgtgtagtagatgttgaaaagtggccttatggagtataagaggctgaaccagcgcacagatggctcagtgggagagctaggtgctgggaaatggccccttgtgtgtatatgaaaattgtgtctatggtagggggttatttaagtgggaaatgggtcatttaataaatggtattaggtcaaatgactaacatgttaaagaaaaagttattcatgacattcgttaagatgttaaggaaaactattaaaggggaggctactccagtgggcctttacactgctgtagagggattgggctctactccaaatacttattgaccagggggattgatagccaaggagcagggtcagggtcagtggatggaaaataactaagaggaatattgggggaaccagcccccagtatttcaacgtaggttcttttctattttccctaagtgtcggccggtctgagaaataaagagaaagagtacaaagagagaaatgttacacccgggaccgtgatgacaaccccgagccgcaaaaccagcagatttttattagggattttaaaagaggagcgggtatatgaactgggagtaggtcacaaagatcacgtgcttcagagggcaataaaggtcacaaggcaaggcaaaattagaattactgatgagggcctatgtcccactgtggattgtcttgataaacatcttaacaggaaacagggttcgagggcagacaaccaatctgactagaatttaccaggctggaatttcccaatcctggtaagcctgagggtactgcaggagacaaggccatatttcagtccttatctcaactgcataagacagacactcccagagcagctgtctatagacctacccctaggaatgcattccttccccagggtcattccttgctgggaaaagaattcagcgatatttctcctacttgcacatccgtctataggctttctatgagaagaaaactgtggctgtgttctgcctgaccctgtaggcagtcagaccttatggttatcttcccttgcttgttacctgaaaatcgctgttattctgttctttttcagtgtgcactgatttcatattgttcaagcacacatattttacaatcaatttgtacggtagtggtcctgaggtgatgtacattctcagcttacgaagataacaggattaagagattaaagacaggcataaraaattataagagtattgattggggaagtgatgaatgtccatgaaatcttcacaatttatgttcagagactgcagtaaagagaggtgtaagaaattataaaagtattaattttgggaactgataaatgtccatgaaatcttcacaatttacgttcttctgcctcggctccaaccggtccctccgtgtggggtccctgacttcccacaacagaagaaacatcaggcataaagaggattgtggctaaaccaatcctaagagtgttatggctgaagatgggccagggtgaccagacactgcctgggggctggggggagatgaggaattagattatatatcaaggggaggagttttcactgaactgactcagcggagttcttggtgaaactggactaatagagatgaacatggaagcccagaaatcaaggcctagttgagaagagttcagaggagcctgactagagttagggtaaggaagaggggctttgtcacaagtgaagaaactaactgtaaatcaataagatttagaaggaaaaacgaactataaataaattacagaaaaatgtaatgaccacatagcatatctgtctgtgtatatctttaggtcttttttgttgataacacatcagtttataatattaaaatgttcaaagataaaaatgaacgttcacgtcacccctttcacctgcttgttccctgggaaaagatgttagatcctctgtaaagtctggagaatgtctttataataacacatcttgacatgtgcatagatgttttgttaacaaaaagtagactcgtagcatttcaaaacgttttcttctgtgtgcagtgtgatttctgctccttggatggatttcattacttttctataatcagcatccttctgtgtctttctataaagtttgtacagatagggagacacataaaagtgttaatgtattgatagttttgaccttataaatgtttaagactactgaatggcacaaaaccaacattgtaacatgtataatgtgcaacatactactgaagagatcagattttaaaatggacaaatgtataaagaaaaaaataggcagctcataaaagaagaaatgtaaatggccgatggaatgtatcttaaaatagtcaaccgttttgtaaacaaggaacttcaaattaaaatgatattggctactgtcaaatatttaaaagatgaacaatgtttggtgttgccaagggcacaaggaaaggaccctgcgtgtcatggttggtggggcgacacaggcacagtgctctgcagctgggctcggattgagtgaccacagtcctggcctagcagcttccttacaagagagctgcttaaacagtgtgctcaggactctccactctgtatggtagtcataatttagaaatacttgcatttctagctgtagggttctggtagcttggttgtggtccatagttgaggtactgggtggctactgaaaacattggtagagtgcatatgtttacgtggaaagtactctaagaagaaaccagttactggtttcttccaggaagacaggagctctgcctccttggcagatttatttttatttttacacgtgtatatacacatatttaaatgtatataaattggccgggggtcaggagtttgagaccagcccggccaacatggtgaaaccctgttgctactaaaaatacaaaaattagcygggcgtggtggtggacgcctgtaatcccagctacttgggaggctgagacaggagaatcacttgaacccgggagtcagaggtcgcagtgagcccagatttcaccactgcgctctagcctgggtgacagagtaagactctgtctcaaaaaaaaaaaaaaaaaaaggtatataaataaaatattttgaaagtcgacagtggttacctttgggatgtaggattgtagagggatgattttctataaaggggtatgtctgtattgtgtgtgtgtgtgtgtgtgtgtgtatatatatatatatatagctatgtatacatgtattaaaaaacttatgtactaagaataaaacagtatgattcttggccaggcgcggtggctcacgcctgtaatcccagcactttgggaggccgaggtgggtggatcacaaggtcaggagatcaagaccatcctggctaacacggtgaaaccctgtctctactaaaggtacagaaaattagccgggcgtggtggcgggtgcctgtagtcccagctactcgggaggctgaggcaggagaatggcgtggacccgggaggcggagcttgcagtgagcagagactgcgcgccactgcactccagcctgggcgacagagcgagactccgtctcaaaaaaaaaacaccagtatgattcttttgtggaaaaaaaagtgatgctttaagaccaggttaaactttcaaactgaaagttaagacccttttatattgattaattttaaaaattgcttcatagaggccagtgaaggtattaggggaaaaaaatagcttcaaagactagaaagactgtttggaagagtctctgtgttgtttagtctgagccctgggacattttgcatcatttttgaggtgatattaactacagtatggacctctaatatcaaagtacttaattgttgagctcaataaccgtggggaataaaggtctcctggatggctcagtactcctataaaagccctggcctctgaggcagaaatgtacaggatatcagtgtagggagtgttcaccttaacttccaccacaagcattttactttttttttttttgacggaatctcactgtgtctggagtgcagtgggacgatctcggctcactgcaacctccacctcccagttcaagcgattttcctgctttagcctcccaagtagctggggttacaggtgaccaccaccacacccggctaatttttggatttttattagtgaagaggtttcactgttttggccagagtggtcacaaactcctgacctcaagtgatccgccctcctcagcctcccaaagtgctgggattacatcgtgcctggccattttaattttttttttagacacggtgtccctctgtcactcatgctggagtgcagtagtgcagtcatagttccctaaagcctccacctcctgggcccaagccatccacccatctcagcctcctgagtagctgggactacaggcacgcaccaccgtgcctagctagttaaaaaataattttttgagagacaaggtcttcctatgttgcccaggatggtcttgaagtggcttcaaaagaccctcccgacttggcctctcaaaatgctgggattatgggcatgaaccactgcgcctggccagcattttactctcatgtataatgagggttagatctgtagcagtttatctagctaattgctctgatccacttctctttttgctccaagatggccacatggtcacacctccaccaggccactaggttacacttccaagcctccaggaagacaggagctctgccttcttgggtatggatttacttgtcataagggaggagcccagacctggagacatcttggattttacaaagccagggagcacggggctacctggcccctggagaggctttatttatgttccagaagattagacctaggatccttttcatcctatctccatagaggttttcctccctccttttggcagcagtgggagaggcagcttcctctttgtcctgtatataaacagattaaatctgtttttctatgttcctcccctgtggtactggctttgaatttgtgtatataggacattgattgggtttcattttgtcaccacaaggggagacagttaggctgtggggaaccacagggttgttatttgctttgtacaatagttgaatagcgactagattgtctgtaatccaggatatcttgtgtgcacgttcaagatcaaatgaataaagatgagtattacaaagccaacaatatgtatcctaaattgccctcccaatcagaggaacaatgagcttttgttgcatatttttctttgctggactcttcatcatggaatttaactggaaaaggaaactaatggggctggggatggtggctyatacctgtaatccctgcacgttgggaggctgaggcaggaggatcacttgaggccaggagttcaaggccaacctaggcaacatagtggaaccctgtctctacaaaaaaaaaattttaagttaactgggtgtggtggtacatgcctgtagtccagctattctggaggttgaggtgggaggggaccacttgagcctgaactaaaaaaggaaactaatacaaccatggtagtagtattacttaattttatactgcaaatggcatttaaatggaaccctttacagygtaacatttctttaacatgaagggaattaactttaatggtattgtttcttcaggtgacaaggcaactgtatgagccactagttatgcagctgattcactggttcactaacaacaagaaatttgaaagtcaggatactgttgccttactagaagctatattggtaagtaatagttgattcttttcctcttactcccatcgattagttgtatttgatgtttgtttatttatttatgtttttgagacagtcttgctccgtcgcccaggctggaatgcagtggcacgatcttggctcactgcaacctgcgcctcccaggatcaagcaattctcctgtctcagcctcctgaatagctgggactacaggtgcacaccaccatgcctgcctaattttttgtatttcaatcagagacagcgtttcactttgttggccaggctggtcttagtcctgacctcaagtgatccgcccaccttggcagtgagccaggcacagtggctcacgcctgtaatccaacactttgggaggccgaggcatgcagattgcatgagcccaggagttggaaaccaaccaggccaacatggagaaaccctgtctctactaaaaatagaaaaattagctggcatggtgttacacacctgtagtgccagctcgccaggtggcttaggcatgagaattgcttcaacctgggagacaaaggttgcagtgagctgagattgcgctactgcactccagtctgggcgacagagtgagactctgtctcaaaaacaaagaataagaagaatttctgagtatatccaattttctcctatactcagattcaataactaaagggccctggaaacagcagttcaccttttacacagaactctcctgacayggagaagcattgtcttagaatttggtcgccagctcactgagggcagaggcagtgaggccagctaaattgtagtttttttttgatgcttattttactataaattttgaacctgtgcaaataagtttatgtctcctgcacagccctggttatgctgctggcagtgtactctgagtgtgatctttcttagtcatgttacgggtaggggagagtgactgarcattcgttagggtggtgacataattaaacctgtagtttaattccctgcagtgtctaccagtgaatcctacctataataaatacagttagctaaagttaatttatggcttatttacattcagatgttttcattataatgtttctgttaaaaagtttttattttagttgttttctgtttcttttctcccttttgatccttgaaggtagattaagtaagagattaagaaagaaatctgataagtaaaacgagatagttgaggaaagaaaaggtaaagaagcagcatgaactcggtagcacggcactcaagtgaaggagggccgtgggtttcctggtgagagctgctcttccctgcatcaccacttggcgctggtgacctctgctctgaaaagcaggaagcaccctctcctcccattaccatggcttgtgttacctttttggattctaattacctctgcaagaaaggattttatatgtagcagataactggaagtgttaggcagaactctcttaattcattgttgagtgtacgttttcaagttaaacttttcctttgtagatctgagacagcgtcatgactagaaggcaacaaagcataaagtagaatacatctctgtgtggtcgttggtcaaatgtccatagctgttttcggcagggcctttatggggtctgctcttcatgcctccataggattttcctttatggagcagtacagtttctttggaacttcaaagggtcttattctctttgacttcaatatgcaaagtgtctcaaaagctgttatggggtaaaatcaacaatcaaaattcctctggaattcttaggatatagccattttcttttttttcagggaagggaaagattgttttgttataattaaagttttctctcccctcttcatggcttttcagtttattaatttgtttaaaagaaaatgttttcattatatcagaaggaaatagttattcaagcctagattctggatacactatggagattggttttactaatgtttatttttttcttgactagtgctataaattaatttttaacatactttagttatgctcagagatagaccaagggtattcagttgtcagtggttataaaaattagtacaatcaaggtctctttgttttgtttcaggatggaattgtggaccctgttgacagtactttaagagatttttgtggtcggtgtattcgagaattccttaaatggtccattaagcaaataacaccacagcagcaggagaagagtccagtaaacaccaaatcgcttttcaagcgactttatagccttgcgcttcaccccartgctttcaagaggctgggagcatcacttgcctttaataatatctacagggaattcaggtttgtaagctacacaacagagaagagaaacttgtggttttgaaaggtgacttggagtttcactctgtgtatccgtgtgtcatatttcctgcatttagtaagtaattatgtgctggatgctgtgctgtcttctggaaattaaaaagtgaattaaaattcagtttgcactccagaagcttggaaactgctgagaaatgcatgtaaacactgtctcagccattttggaaatgcaacaaaagacacatatacaggggctttgggtgcacagaggaggagtagctgatccagggtgagcaagtttgctgtggcctcttgctagggtttatattggagatgagacttgaaggataaatggaagtcagccaaggcattttagatcaaagttagtgggtggtgggggggtagagataagaaataggaaggtgtctgaggcgataaagtcctttgaggtttggaggcaggtgtcgtgaggctggcgaggagggctctgcttgctgtagtaaggagcgtaggtcaccgctagtgacagaggatctgtggaatagtgggtgcagggagagatgcatttagatttcctcctaaaatccacttgctggtagctgtgtagagagtgggtctgagtagactgaagactggaacaccagtgaacaggccatttcagaggtccaaggtaaaagacaagtggtcactgacctaaggtagtggtgttcattcattcatccagcattccttattaggaatattgtgtaccacatttacctgtgtaacctcacatcctgcacatgtacccctgaacttaaaagatgaagaaaaaaaaaatgatgtgccagacctgtgtctatgttggaggtataacgatacagcccttcgtgagggttacatttcagaaggacacatagataataattagccacataggcaaatgagcagttctgcagatgcaagggacagaggcacttgtgtggaaacagagcgtgtgctgcctctttggctcatgtagctttcctctagtctgctcttgaggaagtatctttgagaagtgttttaggttgtttcatggtttttcttttctatttttttttgtttttgtttttggagacagagtcttgctctgtcacccaggctggagtgcagtggtgcgatctcggctcactgcaacctctgcttcccaggttcaagcgatttgcctgcctcagtcttccaagtaggtgggattacaggcgcccgccactacgcatggctaatttttgtgtttttagtagagactgggtttcaccatgttagtcaagctggtcttgaactcctgacctcaggtgatccctgcctcagcctcccaaagttctaggattacaggtgtgagccactgcacctgtttcatgttttaagacagagcccccccaccccgccctttttttcgtctgagacagggtcttgctctgttgctcaggctggagtgcagtggggggatcatgactcaacctcaacctcctgagctcaagtggtcctcctgcctcagcctcccaggtagctgggaccacaggtgtgcaccactgcacccaactaattttttttttttaattttttgtagagacagggtgtcactttgttgcccaggctggtctcgaactccagggctcaagtgatctttataggcatgcaccaccacacccagctgagcctttaaaaaaacaacaacaaaaaaacaattttttttttttttgagctggagtcttgctctgttgcccaggctggagtgcagtggcaggatctcggctcactgcaagctccacctcccgggttcatgccattctcctgcctcagcctcccgagtagctggggctacaggcgcctgccaccgcgcccagctaattttttgtatttttagtagagacggggtttcactgtggtctcgatctcctgacctcgtgatccacctgcctcggcctcccaaagtgctgggattacaggcgtgagccaccgcacccggccacaaaaaacaaatttaattaatgtgtgccttctttaattccattccttcttttctttgtcctttctgctttattgttttcttaggtgaggtttcctattctttattttacagggaagaagagtctctggtggaacagtttgtgtttgaagccttggtgatatacatggagagtctggccttagcacatgcagatgagaagtccttaggtacgttttgcttcagtgttctgtgtgcgttacaggtctgaagagtttccccaatgaggagttaaggctcgtgtgattctcttataaggttttttttttcccaagagttctataaattaataaatgtgaagagaatccccttcagtgcctcaaacccagcttgttaataattttttcatgcccttattttctttgactcaccatgtactcctggtggccattgaggttgaccctggttggttgcagattctgcccagggcaggggagacaacgaagccagtcagacactatgatgctgtgatgacagaacatgaaactgtgcagatatggtgctgaagaaactggatgtggtaaccactgagatgtggtcagtgcctctgcactcactcgtgatcatttagaaagtagaaagtggatctcattacaggactgtgatagagttgtttcatccatgatgaaggaatattataaagatattaagtcagaagtaggctaaaatagctaagagagtaataaatgattacaattaaattctatgcaagaagctattaggaactacatagagttgttgagctagaagacttcttaactccccgttggtcccagcacatgatgtagttggggcacagaggctcaggcgtgtcattgactgagacggccacacagctgtggcaggagtttatcactgatacgggtcttgacttattttattttatttgtttattttttgtgatggggttttgctcttgtcacccaggctggagtgcagtggtgcgatctcagctcactgcaacctccgcctcctgggttcaagcgattctcctgcctcagcctcccgagtagctgagactacagggacctgccaccacgcctggctaatttttgtatttttagtagagatgtttctccatgttagcctggctggtctataactcctgaccttacgtgatccacctgcctcagcctcccaaaatgctgggattacaggcatgagccactgcgcctggcaactttgtttattttttaaaaagacagactgagctctgttatccttcatgttgatagtctactgtgggcaaaaatgtgtaaaatttagtcctcattgtcaaattgcttaaatttgctttgtttatcttgatttcccatatgggtgaattttttcaacgagtgaaactttttttgtgatcacggacatatttaaaaaacatagaaaactttttcttggtgacacaggtcaaaataagatgtataaggctcctttcctaaataattccagacttctgtgagtgacttcaccatcttacctctgttgtacttctccagaggctgtattaccaaacgataccgtagtttatcctgcataggaagggaggtcaagggatttacacccctttaaaatagccacattgaagtccacaggctctggcctggtatgtgggttttgtaatacctgcaaagtctcttccatctcaggtccattaggagaggctgtgctttgggtggccgtggtgttggtggtacagtttctagttaggtatggcattgctctgagtgtgtgcatgtgtttgtgcgtgcacgcaccatgctatcctgcagtcttaaataggggttttgtgttcatttttgaatatgcagtgtgaatcatttatctaattttattattcttagggatgaaaacatattaaatctatagtaaaattaccttttcagttaaaaattaggccaacacatttataatacaaatttaataataatcagctatatatgccttctttggaaatatgtctctgtacttgagaacaggtacaattcaacagtgttgtgatgccattgatcacctatgccgcatcattgaaaagaagcatgtttctttaaataaagcaaagaaacgacgtttgccgcggtaggtgatcttgcttccttttccgtcttttcccacaacataaaactaattcacagctaatgaaggacaacctgggatggatctgtggaagtataaggaattacttcctaaacaaggaatgtgtggaagtctgaagagttcgttttccaaaaacgttaaaaagctttgtgtttgaaaatacttggtttaagggataaggtataaggtatttgatctgggttgagatagtacatacaaattgaaaattagttttgtaacagacgttttatttaatatgcactaattttgaacatgttttgatgtggatgatttgactagaatatgcatgaaccattattccgtaaattttgaagtgtatgaactgaatgttcaaatagtaacattttgacagacatggaattataaaattaggaaatgaaactgcttagagccaaccaaggctgggatgttggccagtggtttccagtttttgcccttattccatcctagtggtgttgccttctccagtagggtgagtgccctccataagcccctccagatctctgcagggtatctggggacatctgttatccatgctagtgaccgccactctggagaagcacagtcccatgtggactggattattaatrttttctcagttgttttaaaagttgattcttccagattctactattaacttacgatatcagtttagttcattggttctaactttagcatacattagaattgcctggagatctagttaaaacacagattgctgggctggccccaccctcaatttctgtgtacccctggggtagggccagataatttggatttataacaagtgcacaggtaatgttggaacagctgtccagggaccacactttgagaagcactgctttacaaggtatattgcaaaggaaacatgaaaatacttagtgctgttcttttaaggagaactttttaatttttccccacatgaaaaaatgaacatgagcagcatttaggacccatttcacctatgttattttgattgcatctaattataatacattaaaaataagtcgaatgccttttagtgagatttctacatatatctgtgtgataaagatgagtttatgatttctagagccttggtagctgaatgttgcatgttggagagggactaatgacagtatgctgtctctgtgcagaggatttccaccttccgcatcattgtgtttattggatctggtcaagtggcttttagctcattgtgggaggccccagacagaatgtcgacacaaatccattgaactcttttataaattcgttcctttattgccaggtatggtaatctgtatatctttaatttcaccacggtgctttattatcccatttaaaagaagtaaagaagaattgagtaattgggtatcattgcagttaacatggtattcagttaagattcagaatattaacagttgatgaggtaatgcagttctgtttcagcatgtgattaataagaaattgccagcatcctaagtctgaatgatctcaaatcatattaaaggaaagcagtgaacctgtgcttttcagtaattactaaaccattaaactgcttatggactgaaataatgacaagtttctcaggaataaatgtattgctcagttttgtccattaagtccaaacctaggtttgatagcttgggagtggggaagctgtgctcaggacagatcaagccctgccttcccccattgtgggctgtcacagccctgtgccatgtgtggagagtgcctcaggttagatgggtgtgctggttccttggcaaaagttggggtggagtttttttttttttttttttgagacggagtctcgctcttttgcccaggctggactgcagtggcgctatctcagctcactgcaagctccacctcctgggttcacgccgttctcttgcctcatcctcccaagtagctgggactacaggcacccgccaccgcgtccggctaattttttgtatttttagtagagacggggtttcaccgtgttagccaggatggtctctatctgctgacctcgtgatccacccgccttggcctcccaaagtgctgggattacaggcgtcagccactgcacctggcctggggtggagttctgtctgggctttttcttcatggaacaagaggaaaaaagttactttatatatttccaggcttctaaaactaaaaaggactttacattttgtcatactataggatatattataatgttatatactacatattatatactatagagtatgtataaatacatactataactgaattagattattttatatatgctatataaataatgaagtataaatttactatatcattttacatgtataatagaaatgtatatctgtgttttaatttagataattgtttaaaaaacattagcatttaaaaaaattttttttcccccgagacagagtcttgctctgtcgcctgggctagagtgcaatggcacgatcttggctcactgcagcctctgcgccctgggttcaagcaattctcctgcctcatcctccagagtagctgggattacaggcgtgtgctaccacgcccggctaatttttgtgtttttagtagagacggggtttcaccatgttggccagtctggtctcaaactcctgacctcgtaatctgccagcctctgcctcccaaagtgctgggattgcaggtgtgagctaccacgcctggcctagcattttcagtttgcttaatgtgtttagctaacaacttttttttttatatgttaagtcattctcacagcaaccttgtgaaattagtcattgaagagtggaccagtggctggggaagggctggagggcagtgggcagcatttttcctatatttagtagaaaccgagaccctgatagcatgttggtagagctgcttatgggcagaccactatctcacattgagtctgtgactctggtagcacataggatttcttgtgacctcagctgtactgatctcaggcatttctagtgctgttctcttctcagttgcctgtgatacggacctcatgtattctgaactaaatagagttccacctctcagcattgtgttttgttggacaaaggctgctaggtagtaggtgagccttgcccttcttccaacaggtaatttgtataacattaaggagccttccttgatttatctcttctgtggccttgcagggtgtagccacctttctcctttggtatctttatcctccagtggctatttttgttttcttttatttttttccttttcagttttagagacaaagtctcactatgttgtccgggctggacacgaactcctaggctcatgtgatcctcttgcctcaacctccttagtagctgggactgcaggtgtgcagcacctgtttgtttttaagagacagggtctcactctgttgcccaggctaggtaggttgcagtgacatgattatagttcactgcagccataaactgagcttaagtgatcctcctgccccagcctcatgagtagctgggaacacaggcatgtgctaccaggcctggctcatttttaagtttttttgtagagatagggtcttggtattaatatgttgcccaggctagtcttgagtcctgaccccaagcagtcctcctgccttggcttcccaaagtgctggaattacaggtacaagccattgcatctagcttccttcagtggtttttaagcgtctgtgtcaggtgtctctttagctcactgtgtagcagcagtcctgggtacaggaacacccagatcagtagggcttgacgacaggtgcagggttgtccctctgacatgtgtccaagagagacagctcctggcggcttctgaatactgagactcagcgtggtccaggcccagaaacagacagcaggtcctcggtggagaccaaggaagaagtagggctgggcaggctccccaaccccaagcgtgcttgtctgcgtcttcagcttctctgtcttcttgtgatgtacccttgtctgctctctctcgatctgcctttttgtgtcctttctttctatcatttttcttctgtcactcttgatgtagaatttaaatatcttactatttattttttgctcattattatacatttctttgtctcttagtgaaagtaacagaacattacagaatattcctcctcttaatatacaaaatgttctctctttctttcttttttttataccgagtctcactctgtagctgaggatgtaatgcagtggcgtgatcttggctcactgcaacctccccctcgtttaagcgattctcctgcctcagcctcctgagtagctgagaccacaggcgcgcaccaccacgcctggctgatttttgtatttttagtagagatggggtttcaccatgttggccaggctggtcatgaactcttgacctcaagtgatccgcccatctcagccccccaaagtgctgggattacagacctgagccaccacccccggctgaatgttctgtttttaatacatcagagatacatgttttgaattcttcattagagtcagaatgatttgacattttcagtgctactgatttcagagcatacaaaatgcagttttatgtatttatctttttaatttagaagaagtttaatatttaaaagaaaatttcctggaaaaaacggctcattcgattctcttatttaacaaacactgcacttactgtgtggtagacgttattctaagcacatgttcaaatattaactactttaattcagctaatttttgtaacagccccagaggtagatattattgttctcatttgcaaatgctgttttgtgacttaaaggaataataatttttaaataaaaaggcaggggaaagagtattagtatgcagctactccaaatggtgtccaactatttttataatgtttgaggaacctgaagagaatggctgtggtggaaataccttcttggaagtaattacagtgaaacaagttgaatgcgtagtaaaatgaaaaaagattgtcccataacattttgaaattttaggtacaaagattagattaaagaaatgtaggtatatgtgtgcattttaattttgtttctttttaaaggcaacagatcccctaatttgtggctgaaagatgttctcaaggaagaaggtgtctcttttctcatcaacacctttgaggggggtggctgtggccagccctcgggcatcctggcccagcccaccctcttgtaccttcgggggccattcagcctgcaggccacgctatgctggctggacctgctcctggccgcgttggagtgctacaacacgttcattggcgagagaactgtaggagcgctccaggtcctaggtaggtcacccttgccttattctggtgtgtgtcgtgctgccagagtcaccctgggcagtggctctgccaggtcagaatcccagcgacatgatggtaggtgctgtgcaccaccttgcccgtgctttcatgtcacttctctgcaagggttccattcttcacacttcaaagttgacaaatacagtgttctcatagctttatataattgaaaaagttacactttctggtgtattgtaaatgttgacattttaaatacacaaaactgttaatattacttaaaaaaaacgtattccatgaacaatraatactgtagcagttttatgtacagcatcattggctttaaaatatagctgctttattggaaattttgcagagtcccttaattcatattctcatttcctacccttcaaatgattttatcctaaagtattaagttttttttgcttaagattttactatatccctatctacgtctttttaatgaaaagatgtacatatttaaagattccttggctgggtgcagaggctctctcctgtaatcccagcactttgggaagccgaggcaggaggaccacttgagcccaggaggttgagaccagcctgggcaacacggcgagacactatctgtacaaaaaatactaaagttagtcaggcgtggtgatgcacatctgtgatcccagctactggggagtctgaggtgggaggatcgcttgagcctggaaggttgaggctacagtgagccgtgattgtgccactgtactctagcctgggcgatagagtgagaccgtgtctcaaaaaaaattttcttctgtgttactattatatttgttattagtgcacattacattttttactgccacaacaacaaatataataaaaattttggtaattattacacataaaatgtaaaattatgcggttggaattttatttttgtacgtatagattttagtattaaaaaaacttgttcatggccggacgcggtggctcacacctgtaatcccagcaatttgggaggccgagatgggcacatcacctgaggtgaggagttcgaaaccagtctggccaacatggcgaaatcccgtatctaccaaaaatacaaaaattagtcaggcatggtggcaggtccctgttaatcccagctactcgggaggctgaggcacaagaattgtttgaaccccggaggcggaggttgcagtgagctgagatcgcaccagagcactccagcctgggtgacaccgtctcagaaaataaaaccaaaacaaaaaaaacttgttcacataaataagtgccatatttggtttattctaaaatgtacattttcccatatttaacagatccatggttgcagtgtgtcttacaatccaatattctattggattcaaggatatttggtttttgagaataattagtttttttcttttttgaaatggagtctccgtcgcccaggctggagtgcagtggcgcgatcttggctcactgcaagctcatcctcccgggatcatgccattctcctgcctcagcctccctagtagctgggactacaggtgcccgccaccacgcccagctaattttttgtatttttagtagagacagggtttcactgtgttagccaggatggtctcgatctcctgacctcgtgatccgcctgcctcggcctcccaaagtgctgggattacaggtgtgagccaccgcgcccggctgagaataattcttaatataagttatctcagttcttggaatacatcaaaatacatgttatcaaaattatttttaacgaggtcagttgacagtttggattgactttccttaaattatgttggaaacaaagaattagaaaccatgagacttacaaaaaggctttcctactcaattgttgcctttactctttcaacagtgtacaagtattttaaattgtcccttggcactctaaagggctgtgcaccttggagtaataaactacagttagactggagagaggtgagggtgggtctgtctttcattaagcaggagagtcctgatgaacarcctgagatgggaaaggagaacaagctccagggtgttttcagacaaacgagttttatgacaaagcccgtttgaggattgatctgaaagttgattccataagatgactggtgcctgtccacacctgcttgaagactgctccataatttgtctctgtcctttgaaggacaggattttttattttttcattattaataacattcattattgataacagtgctaaaaagaagattcttacaaccacatctcttcaattctgcagtcatttcattaggttaaaatttcagtgctggatcaaagcataatgagtttttaaacatttgatagaaattggcatgcatatttttaaaaacttggtacgaattgccaaattgccctttaaaatgagcatattaatttatcttctcacatgtaatgtttgggaataaagacctgactttccatcaatgtgtcctttgatatgagaaaaaataaatgccactttattcagctattattaagctgtttgtttcttttgaaaaattttgaatttttgctgaacgtataccatgcctatacttacagaagcaattttatgttaatcttagtggagttgaaaggaagcatatattaatactttaatataattgcttctaggtactgaagcccagtcttcacttttgaaagcagtggctttcttcttagaaagcattgccatgcatgacattatagcagcagaaaagtgctttggcactggggcagcaggtaacagaacaagcccacaagagggagaaaggtacaactacagcaaatgcaccgttgtggtccggattatggagtttaccacgactctgctaaacacctccccggaaggatggaaggtaggctgctctgttaatttgaggtcagtttttggtactggaaaactacttcaaaggtttctgttagaaggggttttggcttttaataaaaatttatyattattattattattattattattattatatttcatcctctcaacccagcttttcctgacttcaggaagaaccaggaagagaaggctaggttttggcttttctaaaactttgcattgtcagaagttatatgtcaaaatcaatttgtcaatttgttttagttgacaaaaactgtatttatggtatacagcatgatgttttgatatgctctgccttgtggtatggctaaatcaagctaattaacgtatctgttacctcatatatgtaacattttttctgatgggaacttttcaatctattttcttagcaatttgcaaaattacaatgcatcgttattaactacagtcatcatgatgaatgatctattgaaaatcatgaaactttgcatgtccttcagagtttcactgtgtgaataaaatataaaatagttttttctaattgttttattggatgctgtattttatgctatgatcaaacatctaccttaggaaacacacactcgcaaatatttatagatgtatccatgaggcttattgtataaacaaactccagtcagttcattcagggaatctctgccaggtgcctgtggcacgccaggccctgggatgcagcagtgtcctgagtcaggggcggggaaaccctgtccatggacacaacctcacctgctgcctgctccgtagataaagctaaataggagcatggctgtgcgcctctgtccacctgttgtctgtgctgctttcttatcagacgcgtaaggagttgaagcagagactgtctagcccacaaacctcaagtgtttactgtgcccccgttttacagagaaactctgcccacctctcccttagtcaggcagaagttcccaaccttgtgggccctgcactttggtgaaaatagaagtgctggctgacgaagtgtttttatcaaacaatctgttacagctcctgaagaaggacttgtgtaatacacacctgatgagagtcctggtgcagacgctgtgtgagcccgcaagcataggtttcaacatcggagacgtccaggttatggctcatcttcctgatgtttgtgtgaatctgatgaaagctctaaagatgtccccatacaaagatatcctagagacccatctgagagagaaaataacagcacagaggtgggtacttgggtcacaatyggggacatgttgtcctggaatttcaggccctagtatgttgccgtgctcctgcagctgctcctgcttcctcaggraaggcttatatcagtgggatgtttgctgccagtgacctcaatagttgtttagaaaacacatttaactagtgccttccctgtaccaaacttaagcaaacttcagacatggttagcgccatgtttgatctccatgctagcttagtgcgtgtggatcctgttagatgttgcctctgtttgcttcataacagtgcaaacatttttttcagtgtatcttgataatttaacgagatcagagctcacctaatttactgttttgtcacatggccagcattgaggagctttgtgccgtcaacttgtatggccctgacgcgcaagtggacaggagcaggctggctgctgttgtgtctgcctgtaaacagcttcacagagctgggcttctgcataatatattaccgtctcaggtaactataacttattgtttttacatttattttagctttagtatgataattagtgtatttatttatattatttcttaaaagtcctttatgtattgagyatgctgaaatgggaattatagaaatacttgctcaagacatgtagatattatgtatctgtatatctatgatatatcaatataaatatgaaagcaaatgtaaaaatttataaatataaaatgaaagtaaaataaaggacatttaggtatttacagagcagctttctgaaaaactttaggaactgctgttgtgcctttgtggcaagacaacacaaatgaagaatctagcatagaaagcaaggttgagccagatacagtggctcatacttgtaatcccagcactttgggaggctcagataggaggattgcttgaggccagaagtttgagaccgacccaggcaacatggcaggaattcatctctacaaacaattaaaaaacaacaacaacaaaaaaaaacattgtccaggagtgggtgccgcggacccgtagtcccagctactcaggaggctgaggtgggaggattgcttgagcttggaagcctgagaatgcagtgagccacgattgtgtcactgcactccagcctgggcgacagagcaagaccctgtctcacaatagcaagaacaacaaaagcaaagttgaattaaaatttttctgaatattggaaggtagttgtcagtgctatctgaagtgggttttttatttaatgagaggagtgaagttgtttttttctaagaaatatctttttgctaggcatttcagtgttggcttccttttagtccacagatttgcatcattctgttggcacagaacttctttccctggtttataaaggcattgcccctggagatgagagacagtgtctgccttctctagacctcagttgtaagcagctggccagcggacttctggagttagcctttgcttttggaggactggtaggaaaaacgcctctgcatgctgcactcccctaataatagaaatacatatgtcacttgcaggtgtctctagaaactgtggaatttgggtartaaggttttagctggacaagtattgtatgatttgcatgagccaactttctaaaagattattttctcaatagttaaaaaaaaaaagaacggaatagaacaacattctttttaaatagaggttttgtctatcccactttgtttccaaaaggaattagctagagaacgttttgtgactatgaagctgagtcatgttgacatgtggcctcttctcctctccttggtggtccttcacatggatgattgggagggcctctgaaggataatcccagaggaaccagagtctccaaaaaaatattctcatggctctttgaaccatgcagggctggccttaaatagtccctgctgtagctgaaatctgcagccagccctctgtgttcactccatcccaactttctttcttctgtagcagaaacccctttttcacccctttgtccgattaatgtaaacaattacatatttaaattgtctaaaaatactcacccttaatagactatcctcaaagcaacaacactggggtaggcagatggcttgagcccaggagtttgagaccatcctggacaacatagcgagaccctgtttctacaaaaaaatttaaaaaattagccaggtatggtggcacatgcttgtagtcccagctacacaagaggctgaggtgggaagatcgcttgagcccaggaagtcaaggctgtagtgagtcatgatcatgccactgcactccagcctgggcaacagagtgacaccctgtctttaaaaaacaacaaggctgggcagggtgacttattgcctgtaatcctagcactttgagaggccaaggcgggtgaattgcttgaggtcaggagttcgagaccagcctgaactacatggtgaaatgctgtctctactaaaaatacaaaaattagccaggtgtggtagaacgcacttgtaattccagatactcgggggtgctgaggccggagaattgcttgaacctaggaggtggaggtttgcagtgagccgagatcgtgccactgtactccagcctgggcaacagagcgagaccctgtctcaaaaaataaaacacaacaacaagacttttggacatttggaagaaatatgggtcaaggaagatttctttcccaaaatgaaacctagaaaatggaggctagttgaaatatatacaatttcagcttgaatccaggcttcacatatcaggctctttttagacctgtgtcattttccaatttcaaagttatcagttgcccaagkgtctttctgtgccatgcaaagatgtgccccagttatggtacttctcctttctttttcccagtgtgagcgccttgtgagtcttctcctgaacccagcggtgctgtccacggcgtccttgggcagctcacagggcagcgtcatccacttctcccatggggagtatttctatagcttgttctcagaaacgatcaacacggaattattgaaaaatctggatcttgctgtattggagctcatgcagtcttcagtggataataccaaaatggtaacaaagtttccctttaaataaactgttttttttgtttgtttgtttgtttgagacagagtcttgcactttcgcccaggctggagtgcagtggcacgatctctgctgactgcaacctctgcatcccagattgaagcgattctcctgcctcagcctcccgagtagctgggattacaggcacccgccaccacacctagctaattttttgtatttttagtagagacggagtttcactatgttggccaggctggtcttgaactcctgacctcgtgatccgcccagtttggcctcccgaagtgctgggattacaggcgtgagccactgcacccggtcaatattttcttatataatccttataaaagggttgccatattcctgaaatatttcattaaagtatgacaagactttttcctataaggttgaaagctcttgcttttaacaaactcagaaaaacccaaaacataccccttatcaatagttaatgaatattaggccaggcatggtggctcatgcctgtaatcccagcactttgggaggtggaggtgagcggatcatcagaggtcaggaattcaagcccagcctggcgaacatggcaaaaccttgtttctactaaaaatacaaaaaattagccaggcatggtggtgtgtgcctgtaatcccagctactcaggaggctgaggcaggagaatttcttgaacctgagaggcggaggttgcagtgagctgagatcatgcccactgcactccagcctgagtaatgaagcgagactctgtcttaaaaaagtaagaaatagctaatgagtgttattggatgttaaaacattgattgttttttctattcccttatgctttgcaaatttctaagcctaaatattataaggcacagctatgcagggtattgacatttgccaagatgtggctttggagcttacaaacccgtcctggggcccagagctggctttgcattcataccagctgcaggcaggtctctgcaccccggtagacctctctgttctcagagttctcttgtggcctcgatgctgagttatcatttctggcatgttcctgctgtgtccccctttctccctggagatcagtatttaatatatagttgactttcgtttgctaaacctctgggattttgaaatttaacttgttctgtggacagaaactgttaactgttgatatgaccattttaagggagagtacatgatttcctaagttgagcttttattgcaaacagtgcttttctgttgtaggggaatcttttgtggtagattgcagtaggaatttgtattctttaaaattagaaataaaatcgtagtagatgacactcagatttaacattctgatttcttaaactatgacctctgatggaaatgatagaaaaaacatacgcctttgacctctattccttccctaaattcctctaaagtaacagaatgagatttttaaaacacctctacaatctcaaaggacacagagaaaaggacttccaagagtgacaagagttgtaaatcaaaaggacaggtgtggcagactgcatgcagagtttgagatagcagcgaggtgatgcagccttcggaagttggggtccacacgtgctgagccccagcagggcagacatgcgagcaggggtgagcagaggctgagaagagaggattgggcaaaggccagctctcccctgcagggcagcctcctgtctctgctgctgggggtctgatcctccccacttgaggagaaggcaggaggcagtgactccctggagaggatagagacctccagactgggggctctggcatggctgaatatgtggataccatcaggaaaagaggaaagttaagtactaacctacctaaattctagactttcaggctgtctgccctttccctctgaatactttcagttcagcatctgcccttggcagggcaccagaatatcctgacaagccctaagagaaaataaagatgcaggcatcatagccagctgggtcagtgacagtgatcctccccaccagcgagccctgcacgctgcacagcgcttccaggcaggtgatacctgtgagccggcagcccaggggctcaggcacctgaggaaagggacgccagagggcgtagcgggacacaggcaactgtggcaaggcctgttcagtgagatggaaatgtaagctggagaaaaaaaactgaaagatgagagacaaaactgtgaaataagaattgctatggagaatgaacatcagagaacaaaaaaggctcttgggaattaagcataggcatcagaaattaaaaatgaaatgagtttggaaggtaaacttgagtaactctcacagagagtagagtgaaagacaaaacagaaaacacgagagaaaagaggaggagactagggattcatgcatgaggttgagcagcagggccttggctccggagggcaggggtcaggagtggcatttgctgaggacacagctccagaggagcccagaagcaaaggctttgagtttccaggtagaagagggccatggagtgtccagcatggtgcacagaaacagctccacgtggagcacatttcttgagaattcagaaccgtggggtttcactacaataaaagattctcaggtttccactggagaaaaagcagttatgtgtgaaaggatctagaaattgaatgacatatgtcttctcagcggcagtgtggacattgcaagacttgaaccagatttcttccatagttcataagagaaatcttcagcctagagttctgaatccagctggattatccattatgtgagagtggaatacagatgttttagacatgccagatccccaagaggtccctgtgcactctcatcacgatgctgctgggtagagagtgatcaggcagtgagccaagacaggggaaggtgctggatacagtatgtcggccccgcacagaggcgtggatggcccagcaccaggtccagcaccagcattgcagatcaagagctgagttgccacagaaatggggcagatagacctgataggcttagagggcttgcagcaatttcataacttgggagagtttgatgacgaattaatgacagacacattgaaaagagcaatgaaagcaaacaaggttagcttcagagagtacaaaatgtgcaaaaagggaaaagcattgtttctacttggaacatctgtgaaaaatgtttgcatagtcagaatgacaggaatagtgcatgttaatctgaccaaaattagcctgtcactctgttgcaggagtggtggtgagacagaaaatgtgggtgtgcatgtatgatggtagttgaacaagaagtgtgcgtttgcgtgtgtgcatgtttgcttgtgtgtgtacacctgtgtgtgctagtgtgtgcctgtatggtggtggtgggaccggaagtatgtgcttgggtgcatgtttgcttatgtgtgtacatctgtgtgcttgtgcatgcatgtacagtggtggtgggataggaagtgtgcatttgtgcatatgtgcatatttgtgtgcttgtgcgtgtacacctgtgtgtgcttgtgcatgcatgtacagtggtggtggtggtgacagaagagagctgactcctttttcctagactgcgcagactaggaaagccaggagaagctggatgagcctgatgacatagctaaggccaccctgtactttgtggaaaaactatggttaaagtgtacctcaaatcaaactcgaggagttttgaagtagataaacatctattatagaaatagcttatttattttccaagaatagctttgaaataaaggtaaattttgttttctgtcattctcaaaattaagaatttttcttcactcacaacgaaattgtctcaggtgagtgccgttttgaacggcatgttagaccagagcttcagggagcgagcaaaccagaaacaccaaggactgaaacttgcgactacaattctgcaacactggaagaagtgtgattcatggtgggccaaagattcccctctcgaaactaaaatggcagtgctggccttactggcaaaaattttacaggtattcaattcctttaaaaagcagtcatgtttattcttctgaactctgtaacttgtgtctttaaaatttgatggaggttgctccaaaagctcattggtttgacaaataagaaaatattttgacaggatggttgcttatatttacctttttaaactttttccattatttattagacttactatttcttatgctatatctttttaaagtacctttgcatgtattgtcctaacagatagtattacaatgttttacaataagattgtgaaaatattattgaagcccaaaattaaattaacaattcatttctggaatttaaacatttgagcaatgggctaaaggaaatagagatgtaatatacaaatgtgtcctgtttttcttttccttcctttagattgattcatctgtatcttttaatacaagtcatggttcattccctgaagtctttacaacatatattagtctacttgctgacacaaagctggatctacatttaaaggtaaacwgtgaaatatttatttttttggattacattctcttctgttttcgtattttttatttgtgatgttttttattttttattatggaaaatttcaaacgtgttcaaatgtagggagactagcacagtaatcccccgtacttattagccagtctcgataaccatcctgtgtgggtgtgtttgtttcacctgtgcggtcaacccacccgtcagcaggcaaggaaggccaagcaggccgggtgtgttatctgacctgtatctgcttcagttcagtgtgcctctccaagacatgagaacatttctttctttcttgcttgcttgcttgctttcttgctttcttgctttcttgctttcttttttttttttttttttagacagtctcgctctgtcacccaggctgaagtacagtggcacaatcatggctcactgcaacctccgcctcttgggttcaagtgattcttgtgcctcagcctcccaagtagctgggatcacaggtgtgcgccaccaggcctggctaatgtttttatttttagtatatttcaccatagtggccaggctggtctcaaactcctgacttcaagtgatctgcctgcctcggcctcccaaagtgctggggttacaggtgtgagccaccacacccggcctagaacatttcttttaaagtataagattatcatatttggatgaattaacatttgtgtttgcatacatattatttaaattggctttttgtgctataatgactttattactcagtcatttttctattaaaataatataaaaatttttggtgatttttagggtcaagaattaataaatactgtcattttaagggttactaattttaaagtcctagaacaattagattttaaaccctactgaaaagtggccttaattcaagggacctttttactggataaaggggataattctttggaattttctgctgtgtgattaatcaagtttcccatttctccatagacagtcttggaattttctgccatgcgagggagaacaggagtcaactcctagttcttgttaagctcagtatgaagttcttctgtagttctgcaatgtgtagttgtaaactcctccttaggttattcaaaatgttctttctacacaaagcttgtacagtacatttttactaggttcattatttgtagaagaggaagcacataccgaatcagcaccatgtcccatttatttatgtgtccatagctggcgtcaaccaactagcctgggtaagagtcaaagctgaggtataggctgggtgcggtggctcacgcctgtaatcgcaacattttgggaggccaaggcaggtgaatctcctgagggcaggagtttgagaccagcctggccaacatggcaaaaccccgtctctatgaaaaatatgaaaagaattagccaggcatagtggcaggcgcctgtaatcccagctactctggaggctgaggcagggagaatcacttgaacccgggaggcggaggttgcagtgagcctactaagatcatgccactgctctccagcctgggtgacagagtgagactctgtctcaaaaaaaaaaaaaaaaaaaaaaaagctgaggtatagaattgtattcatgttggtttttaatataatttagaaattatggtgaagccattcattgattccacataatgctttatttgcaatgtcttacagtaattttatttattctgtaggatatataagccataattcgtgcagtttcttatgtctgtcttgctccacagggccaagctgtcactcttcttccattcttcaccagcctcactggaggcagtctggaggaacttagacgtgttctggagcagctcatcgttgctcacttccccatgcagtccagggaatttcctccaggaactccgcggttcaataattatgtggactgcatgaaaaaggttagtttctagtagtatcaagtaaaattaaaacactgttttttttttcttgttacatatcttgatgaaaagaggtgagtaaaatatccacaatcagagaagttgtaaaccacccaataggttattcaaaatgttctttctacacaaagcttgtacagtacatttttactagggtcattatttgtagaagaggaagcacatactgaatcagcaccatgtcccatttatttatgtgtgtgtggcctgagaattcatttaattcacttggaaagcagtgacaggagtatatgtgaatccactggaatttgtttttttctcccatttttaattgtgaaatattttatgtgtaaaatggaatgtgtaaaatatatgtaagttatgaagagtaataccaaaagaagctaagaaatagaatattaccaataatttccagtttctaaaatttaatagagtagcgattatttgagaagcatttcgtgattatccctaatatgataggttgagcatcccttatctgaaatgcttggaaccagaagtgtttcggattttggaatgtttgtgtatacatgagatatcccggggataggactcaagtctggacatagacatgaaatacattggtgttttttgttttgttttgttttcttttgttttgagacagagtcttgctctgtcgtctaggctgaagtgcagtggaaactgcacacaacagtttcagagatgaaagaaggtattatgtccatgagataggataaggatccttggaaattaaatatgcagaagcaaaatttaaataaaacatacttgttctattctgaagataaaattaagggtatctcctagaaagcagaacagaaactgagatggagaaggggagagtcaagatgagaacatcgggggagcggcctgggatatcccctctgtagcgaggacggtgtggaaaagatgcacattaccagaatcagagtaagggcgagagtccctggcatggtgaaggaggggggcctgttgaaggcacgtctccatgtactctcagaacctgagatgcagagaagagtagcatctgcaaaacctaaaaagaataggggctaggtacagtggctcacgcctgtaatcccagcactttgggtggccgaggagggcagatcaccaggtcaggagatcgagaccatcctggctaacacggtgaaaccccgtctctactaaaaatacaaacaattagccaggcgtggtggcgggcgcctgtagtcccagctactcggaaggctgaggcaggataatggcgtgaaacctgggaggcggagtttgcagtgagccgagatcgtgtcactgcactccagcctgggcaacagagcaagactgtgtctccaaaaaaaaaaaaaaaaaacctaaaaaaaaacctagaaagaatctaggctcagtatatagtgaacattgatatataccagccactcaacaatatttgtaaaaatgacagaaatactggtatttgttaagtctgtgaaattctggtgtatttttctgtatgttatattttttattatataagaaactttttatatttttagtatataatttaactattgaagcaaaagtaaaacccaacaaaattttaatgatgttgatgtattttttctagtttctagatgcattggaattatctcaaagccctatgttgttggaattgatgacagaagttctttgtcgggaacagcagcatgtcatggaagaattatttcaatccagtttcaggaggattgccagaaggtaagtcattctggcctgggatctcaggaaccatacgcatttcagttttgtgggaaattatcctctctgttccaaaaaaaaagctgagtggcaattatattcttgctactaaactttattttagttttttgtctttaaaacaaaacttttattattataattttcaaacatacacaaagctagaggaagagtataaataaggccccagattgaacaaagttcagcattttccaagcttcatcttggccttttatcatttttcttttttgctactgctattgtaatttaaagcaaatctgtgacaccatgtcgtttcacctcttaaatccttctgtatatgtctcttaaagcagttttcttgaatagccatagtaccattatcaactgaacgaaattatcagtaattccatagtcagatttcctcagtagtctcaaacaagatgacagtgttggcttatttgaaatttggtccaaacaaggttcatacatggcatttcactgttatgtctcttcagtctgcatttaaaacagtctcctctattatttattttgtttttggagatacttggacacttgtcctgtataatgtcttatattctggatttatctgattcttttgctttcattgaacttcttcctctagcccttggattttctgtaaatggaaagttatgtctaaaagcacagttagattcaggttgaaattttggcaagactaatagttgatactttatacttcttattcacggcattaggaggtgcataatgtctggtgatcctgcttttagtgatgctaggattgactagccatgtgcatgattgtattttcctcatggtttagctctatttatgatgattgccctgaatcacttatttcattaagagttgcaaatggccatttttctgattcttttattccttctaaatttagtgcctggaattacagtgtaatgaaggtctcatcactcggattgtttggttaccaaaaatgcaatttagtattttagcaaaaatacagtgggaaggataggacatatctgattgttgatttttttttttttttgagacagagtctggctctgtaacccaggctggagtgcggtggcatgatcttggctcattgcagcctctgtcttctgggttcaaatgattctcctgcgtcagcctcccgagtagctgggattacaggcacacgccaacacactggctaatttttgtatttttagtagagacggggtctcaccatgttggccaggctggttccgaactcctgacctcaaatgatctgcttgcctcggcctccctaagtgctgggattacagatgtgagccatcccgcctggccccgattattgatttttgaagtaagggtttgatgccatggctactcctcatagtaaacttccaatgaatttttaaaattggcatttatctatattgaatttgtaaatatccatgtaaatttgtcttgagttgtattttacagatcataaacttcacccactgtaagtatatagttccatgatttttaggtagtttattgagtatgcaaccagcaccatataacatttttattccccagtaagaccccacaggaccatttacagttgactgccattgctgatcctagctccacgcaaacactaatctactttctgtctttataaatctgccttctctggacattttatataagtggaatcatacaatatgtgatctcttattcctggcttctttgttcagcgtaatatttttgatgttcatccatgacatagttcattcctttctactgatatttttaaaaatatcataattaaccaactataaaacagaattctgcacggcagcagaacacattcttttggagcatacctgcagcattctttaggacagactatatactagaccataaaaacaagtcttgataaattttaaaagattgaaatcatacaaagcatgttctctgtccaaagtgaagttaaattagaattcaacaacacaaggaaattttgggaatctgaaaatgtttgtaaataatatatttctaaatagcccttgggtgaaataagaaattacaaaggaagtcagnnnnnnnnnnnnnnnnnnnngaagtcagatagcattttgatctgaataaaataagaataaagcttatccaaatgtgatgcaactaaataggtgttcagagggaaatttgtatcttttaattcctgtgtttgaaaataggaaagatttaaattagtaatctgaactttttaccttaaaatctagaaaaagaaaaaaactaaaccaaggtaatacaaaggaagggaataggaaacagaaaaatggtggagaaaaatcagtatttgttttcacaatcaaagctaaaggagttgacaaaccattagctaggctagccaaaaataaaggaagaaccacagtttgtcaaaactaagaatgaaaagaggtggatattaccactgacctctcagaaactgtaagaagattataagcgaatattacgaaaaatattaggccagcaaattcagcaacttaagcaaaatgggcaaattcatagaaagtcgtaaattaccaaaactgactcaagaagaaataaaatgtgtgaatacacccccaacaagtaatcaaattgaattaataattaaaaatctttctgtgaaggaaatcccagacctacatagcttttttgtttttttggatgcaaggtcacactctgttatccaggctggagtgcagtggtcaaggctcactgcagccttgacctcctcctgggttcaggcaatcctcccacttcagcctcgtgagtagctgggactacaggcatgtaccaccacaccagctagttttgtattttttatatacacacagggttttgccatattgcccaggctggtcttgaactcctgggctcaagcgatctgcctgcctcggccttccaaagtgctgggattacagtcacgagccactgtgcctggcctccagatagctactagtgaattttgtcaaaagagtctcactttgtctcccatgctgtagtgcagtggctcacagcagtctctgcctcctgagttcaagtgattcttgtgcctcagcctgctgagtagctgagactacaggcacacaccaccacacttgggtaattctttgtatttttagtagacacagggtttcgccgtgttgcccaggctggtctcaaagtcctgagctcaggcaatcctcccgcctcagccgcccaaagtgttaggattacaggcgtgagccacagtgctcggcccagatatgtaatatatttttgtttttgttggtacataggtgcatatatttatggggtacatgagatattttgatacatgtgtataatgtgtaataatcacactttgatacaggtgtataatgtgtaatcaggtcagggtgactgaagtattcatcacctcatttatcccttctttgcatgagaaataatccagttatactcttaattatttaaaaatgtaaaatattggctaggcgcagtggctcatgcctgtaatcccagcactttgggaggccaaggcgggcagatcataaggtcaggagatcgagaccatcctggctaacaaggtgaaaccctgtctctactaaaaatacaaaaaaaaaaaattagccgggcgtggtggtgggcgcctgtagtcccagctacccgggaggctgaggcaggagaatgacgtgaacccgggaggcaggtgactgagcgagactccgtctcaaaaaaaaaaaaaaaaaaaatagcaaaataccattgactgtaatcaccctattctgccatcaaatactagatcttatttattctatctaaccatgtttttgtacccattaactatccccatttccccctccctcttaccctttccagcctctggtaaccgtctttctattctctatctccatgagttcaattgttttaatgatttttggatgccacaagtaagtgagaacgcgcaaagattgtctttctgtgccttacttatttcacataagatactgatttccagttccattcacgtttttccaaatgacagtatctcattcctttttgatggctggatagtactccactgtgtatattttctttatccatttgtctgttgatggacacatacgttgcttccaagttttggctgttgtgaacagtgctgcagtaaacatgggagtgcaagtacctcttcgatatactgatttcctttcttcacccaggctggagtgcagtggcatgatctcggctcactgcaacctctgcctcccaggtgcaagtaattcttctgtctcagcttccctcccgagtagctggggttacagatgagtgccaccttgcccagctcattttttttgtatgtttagtagagatgggttttcaccatgttggccaggcttatcttgaactccagacctcaggtgatccacccgctttggcctcccaaagtgctgggattacaggcttgagccaactcgcttggcctatttttttttttttttttttttttttgagatggagtcttgctgtgtcacccaggctgtgtgtatacctaacagtgagattgctggatcatatggaagttctatttttagttttttcagcaacctccatgctgttctccatactggctgtacaatttatatcctttgtccacattatttcagttttttggaatgtattaagacttgttttgtggcctaacatatgctctatccttgagaatgatccatgtgcctatcagggtaatgtgttttctgcagccattgagtcagatgttctgtaaacatctgtaaggttcatttagtctgtagtgctgattgagtatgatgtttctttgttgactgattttctgtttggaagatctgtccaatcctgaaggcggggtgttgaagtcttcagctgttgttgcattatggtctgtctcacccctttagctctaatatttgatttatatatctgagtgctgcagtgaccggtgcatatatatttacaattgttatatcctcttgctgaattgaccccttaatcattatataatgacttcaaaaatccctttttatactttttgtcttgaaatctattttgtctgatgtaagtacagctactcctgctctgttttggtttccattggcatgaaatatcttttttcatccctttattttcaatctgtgtggatgtttataggtgaagtgtgtttcttgcaggcaacagatcattttttttttttttttttttacttttttatatcagtttagccactttatttttattggacagttcaatccatttacattcaatgttgttgttgataagtgtggacttctaccatttgttatttgttttctggtcattttgtggtctttcctccttgcttcccttcctgtcttccttttagtgaaggttattttctcgggtcatatgttttaatttctagctttttatttttgtgtgtttgttgtatgttatttttgatttgaggttaccgtgaggcttgcaaatgatataactcattttaaactgctgacagcggaacactgattggataaacaaacacatgagcaagagaaaaaactaataaaaattatacactttaatctcatcttccgctttttaaacgttttgctgtttcaagttataccttattacactgtctatatctggaaaagttattatttttgataaatttatctttttagtctttctactcaaaatataagtagtttacataccacaattacagtgttacaatattctatggttttctttgtacttattagtgagttttatacttcaggtgatttcttattgctcattaatgtccttttctttcatattaaagaactcctggccaggcgtggtggctcacgcctgtaatcccagcactttgggaggccgaggctggtggatctcctgaggtcaggagtttgagaccaacctggtcaacatgatgaaaccctgtctctactaaaaataagccaggcgtggtggcgggtgcctgtaatctcagctactcagaaggctgaggcaggagaatcgcttgaaccctggaggtggaggtcgcagtgagctaagatcgtgccactgcactccagcctgggcaagaagagcgaaactccatcttaaaaaaacaaaaacaacaacaacaaaaaaaactccttttatcatttcttgtagcatttatcttgtggtattgataaaatcctttagcttatgttttctgggaaagtcttcatgcttgaaggatatttttattggatatactgttctaggaaaaaatgtttttccttcaacatcttcaatatgtcataccactctgtcttcgcctgtaaagtttccacccataagtctgctaccaaatgtattggcactcctttgtatgttacttgtttctttccccttgcttctcttgggatcctttctttattcttgacttctgggtgattgcttgttaaatgccttgaggtagttttatttgggttaaatctgcttggtgctctataaccttcttatacttgaatattgctatctttctcaataggtttggaaagttctctgttattatccctttgaaaaaactttctacccctgtctcccgctaccttttctttaagaccagtaagtctttgatttgcccttttgaggctcttttctagatcttgtaggtatgcttcattgttttttattctgttttcttttgtcccctctgtgtattttcaaatagcctgcctacatgttcattaattctttcttctgcttaatcagtcctgcttttaagagactccagtgcattcttcagtatgtcatctgcatttttcagattgataatttctgcttgattctttttaattttttcaatctctttgtttaatttatctgataagattctggattccttttctgtattatgttgaattttgttggccttcctcaaaacagctattttgaattctctgtctgaaaggtgacatatctctgtctctcttggattggtgttggtgcattatttagttgatttggtgaagtcatgttttcttggctggttttgatggttgtggatgttcattgatatcagggcattaaagattttaggtatttattgtagtcttctgggcttgtttatatacttccttcttgggaagactttccaggtatttgtaggtacttgggggtatgatctaagtctttggtcactgaagccatgtctgctttaggggccaccctaagtcctaatctgctgtaggaggcaccccaaacccagtagcactgtggttcttacagacttatagaggtaccaccttagtggtcttggtacaatcttggaaaattccctggattaccaggcagagactcttgtttcctttacttacttttctcaaacaaatggagtctctctgtctgtgctgattacctgtagctgggggaacggtaatatgagcacctctgtagccaccaccattgggactgcatgaggtcagacctgaagcacagcacagcacagcactgggtctcactgaaggccttcagtgaccactgcctggctactgcctgtgttcattcaaggcccagtggctgtacaatcagcaggaggcaaatctagccagtcttgtgttctttccttcaagacagtgatttctccctggctccaggtgggtcaagagatgccatctatgagccaggcctagagttgggaactgtaggaatttacctggtgctctattccactgcagttgagctggcagccaagctgcaaaacaaagtccttttcattcttccctctcctttcctaaaataaagaagtctctgcctgtggtcaccattgccccaggcctgcagtgaggactgcctggctactgctgattttcactcaaggctcaagggctctgtagtcagcttgtggtgaatgctgccagtcctgagtttctcccttcagggtagtgggctcccctctggcccagggcaggtccagaaatcctaagagccaaggcctagaactggggacctcagaagcccgcttgggatgttgcccctctgtggccaagctggtgcccatgttgcaaggcatgaaacattatgcaagtctcctttactcttacttctccttctctcaagcagaaatggtttctccctgtggccaccacaactgggaatgtgctgggtcacactcgaagccagcgtggccctgggtcttaaccaaggcccacggcaagtactacctggttagcactgataattcgtcacccaaaggctctttagtcagtaggtgatgaatcccatcagactgagcccttcccttcaaggcagcaggttcccttctggcccagagtgtgtctaaaaatgtcgtctgggagccaggacctggagtgagggactcaggattctccctggtgccctgttctgctgtggctgagctggtatcccagttgcaagacaaagtcctctttactctccccttcctgtcctcaagcagaagaaaggaatcacttttattactgcaagctgtactacttgggtttggggaggcatggccaagcactcccatagtggccacagctggtatctcaggttatgtgccccccaagtccacttgttctgagcccagcccagcacgaggacttgcccaagaattgcaattgttgtcatcttagttgcttttcaagtttgtttgggaccccaaggcactttagcccatggtggcagggcttgccagaatgtagtttctgaccactgggatggacagtttgcttctgattagggctggtctaaatgttctcccagtgagtgctggctaaattctgccctgggttggtttctgctgtgacaggacatcgctgagttccaatgcaaagtgccccgtcactgtgcttttcctcccccaagtgcacagcttctgtgtcctgcgtgcaattgctgctgggggatgaggaaggagtggtgtagctgattgaagactatctttcttagtttcttcagtgcctctttccttaatacgaagttaaaaccaggtacaatgatcactcacctgatttttggttcttatgaaagtgcttttttatacagatagttgttcattttggcgttctgcgggggagacaatcactggaggcttctatttagccttcttggtccactccttccattgaattttatcattcattcattcatttattatttttgagataaggtcttgctctattgcccatactggagggcagtggcatgatcatggctcactgcagccttgacttctgggctcaagtggtcttccttcagcctgcctagtagctggaactacaggcatgctatcacgcccagccttttttcttctttctttttttttttttaaacgtagagaggttcttcctaaattgcctgggctggtcttgaactcataagctcagatgatccttctttctcagcctccaaattgctgggattacaagtgtgagccgccatacccggaattaaaatatttaaaaagaaattgtaccagtagttcataaacccttcaggatatagaggaggaaggaatacttcccaactccttttgtgaggcgagtaacaagaccaacataagagaaagacagcacaagaaaactatagaccagtaagtatccttcatgaatataaacacaaaaatttttaaagatacattaagctattcagcaacacccacaaaacattatacgccataacctattggtgtttattgtaagaatgaaaggttgcttttctctctgggaatcagttagtcttagataccatataatagaataaaggaagaaaactcattataatttcagtagatgcaggaagacttttgacaaactacaacatccatttgtgataaaactgacaaaggctgtctatgaaaaaccaatagccaacaaaatatgtaatagtgaaggagtgcatgcttcctcctgagattgggaacaaggccagagagcctgaaaaaataaacaaaaataaataaaaggcaactaaattttttactattaaaatttttttcttattcttttttctgttttacaggattttaatgtaacttcttttcttattcctttacgctgtgcatcttgttctcttttcctttctaatgtttccagtgatagtctataattactcaatggctttacaatatgcacaaaatactttcaaaaataacaataccagtatgattacatagaataatgacagctagatgaagtttaaatttttcattttagctataattttcttagtacatgccatctaaggatatacagtcaaattttgtgttccaaaatcatttgatgtagttttttcttgatgtgtggttattacaccaattagtagtgcttatttaactttcaaattttagaaattttgttttttcttttgactcaattttcattttgaacatgtatgatatttacatgactaaaatcaaagctatataatgagctgcaattcagaggatcttccttccatctcgggcccttctcttgttcctcttttgccccatcaccttcctatctcttccacttgtgtcttgtacagatctcgccctatcagcatatagaaatcttcctcattctttgtcttaaaaaattagtgtttaattcttcattgcaaagaaatatcatagtattttaaagtagccctttgccaatggacttctgggttcaatcttttgctgttaaacataatgccacagggaagccagatgcagtggcttacacctgtaatcccagtgctttgggaggctgaggcaggaggatcacttgagcccaggagtttgagaccagcctgagcaacgtagcagaaccccatcattacaaaaaatattttaaaataataataataatgctgttgtgaatagccttgtgtttatatcatcttgtatttgcccgtgtatctttggggtagattcctaaatgcagatgaaaaggtaagtacatttgtaattttgccaggtatgtctgtattgcttcttttggggctgtattatttgcattcctcccttatttgtaatatactagtgtatctgtttcactactgtctggccaacattgtgaaacattcagattttttccaatttataggtgagaaagggtttccctttgttaccttaatttttcttttattatgagtaaagtcaggcatatttttatatatttaatttgcatttttcagtaaatcatctgtgggcccatttttaacattaggtctttgctctttttattttgcttctccttactatcttagctttttaggtaagagtcagatgttttatgtgcatctctactgtgcttgctagtggaaagctcctcaagagaaaatgagcctaggatggtgcctgtgttattcctttcaggctgctatagcagaatagcacagagtgggtggcctataaaacaacagaaaagtatttctcatggttctggaggctgggaagtccaagaacgtgctgccagttgatggagtgtctaatgacagcccgcttgcctgctttataggcagcaccttctctctgagtcatccatggtagaaggggcaaagaactctctagggcctctttttttttttttttttttttttgcgacggagtttctctattgttgcccaggcaggagtacaatggtgtgatctcagctcactgcaacctctgccttctgggttcaagcaattctcctgcctcagcctcctgagtagctgggtttacaggcatttgccaccatgcctggctaatttttgtatttttagtagagacggggtttcgccatgttggccaggctggtctcaaactcctgacctcaggtgatccacccgcctcggcctcccgaagtgctgggattacaggcatgagccactgcacccggcctctgggacctcttatataagggcactgatcacctcccaacagccttacctcctaatacaatcacaccggggatcagggtttcaacataggaatttggggagtcttaaacattcagtccattatagtacccaaataaactttgcaaatcctgtatggcatctagtagtgtcctatagtctttttatgactgagttactttctgaatctagtatttttgacctggttatctaacttcatagcatcagaattttaatggccatttagtcttaaccctcttatttttacagatgaagatactaactctgcattcttaatttatagatttatagacaaaactttatagatgattattcaaatatattattttcaggtgagaaaataaaggaccagatagacaggtatatttctgtttgggaaatagcaatggtggttcactggtagggagaaactagaattttaaaatcataacttctgaattttttttttttttttgagacggagtctcactctgttgccaggctggagtgcagtggtgcgacggctcactgcaccctctgcctcccatgttcaagtgtttctcctgcctcagcctccagagtagctgggactagaggcgcacaccaccacgcccagctaatttttgtattcttagtagagacagggtttcaccatattggccagggtggtctcgatctcctgacctcatgatctgccagcctcggcctcccaaagtgctgggattacaggcgtgagccaccacgcccagccaacttctgagttttatatcctagaaatgtgtctattttttaggcttgagattcttctagagccttccagatgttctttaagcaagaccagatttgaaagtaaatgaaacattcttctttttaatgcccatgtttgatttgaagattttggggagtggataaaagtagtatggttcatgtgcaaatgctttttgtgttttgtggattttgcatatatatagtccttaaagttatttttgtaatttgtaatcactggtgtttactttgcctgttatgtagtaggcactcataaagttcctcttcaaagcagggatgttcatataattttatcttgttttcttaggggttcatgtgtcacacaagtaggccttctggaaagcgtgtatgaaatgttcaggaaggatgacccccgcctaagtttcacacgccagtcctttgtggaccgctccctcctcactctgctgtggcactgtagcctggatgctttgagagaattcttcagcacaattgtggtggatgccattgatgtgttgaagtccaggtttacaaaggtatcatacgccttaaatcagtaataagaagtgagcagcctacttgactggtgtgcctagacactgctgtgtgctcagtcacatggcctctgctgttcaaggagtgtgccacataacagtctgtggctacatgggatctgcctttatttcctgtggcttctgtaacaacttaacgcaaatttggatattctcttacacttctggaggccagaagtccagaatcagtttcactgggctgacatcacagtgttgtcagggccacgctcactctgggaactcagggaagagctgttcctggcggtcctaggggctgccagcattgcttggcttgtgctggtttcaccctggtctcttcctccctggtcacatttccatttcctgtctatctaatctccctacacatccttcttacaaggttgcctgtgatttcatttatggcctacccacctgtacaatccaaaataatctcctcatcacaaggcccttaactaaattttgtctacaaagtccttttttgccacatgaggaggtaggtttcagggatgagggcatcttttggatactttttgtggggcgagggcaggatgtatcactcagcctccctcggaatcctgttgggaaatactatgaatacccagatgctgcattgttaatgcagacttcaaaatagctgagaattttggattttcacctgttgttcccatgtcttcagtaagattttgtgcaaacattttctacccttggctcactatttggatgtcacacattatttcctgcttcaccagtgtaacatatcaatgcttatattcgtgttctagacctggacaattgcatgctttcttattgaagtgatttagcatttttgactgttaaaattctgtctgtctaaaggatattaagtattaaatttgatatattctataagatgtatttcatgtttaataagaccaaagataattattttttacctttttgaagctaaatgaatctacctttgatactcaaatcaccaagaagatgggctactataagattctagacgtgatgtattctcgccttcccaaagatgatgttcatgctaaggaatcaaaaattaatcaagttttccatggctcgtgtattacagaaggaaatgaacttacaaagacattgattaagtaagattttacttaattttggattctattttatttatcaatgctttgggtacatatatttttatgtatgtatatagtgtgaataaatattttatttagatactgagcttttatagttttcttcttataaaccacttaggtgaactttaattagggcgttaatttagggtgtattggataacagttgttttatcttgtactaatattttacaaataataaaactttttccttttactgttcttttcctactgtttttccccttgaatagcttgatatatttttagtgctgtgattttcagtaacaaaagatttagagtattttattttttctgagatttgaaattaaaggcatagtaaatattttttaacaggcattctaaacaatacaaaagtaatcaaatgtattttctctaaaacttgtcttttaatggagttctcctcctagtaaatattgaacacagacttttgccgtatcacattttgcatcaccaaacaaattcattattaccctcctcttacttggtgctgtcttacctcatcagtgaatgatgtcaccgttcagtcatgactaggctgttgtctgtcctccttgcttccttccctctctttacttactgcacttgatgccgttgcgtcactgaccactgtgttgcaagatccatgtatatatgctgcctttgctgtgagatggatgacatgttccttttcatattcccagtgcctaatactctgcctggcacaagcctgaccctcgagaaaggctgaatggcattaggtcctgttgtctggcattgttgggcttgagcagtgattgccatgttgtgtgaattgatttgtcacatggatctctctgcagattgtgctacgatgcatttacagagaacatggcaggagagaatcagctgctggagaggagaagactttaccattgtgcagcatacaactgcgccatatctgtcatctgctgtgtcttcaatgagttaaaattttaccaaggttttctgtttagtgaaaaaccagaaaaggtaggccactcctacggtgtgcactattgttattgtaggagttcaaaagttagattatatcagtcaaacttacagataatttataccatcttatattaaagatgtggttcgtttaattctgcataggtatatttaaagctggagtgcttttccatgagctattacatagcattaattctaaagtaacatcgattatgaggatcttcaccattcagctatttttatatgattctttgtattcacagaacttgcttatttttgaaaatctgatcgacctgaagcgccgctataattttcctgtagaagttgaggtgagtgaaattttcaatgttaaaaaaaacttatcaagtgctcacaaagaaaaccatattatgtcaaacacgttaagttgccaatattcaagtcggctttcaacaaaaactggtggtttcatgtggtttctataaaatctggcaattgtagcttcagatacaatctcaggcaactacaaaatttgtcagaacttgatttcatctcttgacatgtgtaggaaagacggtgccagtaaaaggaagtgttaggacatatcccagaagttgttttctaagtgaattgctccagtcaaagaagttgagatccttacagtggccttgcttgggcaacgtggcaggatcatggaaaagtcatgggttaactggaagacttgctctggcagatgggacaaggtttgttttagccaagctcagattgacatgccagcctcagcagttgggcagttggtgagaatgtggtggttgctgccttcagcacccattggaaatgggaaggtgggcagagagctgagctcatccaccatggcgtgcactttccccacacagctgctgacctctaccatgtcttagtgcttcaccactacatgtgaatgctgatcctgccttgtacttcttctgaacaagactaggattgttttctaggcatatgttcaaagaactaaaaaacaacaaaattagcaccagtttattaagcgtgtagacacatgctgtatgttacttctatattttacaacaattacaagcactatgatatatcataactagatttgaataaattgaggttcagagataaatagaatttatcagcagtccaggcataagagtttggtacacactgtacgcagtgagctgtaccagagctgagatggaggttaagtgcctgggccgagttctgtgggaatctgcaggaagggctttccttaagggacactcactagtctctttttgaggttatttttgagtgcttttaaatttgttttgttttgtttaaaaatttataattttttttttgccagattgctactaaaacagaaaaagtatcactattattataaaatgttttacattgtttatttgttcttcccaataggttcctatggaaagaaagaaaaagtacattgaaattaggaaagaagccagagaagcagcaaatggggattcaggtaggatgttttcaaaatcatgagaaaggattcaaatcgatgggttattttgttttgttttgttctaagacaaatagaggagtaaagtattttttatgtaaatagaaaatactttaagtaccctaaaacattgaaattgactttgaaaaagtattttaagtggcaaatggaattatattttgaaagaaatgtacttagctaaacttagctgcatagaaaggtctcagagtggccagacggggttcagatatgttacacttttttaaaaatacaaaattagcttggtgtcttattgtttgcatatggattgtgtttgtatgttgtttagatacattcagaagtctacattagaatacaagtcctttcgagccactcttctgtgcccagcctcactgtgggttcccatctccggcaggacagagctgctcaaggcccctgacctgccgactccctcccctgcagcccttcttactgctcactccagcatatggctcttgcctgtgccttgtaggcgccaggcctgcttttgccctaggtcgtgtgcacttgcagtttcctctaataccctcaaccccaggtattagcatacctcatgacattttgtttaatgtcaacccctgaagtagactcttcctggcctccctatttaaaattagtccactatccctctatatgctccttgtttttgttttttgcttaatttttccttatagctttatcatcatttcttgatatgagaataaaatttggaccagttttctaaatctcttaggtgttttggattagctgcttttcagtggtatttcttcccacatttttgttagacttaatgggcaaaatgtacatcatcaaaattttaaatgcaaagaaaatgtgttaatcatatgcaaaattggaccagtataacaatttccttgtctatgacagaataactgcttgataacaacaaaaagaaaatgaggtcttttccccatttcttttttgctttcttaatctggataataggttaataatcactggcttgatgaaaaccttagattaaaatgtgctttaattttcatatcatttgaatttagagaaatacatttcttactaattatgtttgaatacatgtaattttctccttttttatatttcagatggtccttcctatatgtcttccctgtcatatttggcagacagtaccctgagtgaggaaatgagtcaatttgatttctcaaccggagttcagagctattcatacagctcccaagaccctagacctgccactggtcgttttcggagacgggtgatcacatttcacatactaaaagaatattgtcgatgtttgtgaagaaagggggtcacagctatgccttgctgttactacaggaagccagttctctgtccattgacaaccctcggagtatagagttaatttggagaattttccaagatctaattcctagccttttattctgtagactcagcagtcagatatcatcagcacagtaggaggtcagaggtcaacatagcaaagatgctctgacctgaggtgcactcccggggagtcaccatacagacggttcagggggtcacatagcagagacatctgacctgaggagccaccctgaggagtgaccatagatgggggtcaggggtcagtgtaacagagacatctgacctcaggagccaccctgtggaatgactgggcagacgggacggggactatgtacttgggatgcaaggaagacatgaaatccttcttatctgttaattgtacagtgagtgtatttgatattattaccagattatcattattacctaagtgtttgttatatgctgttgccccagaaagagcctcccacatccactgccttgtccactgaatgttaactgtaccctctgctctcctgggccctccctttcgcaggagcagcgggaccccacggtgcatgatgatgtgctggagctggagatggacgagctcaatcggcatgagtgcatggcgcccctgacggccctggtcaagcacatgcacagaagcctgggcccgcctcaaggagaagaggtgcttttcccactcatcttacctgttaatactatattcattggtgtcatactgagaatgaacatttaatattgaaaacaaaaccaaactgcttatcaaataaatgtgatttttttttgttcatgtcttactttgtccttgttttcccataatatcaaaatgtatcattattttattccacgttttaaggtaattttgaatgttttattttaggattcagtgccaagagatcttccttcttggatgaaattcctccatggcaaactgggaaatccaatagtaccattaaatatccgtctcttcttagccaagcttgttattaatacagaagaggtaagtaattgattatttctttattctttgaatagattctgtaagtctktttattcaattctatgaatgaatcaattgcaattctatgaatatacttaaaaacacacacaaaaaaggaaaatataaaggggcagagcatgacatttttgttctctgattagccacccaatatttatctacttgttcatcaccattcttttatcgtttttaacatatgtaaattcacctctcgtgagttagaagtggtctttgtataaagtacatgtagctgctttcttacggctgccaacgttctttccttatagtaggaaaaaaaaaagcggggggtggagcgggggagaaaatattcctgttaactctatatgaaaaacagckgactcttaggcaattgctgagttcgtgaggtaggagcatcttggagtccattttggaaaggcctttgagctagacgtggtgaagtgcagtgagagtttgcactaggcagggaaggagtagcatagcacgggtggtccctgggtgagccaagcaggtctgcactgactgcctgggctgtgggagtgtggtctggaccagagccaggccaggccatccagagctatgcagagggttgggctcattcattgagcaccagggaaccactaagggcactaagtggtggggtgacaccatccacttggctccgtagaaggtcattctgggcagctctgcagacatggcgagtctgtcaggacatccctgacaggctgctstagggctgcagcagcaccttctttcctcggggctcacttgattcttcacaccctgggcacatggtctcagggtgccatactggggggactcagacagccgtggcctgagatcaagctgctggcagggttggttccttcgagagctatgagagagcctggtccaggctactcctagcatccggcagcctcaagcactatgtggtgtgtcacaggcattctccctgtgtcttcacctcatcttcccccttgtatctgtctctgtgtcctgatttcctcttttaataaggacaccagtcatatttgattagggcccacactaatgccttcactttaacgtgcttacctcgcttttggctttaggtccagtcatagtataaaattttagctgatggaagatacagtcttgtattaatattttggcaatttaagaccattctttgatgtttgacttttacatcctcttgtaggtctttcgcccttacgcgaagcactggcttagccccttgctgcagctggctgcttctgaaaacaatggaggagaaggaattcactacatggtggttgagatagtggccactattctttcatggacaggcttggccactccaacagtaaggattgatgcatcttttatgttaatatattatcctttgccaatagcctatagagcctatgacacataattcaggtccctctcactgactgtgctatggttttcagcatttgttgctacattgctggtgtgctcctaaaccaaatggcctcagcctgctttggttttgttttgtttcctttgcctttggtaattcgtctgaccttgcttttattatgaagctgtcaggtgtttgttttgttttgtttgctgcctttacttgccttagaaatgagattgcaaatttattaaaactatgtgtaaactgaatttcaaccaaccctgaatgggaggctctgaggactcctgccttgaagtccctggattttggcatttgtgccatcttctctactcccagagtattgactaataccagcaatggcaagattagggctaaagcagtagctgccagatgataacaccatgttatgttgaggcaaatgcagtacccaccagtgtagacatgtgtgtgtgtgttggtgctttgcctactcatttaaaactgtggacactgacagcatacaaacgttttcatgtgaggagatggtaagaacagtctgtattaaatataatatacacatgcggggctaggcatgatggctcacacctgtaatcccagcactttgggagaccaaggcaggcagatcacttaaggtcaggagtttgagaccagcctggccaacatggtgaaaccttatctgtactaaaaaaatgcaaaaattaactggacatggtgctgcatgtctataatcctagctattcgggaggctgaggcaggagaattgcttaaacccgggaggcggaggttgtggtgagctgaaatggcactactgtagctccagcctgggcgacagagtgagactacgttcccccagctccaccaccacccccccaccacaaaaaaatacgtggagctttctcacacgcttgtctctggatgtacctatctcatttgtttcacagttaaccaaatttagatttctttgtcttagtgtaatgaaatactttgttttctgcttaataaaatgaaaaaattaagaggggttcagtttaacaagggtccgttgaaagagattgatgtagctgtcagtggctcagctgaactcaagagagtggaactgccgggctcgaggtagctgaataaagcaacagcaagccagaaaggttgccgtgaagcttttactcactctggagtcatgggagtgagaggctaacactggagggagactccccttgttctgtttgcccctagagtggtgcactgctcagcagccagatggattagcacagacaagggccgtctcaccattgagaggccctgaacaggaggctctgcagttttatagggaagagctgagtcagaaagcactggatactgagtcggagtggggaaagcaccttcatgctgctcccctgccctgcaggcgacccctgtccagggcctcagataaagagtcctaggcatggaggctccagggaggaaggcagaggtgcatgcatggggcatggtggctagcagcctgcaccctggacggcaactctgagattgcagcgccggcggtgcctggtcctcttgccaggtcagcctttgttgttacctgtttctgaaaaatcacagggctttcaacaggagccggactcctgtaaaatgccagatttcttttataaatgaacttgagttaaaaaatgctttccagaatggaatgccgcatattaatacagaatttctgtaccttttcagggggtccctaaagatgaagtgttagcaaatcgattgcttaatttcctaatgaaacatgtctttcatccaaaaagagctgtgtttagacacaaccttgaaattataaagacccttgtcgagtgctggaaggattgtttatccatcccttataggtatgtttactggtttttgcagtattgtttagaaatttaggttaaaatgtagtgtgtcgtaaatgatgattacagtgaaatttaattacatgaaatgataggaggaagaaaataatttattgttactaataaaaccacagcctccagagtgtggcaccagatgcgtgtctcgcaccctccagtggccctgccctccgcctcagcttgcctctgatgtccccacgctggggaggggcactaccttccgttggcccatggggtagagggtggtgggaggtaggtaggatttgtgcgtaattcctttttttgtagcctgaggcaagctaaaacttccaaaaagttttgctatcaactaagggagaatttaggcaaataattaaaatacgagggcgataaaattgccagtgttacaaagctggaggaacctggatgtgaacaggaggtattagcaagcagggatattggatatgggaaaagaaaaagaaagcatttctgtaaagtcaaagctagacctggggaagaaacagaaataaagaaaaagcatttcttaccctgaagattagctttagaaaattctgtatttggccgggcacggtggctcacgccttaatcccggctctttgggaggccgaggcgggcggattacgaggtcaggagatcgagaccatcctggctaacacagtgaaaccccgtctctactaaaaaaatacaaaaaattagccaggtgtggtggcgggcgtctgtagtcccagctgcttgggaggctgaggcaggagaatggcgtgaacccagggggcagagcttgcagcaagccgagatcatgccaactgcactccagcctgggcgacaaagcgagactccaagactccgtctcagtcacgccactgcactccagcctgggcgagagtcagactctgtctcaaaaaaataaaattctgtatttgtcttcctgcttcttacttgattatgcaacagtctcaattttctcctttgtgcttatgtttcaggttaatatttgaaaagttttccggtaaagatcctaattctaaagacaactcagtagggattcaattgctaggcatcgtgatggccaatgacctgcctccctatgacccacagtgtggcatccagagtagcgagtacgtgtttgcttgattattttttaggtcacgtctacccaaactggattgacagacttcagtatggtgcagttttgataattttaaggaccagacccatgctacaaatgtttctgggccaggcacggtggctcatgcctgtaattctaacacgtttgagaggccaaggcaggaggattgcttgagtccaggagttcaagaccagcctggacagcatagcaagaccgcatctataccaaaaaaattcttgtctgcctaaatttaggaagatggatttagatttttttggaagaaatgtttggggcaaatgagaaatgtaggtgtttaaaacagtgtgattttttcatatccatgctggaaggtgagaggtgttaagtatttcttattttctaaactgatattctgaacatttatccccaaaagtaatgcaggcccctcggaaggctttgttctgggctctctgacggtgagggctggtagacgctgggctgcaccatcccgcctgggagctagggcagctgggtgtgacatgtcaagacaagaggcctcagaaagatggttccgggacatcataaaaggagcaggacatctttgtcctgctcctgagggttgtgaagtcagtgttgattcctggccactccctgggtttccgcctgccctgcccaatcactctctctgtttggtcctccgtgttggccccccagcaccgtcggaccagttactggtgccagagatgacacatgacctcagggctgaggcagccagcttcgcggcagcctcagtgggaactcggctccttttagacagtcactggctggggctttggcttctacactgggataaccttgcagagtcccctgagtgctgacagtgaatgggtggctccctgggaagcctcctcacacagacggcactgggagtatgctctttctcattttattgtccttgtcctgctatagtaggtgggttttgaaagggagtcagtgtcccgtgatcttggatagtagctctttctgtcactgcacctttctgtctgttcagccttgtgggatggtccagctgcagcggttctgcatgatgggacagcagactgccctatgcttttctggttatgacatcgggcacccttacgtacatgctgatgtgtgcatttgtgcatggaatttgcatcacattctatatttagatttcctcaacttaggctgtcaatatgacatgagaaggaaaattgtcatttatatttgtggaacaacagaatggtttatttgatgcatatgtcttttctgtgtttattgtagatacttccaggctttggtgaataatatgtcctttgtaagatataaagaagtgtatgccgctgcagcagaagttctaggacttatacttcgatatgttatggagagaaaaaacgtgagtgtgctacacaattttcaataaatacctcttactctgttttgatttgttatgacccttgatacttatatgtttatttcttgtatggtattagaaacaaaatgggcatctgcatttattaaaattttactgtttcttactataatatagcaaatataatactcagttttttagagagggcacatgatttttaaacaccttggaaacttggtgaacgtggagagatcagcaaccgacttggtaatgtaaaatcaggatgagagtatttaaccagcttttattactatgaacttggtctcaggatttccttgtggaggaaattgtcctggtagatagctgctgtcctcccccagtccattcctccccttgcagtttttggtgtagctgttgaacaggggcagggatctcccaggcgaccctctcagtactgctgccttgcccactggacaggactgtgagatgagcctaactgaacgtttaagtgcagtgcgctgttcagataagaggactgaatgaagaagtaacatgttctttattgttttaaagtctttttagagctgggttcttgctctgtcacctgggctggagtgcagtggtgtaatcatagcacactgcagccttgcactcctgggctcaagccatcctcccaccttagcctcccragtagctgggactacaggcatatgccaccatgcttggctaatttttgtattttttgtagaaacaaggtttcgccatgttgcccaagcagggtggtgggtttcaggttcatcactgggataaggtgctctgtggatccctggggatcttgctgctgcagagcctgtctgggtggcccagctggtcacaccctgaggacactcttggctcccgtcctcctcctgtggcagccccctctccctttcgtcagctgcatttccctgaacacctccacagctcggctttggcctcactcactgctcccctgcccgcctcgtccagcctcatggctttatgtagactgcctttatgttcatgattctccagtttgcaaccccagctcagttactctcctgaaagaaaggacagagtagagtccaggccatagtcactgttgggctggatgaggagaggctcaggagaagccaggtggtcctgagcaggcaccagtgggcccagtgctgtgattggacccttgtccatgtcaccaagtatggatttgtttggatttaaaataaaattaagatgacccctttgggaagatcaaatattacttgtaattcattttagggattatcagctatttttgtaaataaacagatttttaaaattcagtagaacttttttacaagatgattctaacatccctaaatatgaggtttaaatctacataatatgtttcatttccaccataaatggagcaggttacagcagatccccaggtttaatctctcatgacttaaatttcaacttaagaataaaaaacacttctgttttacgtatttttttctgaatataaaagtgatacggatttatcgtagaaatttggaaagcagagtaaacataaagaagttggtaagaggccgggtgctgtggctcatgcctataatcccggcactttgggaggccaaggcaggcagatcacttgaggtcaggagttcaagaccagcctggccaacatagtgaaaccctgcctccacaaaaaatacaaaaattagctgggcatggtggcacactcccataatcccagctactcgggaggctgaagcaggagaatcccttgaacctgggaggcagaggttggagtgagctgagatcacaccactgcactccagcctgggcgacagagtgagactccatctcaaaaaaaataaaaagaagtcagtaagagaggctcgcactcttcccacgcaatgtccctcagcacctgtggcacacagctccactgttcttggtctctgttattcatactgttttataacttgctttctttacttgctagattgtgatcatttcattgtgttgtcgtattaaatacttttaataaaaagacatctgattaattggtagggtaatactatgtgtattctatatggggttcaggccgttgaaatttgtggttttgtgttaagggttttccttaagataatttaaaaatagcctcatactacagattcggtatctctattccaaaatgcttgggaccaggagtgtttccattttctggttttgcaatattttcatgatagtttctgtttgagcatccctaattcaaaaattcaaaattcaaatgctccagtgaacgttttgttgagtgtcatgctgaggctcaaaacgttttgcattttggaggattctggattttcagatttgaggcgctcagtctgtgttgagtttgcattgaaaaactgttcggtctgtgtgcctttgaaacgttgcctacccctctttctgatgtttgtgaggaaggaggtgagccaggaaggacagcagtgttttccgttgcttcctgccagtggactctactgagtacttctctgtgtggaggacatttgaggacttcctggttctagggatgcagtagggaacaggacaggtcatgtccctgcccttggggagctggcatttggggaggggagacagatggtacacagatgaatatataacaggtagcaacacttggtgaaaagaggcaggacatgagcagacagtacagtgatggggactgctgtgtgaatagaattgcttgaaaattctagtccatgtgaatattttttatcagaaatctgaacaccataaaatatgtctcaaacaatatttagccatttagcttagcttctcaaaggacttactggtcctaccaagtgttttggtgtcagtaggaaacactgatcttcattgatctgacatctacacgagccagacacctgggtgctcagcacagagcacagtgatgtggactggctcaccgaggtgtaggaactcaaggatccagagcctaagggtgtgcgatggtcagtgtagaccagcagacatccccagcacctactgtcccatcatctaccttgtaggtgacaacattgagcacctttgttgggctcacttaaatactcaagataaactttgctttcaatgcttaacctacatttccacttttgtgtatttgaaaataaacttaatttttcagatactggaggagtctctgtgtgaactggttgcgaaacaattgaagcaacatcagaatactatggaggacaagtttattgtgtgcttgaacaaagtgaccaagagcttccctcctcttgcagacaggtatgggctgtccagggatcctttcggggcaggagggtcctcggccctcctctcaccagttcccttccccgccaggttcatgaatgctgtgttctttctgctgccaaaatttcatggagtgttgaaaacactctgtctggaggtggtactttgtcgtgtggagggaatgacagagctgtacttccagttaaagagcaaggacttcgttcaagtcatgagacataggtgagtgaacactagccctgctcttgggtcccactggctcataaagcgttaatttattaagacgtctccaactcaagaagaacctgtgggtttccatgatatacacatttgtgaagttggaatctctgaagaaaaggtgaaggcaccataagaataggatatctgctgaggtgggcctgctctctgctcccttggcctggcatcttggggagccacatcccagggcgtgtttttcatccataaatgaaggaggtggcctatggggttaccttggctctcttcagatttaaaatgtatgcttttgagttctgtacctattttgccaggtgagagcttctgttaatgtgtttaaattgttcatttattttcaaaattgcaacataacataaaagtatatgttaaaagagaaagctgctgatcacttacattatattatttccctgtccctgtactcttttccagtcttagtctattagtccatataccttttttttttttttcatttttttcaacttttatttttgaataaggaagtacaagtgcaggtttgttacgaaggtatattgcgtaatgctgaggtttggtgtacagatgaatctgtcactcaggtagtgaccatagtacctagtagttagtttttcaactcttgcctcatatcctcccttccccttcttctgttccccagtgtctgttgttcctgactttatgtctatgtgtactcagtgtttagctcccacatatgagtaagtacatgcagtatttgcttttctgtttctgtactagttcacttaggacagtggcctccagctgcatccatgttgctgcaaaggacatttcattcttttttatggctgcctaatattccatggtatatatgtaccattttctttatccagtccaccattgatgggcacctgggttgattccatgtcttagctgttgtaaatggtgctgtagtgaacatatgggtgcatgtgtctttttggtagaaagatttattttcctttgcgtatatacccagtaatgggattgctggatcaaatgatagttcaactctcacttccttgagaagtctccaaactgctttccacagtggctgaactaatttacattcccaccaaccatgtataagtgttcctttttctctgcagccttgccaatatctgccagatttttaactttttaagaaaaccattctgactggtgtgagatggtatctcatttgcatttctctgatgatttgtgatgatgacttttatatatatatatatatatatatttgttggccgcttttatgtcttttgagaagtatccatgtcttttgctcattttttaatggggtcactttttacttgttgaattaagttttttatggattctggatattagaccttcgttaggtgcatagtttgtgactattttgaatattttctcccattctataggttgtctgtttaccctcttgatagtatctcttgctgcacagaatctctttaatttaactaggtcctgctggtcaatttttgtttttgttgcagtttctttttagaacttagtcataaattctttgctaaggctgatattgagaagggtatttcctagattttcttctagtatttttgtaatttgaagtcttacattgaagtctgtaatccatcttaatttttttatgtggtgataggcagggctctagtttcattcttttgcatatggttagccagttagcaccatttattgaatgaggcatcttttccccacagcttatttttgttgactttgtcaaagatcagatggttcggctttatttctgggttctccattctgttctattggtctgtgtgtctgtgtttttttgtattttgttttttcccccgaccagtaccatgctgttttgattattgtatccctgtagtatagtgaagttgggtaatacgatgttctggctttgttctttttgcttagaattgttttggctattcgggctcttttttggtttcatatgaattttagaatagttttttccaattctgtgaaaagtgacataggtagtttgataggaatagcattgaatctgtagattgctttgggcagaatggctattctaacaatattgattcttctaatccgttttttcatttatttgtatcatctctgatttctttcagcagtgttttatagtcctccttgtagagatctttcacctccttggttagctgtattcttaggtgttttattcttttctttgctattgtaaataggcttacattcttgatttggatctcagctgtaatgttattggtgtatagaaatgttactgatttttgtacattgattttgtatcctagaactttactcaagtcatttatcagttctaggaacgttttgtcagagtctttagggttttctgggtatagaatcataccatcagagaagaggaatagtttgatttcttcttttcctatttgaatatgttttatttctttctcttgcttgattgttctgtgtaggactttgagtactgtgttgaataggagtgatgagagtgggcatccttgtcttttccagttttcaaggggaatgcttccagtttttaccatcattcagtatcatgtaggctgtgggtttgtcatagatgattgttattattttgaggaatattcctttgatgcctggtttgttgagggtttttatcatgcaaggatgttggatttttttctttttcttttttttttttttttgaggcagagtctccctctgttacccaggctggagtgcagtggcgtgacctcagctcactgcaacctctgcctcccaggtttaagcgattctcctgcctcagcctcctgagtaagtgggattacaggcacatgccaccatgcctggctaatttttgtatttttagtagagacagggttttatcatgttgaccaggctggtctcgaactcctgacctcaaatgatccatccatctcagcttcccaaagtgctaggattataggcgtgagccactgcacctggcccagaatgttggattttattgaaagctttttctccatttattgaaatgatcatatggcttttgtttttaattctgtttatgtggtgaatcacattattgatttgtgtatgttgaaccaacctcgcattctaggaataaagcacacttgattgtcacgcattgacttttagttgtgttgttggattcaatttgctagtatttcgttgaggattttttcatctgtgttcatcagggatttggcctgacgttttcttttttcattgtgtcctgccagattttggtatcaggatgatgctggcttcagagaatgagtcagggaggagtccttcctccttggttttgtgaaatagtttcagtaggattcgtaccaattctttgtatgtctggtagaattcagctgtgaatccatctgccctgggttttttgttttctgctttttttttttttgcttggtaagtttttttcattattgatttaatttaggagctcctgattggtctgttcaggtttttgtttgtttgtttgtttgtttgtttttaatttctggttcaatcttgggaggttgtatgtttccaggaatgtatctatttcctctaggtttcctaatttgcttacgtagagtgttcacaatagtctctgaggatcttttgtattgctgtgggatcaggtatgatgttatctttgtcatttcttattgtgcttatttagatcttctgtctgtctgtctctgtctccctctattgatctagcttgtggtctatctcgtttattctttcaaataatcaacttttggttttgttgaatctttgtgtagatttttggatcacaatttcattcaattccactctggattttggttatttcttttcttctgctgtctttagggttggtttgttttgttttggttggttttaaggtggagtctcaccgtgttgcccaggctggagtgcagtggtagcgatctcggctcactgcaacctccacctcccgggttcaagctattcttttgcctcagcctctttcctgagtagctgggactagaggtgcacaccaccacgcctggctaatttttttgtattttaagtagagacagggtttcactatgttggtcaggctggtctcaaactcctgacctcaaatgatcctcctgcctcaacctcccaaagtgggtacaggcatcagcctctgcacccggacttggtttgttcttatttttctagtttatatgcgatgtttgattattgatttgaggtctttccagcattttgatgtaggcatttagtgtccctgttttccttaattgaaaaaaattttttgattcttgccttaattttgttgttttctcaatagtcatttaggagtaggttgtttaatttttatgtaattgtatggttttgagaggtcttggtattgatttctatttttattgtactgtggtctgagtgtgtgcttggtatgattttgaatttttttttaatttattgaggcttgctttatggctgagcatgtggttgatcttagagtatgttccatgtgcagatgagaagaatgtatattctggtatattaggtggagtatgctgtagatgtattgggtccgattgttcaagtgttgagtttaagtccagaatttgttagttttctgccttcctgatctatctaacactgtcagtagagtgttagtttcccactattattgagtgcctgtgtaagtctcttcatagatctaaaagaacttattttatgaatctgggtgctccaaagttaggtacttatatatgtagtatagttaagtcttcttattgaattgaaccctttggcattatgtaatgtccttttttgtcctttttaactattgttggtttaaagttattttatctgataaaagaatagtgactgctgcactttttcattttctgtttttgtgatagatctttctccatccttttactttgagcctgtgggtgttgttacatgtgagatgggtctcttgaagagagaagatagttgagttttatttttttaaatccaacttgccactgcgtggcttttaagaggggcctttagaccatttacattcaaggtttatattgatatgtgaggttttgatcctgttgtcgtgttgttacctggttgttttgtagacttaactgtgtagttgctttatagtatctgtgggctatgtacttaagtatgtttttgtggtagcaggtattgttcttctgtttcatgtttagcactcccttaaggacctcttacaagacaggtctaatagtaacaaattcccttaatgtttccttgtctgaaaaggactttattttttctttccttatgaaacttagtttggcaggatattaaattcttggttggaatttgttttcttcaaggatgctgaaaataggccccagtctcttctggtttttaaggtttctgctgagaggcccgctggtagcctgatggggttctctcagtatgtgagctgacccttatttctagctgcctttaaaattttttctttcacatcgaccttggaaaatctgataactatgtgtcttggggatggtcttgtatagtatgtcacaggggttctatgaatttcttgaatttgcatgcccacctacctctagtgagatagggaacattttcatggactatatcctcaaatatattttccaagttgtctctttcaggaattccaataagtcataggtttggttctttttacatataatggatttttacataatccattattttttagagattttatttaaaaattcttttttctttatttttttctgactgggttgatttgaaggactggtcttcaagctctgagattctttccttagcttggtctattcttttgttaatgtttccaactgtattatgaaattcctgtagtgaatctttcaaaaccggaagttcagtttggttccttttcttttcttttcctttgttttgttttcgacagggtcttgctgtgtaacccaggccgaagtgcagtggttgtggccgtgacttactgctgcagcctcgacctctcaagctcaggtgatcctcccatctcagtctcctgaggagctgggaccacaggcatgcaccaccatgcccagctaatgatttatatttttgcagagatggggtttcatcatgttgcccaggctggtctcaaactccccaactgaagcaatctacctgcctcagcttcccaaagtggtggggattacaggtgtgatccaccacgcctggcttgttcattcttaaaatggctatgttgccttttgactcttgaatcattttactggatttcttggattgaatttcagccttctcctggatcttgagctttctcgccatccggattctgaattctatttctgtcatttcagccatttcaatctgtctgcaaaccattgctgagaggttaggacagttgtttggaggtgagaagatactttgaattgccagagtgtttgcacaaattctttctcatctgagagggctggtgttcctttatctttttggagttgcttctgcttggatgggaccttttgttttcttattcatcattttccttgagggtttgactgtggtgtatgctgagtatagtcaactggctccctttctgggtgttctcagctggctgaggctctgtataggctctcctgaggctctgtataggatctctcctgtataggatctctctaggttcctgcattgggtttcacaggtgatggatactagaagaattttttttagtgatataattcagactatgatccagtatatggtgcttaaggataagggctagcagatagactcttagattacagtgcgttcagcacagtgctctgtgctgggggtaggggaagggagatgaccccctcaccaagttcattcccaggccttagaggagccccttccaatcactggcaccatacccacatttcctgaaccccaaggggggccctggtgggctgcactccccatcccttagcagtagcctgagctgaaggttaggtcaccaggagacctgcagcattccagaggcccactggtcctctgtgcttggcaaagtcagagagggttgtggggtatgtctctgggtggtctgttggtatagtaggtcaagggtgggggatctcagggcagggtgatgttgtcgtggttgtgcagctggtgaggtgcccacagcctggggttttttgcccagcacacagttgtggggactgcccagttcacgttcccttgaccaagtctgctggtgtctgcccttgtagctagcctgaccagccagttttatgccatgctttctgcgcccagatcactgggctgttaggtgtttcaggccacagggtccctcaggcagatgcaaagctggcaaacaggcctcacccttcccagaccagccttgtggaaggggacttacccagcactcatgctggaacacaaacccacgtctcactctactcagtgttctaagcagagcttaagttctggccacagatctcagctctgtattcctgaacgatgtgcttagaccctggggggctgagaccaggcccacagctttgtcctctgtccccttggaatcaagcactgtgctggggttgccgaagtgctccaaggccactggcaaagcactcaggctgggtaatggaggctatgctgtgtgtatgctcttgtgggagcagctggggttgggagtgcctgggaagttgacagataggcgtgtagatcagcctctccccagacccacaggaaggacagccctgctctttcccagcccagcattcagcaggggatagagtgactcagagcaaggtgagaacctgggggcatgggtgcctggggttgcatttgctggagctgctccacactgagtgagacctgctgggctccacataggctggtgctctgcctgtgccttctctctgacagttccctaccaattcaaatgtctttggggttgtgggatctcttgtggctagtatcccagagctccacggcgagcgtggattgccccatatagtcactccactcaccccttccttaggacctgattagggccaggtcctggcacccggagactgtgcaggcttcccagcttcctccctcttcagcctcagtgtctgtgttgcctctctattgatgctcagtgctttctttccaaagatgtcttcgaagcatgttggtttactcattttgctctgttttggtgggagaggccctcctggctatgtctattcagccatcttgtccccctcctatgtaaatatttttacacagcaataaacatgcattgtgtcagtaacaaaaaatgtatgtcactgtcctaatatccttacattcactgagtatctactgtatgaagcattcagctgggtgctataaggagtcaaaataaggaaatagatatttgcctcatttagagctcagattgtacttcactatacaccatgccaggtagctcttgaagtccttttaaaaaatactttgccattattaggtttttctaaaaataaactttttatattgaagtaattttgcatttacagaaaagttgaaagatagtacacataatttccatatacaccctttacccaactttcccccttacataatcttggtacatttgtcaaaagtaagaaattaacattagaacattactatttaccaaactagactttacttccatttcaccaatttccttctaatatcctttttctatttcaggatccagtgtagggtagcacatgaagtaatttgtcttatatttgataatctagtccatgatcattttaagaatataagttttatataagtgtagcgttatctattataactaattttgaaacaaagaagaaaaagttgcctgtcatactttgaaagtgcaataataaaaatagctaaatttgtgtgtttttaaaatctctcccatagagatgatgaaagacaaaaagtatgtttggacataatttataagatgatgccaaagttaaaaccagtagaactccgagaacttctgaaccccgttgtggaattcgtttcccatccttctacaacatgtagggaacaaatgtataatattctcatgtggattcatgataattacaggtaagctatacattgactattttattttgttacttttttgagataaggtcttgctctgtcgacgaggctggagtacaggggcacaaacacaggtcactgcagtctcaacctcctcctgggctcagttgatccttccatctcagccttttgcgtagctgggtctatgggtgtgcaccaccatacctggctaattttgtttattttttgtggagacggggtttcaccttgttgcctgggcaacattaacattttagggatcatttgggtccccttagcaatctggaacataataacacatttttttttaccatatgattaataattaaaacatgtattttggtatatctaattgtatccttttaaaaactcatttcacatatgtgtgtgaaaaaatcagagtgaaaaagtgtggtgttgtgcttataaaacctattttcatagttgtccttttaagatcttgcaaagactaaggagatgaactctgccaggaccaccgggcactaccacaccaccacagctgagcgtcacaggaccgctgggcctcctgtgggcccatcctcctgttccactcagctcctgctgggagcaaggatgggttctcaaggcttgtgcacacacccatgagtggggcaagctgtgatttggagatctaaagtctaatgggaaaacaagccttttaaaattgaattctagatggtgttactgtagttgaacaaaagggccagaagagagcattaatgttgtgacattttgctgttttctcaagcagagatccagaaagtgagacagataatgactcccaggaaatatttaagttggcaaaagatgtgctgattcaaggattgatcgatgagaaccctggacttcagtacgtgaataactgggctgggacaattaaatgttaagggtattgctttcaaaggtagcatagagtatttttcaggagttttagaaatgtatttgcagtattagcattttctctgctttctgcatttcacaatatttagtaaaagagtattttaaagcacattatgaagagtaaggctttacaatcctgacaacttaaaaataacactcttgaaaaagtcatatggaccaaatgctgtatggtagggcagtgagttaaagtgtttcaaaatgaaaagaaagtctgtaatgacaattcttctgtttcccatttaacacacatagttgagatcatgctgtaagtattaatgttgaaaataaagtgtttgaaactttagaaatgagaggaaactgtaatattagttatatatgaaagtgtgaatgatgattgttaccctctaaaatgcctgtcctgagtaagtcagttatatgtgtttcttaccaaatactgattatataagaagaggggtaaactttttattattattatgttttttagagatgaggtcttgctctggcacccaggctggagtgcagtagtgtaactgtagctcactgtagcctctgactcctgggttcgtatgatcctcctccctcagcctcctgagtagctgggactacaggcataacgccaacaggcttggctgattttttattttttgtaaagatagggtcttgctatgttacccaagttaggcttcaatgcctggcctcaatcctcctgacttggtttgccaaagtgccgggattttaagtgtgagcactgcacccagcctcaatataagaagccatatactttttatatgtttctgtatattacttatttttccattctgctataattttaaattcattgagcttcttaaaattgtatttggatttcatatgcattcataaattataagacctaatttggtatgtatgtatgtatgtgcaccaactacatacatacatttattttattttatttttttgagatggagtctcactctgtcacccaggctggagtgcagtagcatgatttcagctcattgcaacctccgcctcctaggttcaagcgattctcctgcctcagcctcccgagtagctgggactacaggtgggtgccaccatgcccagctaatttttgtatttttagtagagacggggtttcaccatgttggtcaggctggtcttgaactcctgaagtcaggtgatccacccacctcagcctcccaaagtgctgggattacacgcctgagccactgcacctgacccctaatttggtatttaattaatatatgttttgagtattttatggcagtaatttttataatggattgttttggcaaggcagtgaaggattttgtgtaatttcttaaattttttttttttgtttcaaatagttaatattatgtactcatcgttgaaaacttcccagagaatagagataagagaataaaatcacccagtttctcccctcccctctgtggcataaaaaatatgctacattttttgtaatattctcttccttcagtggatatgtttcataactcagactatatttttgatatagttgaaggtggtttccctctctgttaagcttcatgtgggtgaagagctgtgccttctccacaggacaccctgtacagcacattctttcccatttgccattgtctaagcaatatacttttttctctttgcttttcagattaattattcgaaatttctggagccatgaaactaggttaccttcaaataccttggaccggttgctggcactaaattccttatattctcctaaratagaagtgcactttttaagtttagcaacaaattttctgctcgaaatgaccagcatgagcccagattatccaaaccccatgttcgagcatcctctgtcagaatgcgaatttcaggtaatgtggtcttctctctcatagtagtgaatattataggcttttcctgttcatgaacatttttaatagctttgactggctctttgccttctcagaatacacattcctttctgaaaaggaaagggaaggctcgtgcctctgcttcagccacctggaggtccactggcctcaccctcttggcctccactagatttcccttgtcaggatcgccattgctttccctcccctcattcctcccaatccacagtggatgctgagcttgtcctgtctcgcagcagcctaaacagtgggatgatgggcaggttgcagggagctcctggggtagggcccctcctgtcccactcacaagctcaggatctgtcccagtggcacgtgtgtatgtggacaagctgggtcgcttgactcattgcatttgggttgtggtgctgagcatgatatcaaacctttttatgcaaacattaagaaagctgggttttctcactcgatagttaactagtttttctagttggcaaatcagttaaaacttttaaattagagaaggttcttcttcagctgcatatgaagttatggtacaaatatgctgatggtaccattagattttaaatagaaatatatcagtgttcctaaaaaaggagcattatttcatttgaaactttatttcatttgaaactttcttatgtacaggaatataccattgattctgattggcgtttccgaagtactgttctcactccgatgtttgtggagacccaggcctcccagggcactctccagacccgtacccaggaagggtccctctcagctcgctggccagtggcagggcagataagggccacccagcagcagcatgacttcacactgacacagactgcaggtaacagtgaccctgcccgctggccatgtatacagcaccctgacctctgtgggcagcttctgtcacaacagtgttgggcttttgtgagagaagtaagggataatagcaaaaagcgttaagaacccaaggaagatgtcattcaaaagagggggttcctataacagtcaaactcatggaaacagaaagtagagtgccaggtgccagggtctggggaggaggaatggggatttatagtttaatgggtacagaatttcagttttgcaagaggaaaagtgctgtggaggcagggtgcagtgactcattcctgttattccagctggggcaggaggatcagttgagcccaggagttccgcaccagcctgggcaacatggaaagactccatctctacaaaacaattttacaaattagctgggcatggtggcgcacgcctgtagttagtcccagctacgggggaagctgaggcggggaatggctcgagcccagaagttcaaggctgcagtgatctgtgatcacgccactgcaccctgccttgggcaaaagagcaaggccctgtctcaaaaaaaaaaaccaaaaagcaactctggacatggaagatgttgatggttgtacagcagcgtaaatgtccttaatgccattgaactgtgcacctaagaatgattgaaatggtaaattttatgtatattttccttttttttttttttttttttttttttttttgagacagagtcctgctctgtcaccaggctggagctggagtgagtggcacgatcttggctcactgcaacctctgcctcctgggttcaagcgattcctctgcctcagcctcctgagtagctggaactacaggcgcgcaccacctcgcctggctaaatttttgtattttagtagagatgggatttcaccacattggccagatggtctagatatcctgaccttgtgagccaccacgcccagcctgttttgctacaatttttctaaaaaagaaatggattatttctgaccagaaagatcagggaaagtttcagtatatgtatgttttggttttggtttggtacagaaaaacatagtgtagcaaatttaagacatcttatcaccaaagcagagtagaggtaaaccaaattcatttactagatttatagttattaaactgttctttctcagatggtttaactgcttcctttgatgagcaaagtacaaattgtagagtaacatatcttaatccttttatataaactctttaacgtttctcctttgtgtaatttttttgcacattttgttggttctggaagtgggactaatatgaataatcacaattgaaattctgtgacactaatattagaagtcagggggccgggcgctgtggctcacgcctgtaatcccagcactttgggcggccgaggcgggcggatcacgaggtcaggagatcgagaccatcctggctaacacggtgaaaccccgtctctactaaaaatacaaaaaattagccgggcgtggtagcgggcgcctgtagtcccagctactcgggaggctgaggcaggagaatggcgtgaacccgggaggcggagcttgcagtgagccgagatcgcgccactgcactccagcctgggccacagagcgagactccgtctcaaaaaaaaaaaaaaaaaaaaaagtcaggggttcttagcacctttcagtagataacaaagtgttattcctgtggtgggagcaagtggcgtgtttcttactttacaaatggggacactgcggtccaggggcactgaggcgcacgtacctggttttccttggggcataccctgggacctgacagagcctctgcccagggttggagttgagcacggaggcctagggtgccaccaggtgtgtcctggcaggtggtcctgccccgtgcacagagctgggtgatgctgagtgcctgacctctctgattgcatgtcacagatggaagaagctcatttgattggctgaccgggagcagcactgacccgctggtcgaccacaccagtccctcatctgactccttgctgtttgcccacaagaggagtgaaaggttacagagagcacccttgaagtcagtggggcctgattttgggaaaaaaaggctgggccttccaggggacgaggtggataacaaagtgaaaggtaagctgggttgctgagtgtgcttaaaatagcttccccactaaattactgcagagctcaggtctggggacatttctgactgtatccatgtttccttctcattcgtaatcaagccctttaaaattcagttaatgttgcctaggcactcaccatgctgaagaaattgttttctgggagttccagaagaatccttcagtaagttatactcgatccattgttgagtgatcttctggagcagtaagagtgggtgaggcatttataaaggggtgattgtaacaagaggtggaattagcaagcatggtctagggctagagggcttaatacaggtggagaatgaggagagcgtccaaaaagactgggtggaggaagagcatttgagaggagccttggagctgggggtgcaggaagggaaaggatgaaaaggacagggatggagaagtgtcagggtgggtaggctcagatcgattctgcagtccaggtgaagggacgcttcggggcatgctagagtaacggcaaagggtgctgtgaggacagtcttgtgggtgtgggggtgtatgtcgaacttcagctttaggaagcagccttgtaacgcaccgagcagaggaaggcacggggactgaatgcccttctctgaggtttgtgtggggcagaagtggagtgatggggactggaggcaggcaccaggacctggtcttggctaacagatgaccagaactagacgggtgccgagaggctggaagcagctttttgtgagaaagaagtgaggctctgggagggaacaagggcccagaggaaggacatgtgcagagaggaaagggcccatgacagaaccctgggggagcgccagcagggaagctcagctctgtggaagtaaacttagaagaacttagaagcaaagctccctgccttcttatctaatcgtaggaactgaaacacaggcaacaaaacttgctttactccaccactctctcatacttttcagtcacaaacctgtggcccacacacagttctctaaatggaacctggagaggtcagtgtggcccaccttttggcatgtgctgtgagttgaaggagtgctggtggcggttgttcaggtggagccacctgggtgctgagaatggggtcagcagcagggagctttctctgggatctgatggcttggtggtctggcgggagtgctgctgtggagctccatacgtggggcccctggactccctgctttgcagggctgcgggcgccaggcctggtgccatcctccttggggatgctttgtgagaacgtgggtcttttctctgtggatgctctcgggatcttctcttttaaaccagtgttctgacattgcgcacaagtgtccttgggcgtagatccgtttcagtctgtttttctgggcatatggcgggagcttccaggccgctgactctcaccttccagttctggagcatcatcacaggtgattttgttgagttcttcatctcagtttgctgttttctctttttggagtcctagtgcttagatatctcacctgcgtgagtgtccttctgaggtgtcatattttttccttttcctcttttctgggaaatcccttcaaccttatctttcaacctgtgcttttaagttatgacacgtttcagtttccatgagctttttttcatgctctgaacatttcttcagttcctactcttctctttctgataaatgatcatgttttgaaattttttcctgcatgatctgcttttaacagttgctctttccttgttgcttactttggcttgtgttgttcatatttgaagctttccttagaacctgtcgtgatttggaggttaaggctggtgtctcctggtggggtactaaacaggcatttggaatcatacgggttaggagtgttgcggtcacctgtccctggtcaggttgccacagtcccgagggaggctggtctgcaccaggtgttgaagcctccgaggcagctcctctctagttcagttagccagaggcaaagcactgccaggcgagttgggcgggggttcagaaggtggctgcgtgccctccctgggcctccctctggaggggcctggcccgttcagcgctcatgcctgctgaatccactgctgagcagttccagttgcagctgtggcccctgcactcctgctcccggtcgctgcctctgcggcacctgtaggttttgtctttgaggaaacccgaggtgaaaatgaaccagcagagccaagtgtctgggcggcggggagtaactgggcctgctttccctctccaggtgcggccggccggacggacctactacgactgcgcagacggtttatgagggaccaggagaagctcagtttgatgtatgccagaaaaggcgttgctgagcaaaaacgagagaaggtttgtatcttgtcaagaatttgatcagaacgatgcagtttctgtcacaggatacagacgaagtgaacaggcttcctgccagacactgcctccaatgtcacctgcaaaccaggttgcgggactgctccaaaccagcctcctggggctcccccacagggatgcagccctcatggcgctctggtgggggtccaggagtgcgcccagttctctccgcgggtggaagtgtggccggcctgggatcagccggctgatcccaggcctacctcaaggcccgcgccctggcaggacttcactggccctcgcttcagggaccaatgcggcgggagggcagctgggggctgggacccacggtgccccgaggacaggtggccaggagggccttcccgtggcgtggagactccgtagccgcggcgtccattccgcctagaaatgggtcattaggatgcatttgtaagaagggggtaggacggatcgttaagaaaaatccctcgcggtgctccagttcagcgccagccgccgccgccacaggagcggctccatccacatctgggtgtgaagccctggaagtggggcgctgtgccggccccctccccaagccctgccgcccagccatgcttgtggagcctgaggcctcccgggctgcgcccccggggcactgttttgccccctcggaggggagctttgggctctgcagctgcctgggagcagaggcagccggagggcaggaccttggggcggaagtggggaccggctgccggcctcgttctcagtgagactttccagagatgcagctctccagccggtttttaaatacttctaaatcaaattttccgattttataaatattctgattatagggaatgtttaaagcctttccactgcttgttgtgtagtgattttattttggatgcagtgtttgccctagacggtaaagtacggcgactgagcctctgcgagcatcagttcccaccacttcgccctcatggttcaggggatcctggcagcctcatagctcatgcacgactagtttccttcaatgagaatgctcatcttcttctttggttctggtgcttataggaaatcaagagtgagttaaaaatgaagcaggatgcccaggtcgttctgtacagaagctaccggcacggagaccttcctgacattcagatcaagcacagcagcctcatcaccccgttacaggccgtggcccaggtcagtttttgccgctgcgttttctgttgacaggttaaaatctgtttccagttcaggggtttgcctatgtgaggaaacatggctgaggctgtcctgcaacatagatgaggtgttggtttgtcctcaacggtggacttggtataaagaccttgctccaagtcctggctctgccatttcctagttccatgacttctttacacatgcggagactctgagatcatcagtgctgaagacgttatttatcgttatttatcaggattaccactgcatttgtctgaacaaagggagcataaatgaaggaatttgtacctagcactcaggaatcagtggattgtagacatggaaacctgtctaccacgtgttacataaaaacagcaggttaccaaacaggtgtaaaagtgtacacaccagtaaaagacacatgccagtgacttatctctttatggtataattatgggcgatacttattttcttttttcctaaaccacattttctgggtgctctattctgttccattggtctgtgtgtctgtttttgtaccagtaccatgctttttggttactgcagccttatagtattgtttgaagttgggtagtgcggtgcttctagttttgttctttttgcttaggattgctttggctatacgggctcttttttggttccatatgaattttagaatagttttttctagttctgtgataaatgatgttggtagtttgatagaattagcattgattctgtagattgccttgagcagaatggccattttaacgatattgatgcttctaatccgtgaatatggaatgtgtttccctttatttgtgtcattcttttatgatttctttcggcagtgttttttagttctccttgtaaagatctttcaccttcttggttaagtgtattcctaggtattttattctttctgtggctgttgtaaacgggattgtgcttttgatttagccatattttctaaaattttatatagtaatcactagaacttcttataacaagataaatatattacttaaaataaacaataaggaataaatcaaatttgtatgttttagtcatacatagcttttatcaaagtaattttttgcatttgatgattagatttattttttaaatattaagtataatcttaaatcagtagaatttcacagtaaacttttcaagtatttaatttttggctatagtaacttaagtgtaaaccattgcttttaatgttcttttcaacaatatgcaaaaatcacacttgatttaagaacattcatttaataatgtaatttgttcataaaacatcaaaaatggattatcattatattgtaaacataattaaaataggtcttagacatgaaaaaagaacatgatcccaaaaagcagcacaagtctcacctccttcagaggcaaacgtgtagcaaaattaacaaaaagatattaacagaattgacctgtcaattataatatgatagaaaacttattaacagggaagatccctagaagattacacaaagtaatttttaaactttatttatcatgctttcatgcctccatttagcaaaaatagacactatatgccaggaactgttgttggcgctgatgtcacagcatgaataaataaagggagtatactgtggccatgaagtgtgcgagggttagggctgtaaatgattaggtagtgtgctatttgcgggagctgatgctcagaagaagcctttgatggtttcaatagtttaaagtggtcaggtggtgggaccttgaaaattaacactggcattttatttaagctcatcagttattttaagctttaccatggtgctgataggagaaaaatacctaaacatttaatctttctctgagattttatgaagtgctgcactaagcactggctgcactttatctgggctaatcttccccgcagcccaatgtgatgtgttctggtagcccccatttaaagattggagacccagacttaactcaggagagaagctatgtcattatgtattgattaagccagcttttaaatgtatctctctgggccaaaagtccatgtttccataacatacatcaaacagatacatttggttaaattccaaatgctccccttgtcaatgcctgctaagtctttccaaatagaattgagaggtataatagatgtgtttgcaacagtttgtattttccaagctctgatagtattggtgatttatagcatttttgcttcagatcctaatttgtctttgttttgaattttttacagagggacccaataattgcaaaacagctctttagcagcttgttttctggaattttgaaagagatggataaatttaagacactgtctgaaaaaaacaacatcactcaaaagttgcttcaagacttcaatcgttttcttaataccaccttctctttctttccaccctttgtctcttgtattcaggtaaagtctgcacacacttcatcaaatatacattgtttgctgtggcttcacatggcctttccatcatcactatgtttcccgtgttgagactcttgataacctggtgtttaacagagtaagatgtactatttgggttaccacttcccaaatgagtagatgtaatttattttttccccccagaaaaaccgatatgtgacagaataaccagaaatcaaacatgttacgttttattttgtaataagccagtcccttcagtgtttttgatgaaacccttcatttatttagttgtctttccttatgtagtatttcaccaaattctttctgcttcctgactactgtcaaaagatgttgactgagtacccgcctggctttattctaggtggctgggccacattgatgaagaggcaaaaattcctttcctcccgaccttacattcccattaatagatgggtaataggcaacccacagggagatgtagaaagggacattaggtagtagttaagtgtcatagtacttgagtaatagggaagtgttaaagcagtgtaagatagtaatgaagcaggtaagcaggtgcctcttgatggggtagggtgtgtttgcctagatgcagtggtcagagaagtcctttccaaggcaacacagcctgagcagaaaatctaatttaatattcagttactacttaaatatgtttgtcagaagattatttttcatgtaagaaatgttttctgtgccattcaaagtatggattatataaaattccctagtagaaaatctttttgattcattttagtatttttgtatctagtgaccttttctgaagtaattactaatttatattcttcaatattgtttatcggtagtattggtttacaaacgaattggttaatacttttctgaaatgaaatacttagttttttgttttattctttttgatggaacgagaaactgtcagtataaatttctttatacattagctccgttttttattggtttctaatttacgtgtgtgtgtgtgtgtgtgtgtgtgtgtgtgtgtgtgtgtgtgtgtgatcttcatattttgataggtgcttttcttgctttaaattgatccctggaatggaagcgtaaaattaaaaggtcatttcctcctttgagcaaattgaatattgttggaaaatgtgttaatagcattacacagagaaacttctggtgatatcactacccacatgggtaccttttatgtttagtaaagtatgttactccttgtgaagacatggtccaagtaccacaagctaaacagctggttktatgtgtggtttcacaggacattagctgtcagcacgcagccctgctgagcctcgacccagcggctgttagcgctggttgcctggccagcctacagcagcccgtgggcatccgcctgctagaggaggctctgctcygcctgctgcctgctgagctgcctgccaagcgagtccgtgggaaggcccgcctccctcctgatgtcctcagatgggtggagcttgctaagtaagtgtgaggtcaggtgctcttgggagcacactggatttgaccaaagcaatacggaaaacacttggcttcatttggcagaaaatgagctaataaagttgatagtaacactaatgtgaaatttaaaagaaaagtctttcaggctgagtaccattctcaaaggcaagaacagttgccacaacaagtaatgtcttgctcaaggaaagagaacgttatttaaacctgctgatttctttcagtatatgattttttggactcagtattattcaccaagtttagtttcttgtaaagtgtagctgtgaatcatagttcctaatattttatgttatttcctgcttcactacactgaatggaggaagatttagtattttcagcaggactcaagattttagaaagagtttaaatcagttagtttatttgggataaacagattccattttctagttataccattttccattatgtctgattcttcccttctctgtgatctcatcatatgaaagcctaattctgaggaggttgttaggttaagattgaaatttaacttgaacttcattttgtagtgcagatttttagagctttaggttttaagagaaaagatagtaaaagtaagggaggggatccttgtgcttcgtgctgttttgtagttaattcatgtctgtcctgattgagcactgagtgtacaagtgctgtgccaggcaccaaagagacatgaaattggattagacattgatcacagactcacaaaactagcaatctagtaggaaatgtatgtactttacacataaataaatcataattgaagtaggaggtggtgagcactgagagagacaagataaaatgccagggccattcagagagggcctctgagctatgctgattttacctaggaaccgttttctcctgttgcttcagatgtgtaagtgaacaggaagtgacaccttgtatgtttactatttccaggagtggtaaacatacataatgtgtatttgctaagtaagtgaagcaaacaacttttaagggcctaaactttaaacatttttttctaactgtattaagtacattctcatacttttgtgatatttttgcattccttgcagagcattgtgaacatagtttagctttttttttttttttttttttttttttttgagacagtcttgctctgtcgccagttggagtgcagtggcacaatcttggctcactgcaacctccacctcccgggttcaagcgattctcctgcctcagcctcccaagtagctgggattacaggcacctgccaccacgcccagctaatttttgtatttttagtagagatggggtttcaccgtgttagccaggatccgcccgccccggcctcccaaagtgctgggattgcagccatgagccaccacacccggccttagccttttttttgatatgtcatggccattgttctaaccatgttatagtgaacataatccagggacaatggaaccagtataggggtatgtaggtgatctctttcctgagtctatgcagaatgtagctctccctcttccctgactctggggccatgagctgctgctccatcacctacctacccacccacctttactgctgatttattacccctaacattctgtaatcagggcaataagagagctgcatctactagattttattgaattcagaattcataagctctaggagagaacctgtagggctcttttgatgtaaatgcaagaggcttagtacccagaagggaactgaacagcaggagaactaaggagggagcagtccttggctggctggtttaggaagaaataacatttgggttgagactgcaagatggaaagaaatttcctggaggaagggaacaaaccccataaacactttgagaatatcatggactgggaagcttgattgaaagggtcaagccagaattttgttaaggtaaagagatgaatgaatgctccaacaaattgagatggtccatagaacatggattaaacatggcatcagtagtcaggattattttttcttttgcttctgggttttttggagctagacaaggattccaaatggttcgcctgtagatattataatggattaatactggagaaccttatgtaatgacacatcttatacactgtgaacctttgatattttcagattccaccttttttttttttttttttttttttttgaggcggagtcttgctgttgcccaggctggagtgcagtagggtgattggttcactgcaacctccacctcctgggttcaagcagttctctgcctcagcctcccaagtagctgggactacaggcatgcgccaccatgcccagctaattttttgtatttttagtagagacggggtttyaccatgttggccaggctgatctgaactcctgacctcaggtgagccgccacgcccgtcccagattccactttaaatgcacatctgaataatttctggcttatgtatgattaaagttataaaacctaagggcaacttcatagtttcttaaattttatatttttagcaaaattaaagtaacactttatgtctcttgttaatataatgtgtggcaacttgatttactatcatttcattagaataaatacttttaaaatactggagtgttcattgatttggcctttttgatttgttttgtaggctgtatagatcaattggagaatacgacgtcctccgtgggatttttaccagtgagataggaacaaagcaaatcactcagagtgcattattagcagaagccagaagtgattattctgaagctgctaagcagtatgatgaggtaaaattgatctctggcaaaatatgacatttacttcaacacttttgttttctgctgaactatgactttaagcaaaacgaggtacagcagatccttgttggttcaatgtcttttcgttacaatgttgatgaggaagaaaattggtttccttataggttgttcacttaagttagggcctaccatactatgaaactgtatattatttctctgctcttacacagtttctgtttgaataggttgttttctttcagttagttaaaaaaaaaaattataaagaaattgtattaggctgttcttgcatttctgtagagaaatacctgacactgggcaatttataaagaaaagaggtttaattggttcacggttccacgggctgcacaggaagtatggtgctgccttctgcttggcttcaggggaggccttgggaagcttttatgcattggtagaaggcgaagcaggagtaggcatttcacatggtgaaaggcagtagcaaaagagagacagttggggagggggtgccatatacttttatttatttagaggcagagtctcattctgtcacccaggctggagtgcagtggcactatcatggctcccaggctccggcggtcctcccacctcagccacctgagtagctgggacttcaggcatgcaccaacatgcctggctaatttttgaaatttttttgtagagatgaggtgtcactatgttgcccaggctggttgggaactcctgagctcaagccatcatgcctgggcctcccaaagtgctaggatcactcatcaccaagggaatggcccacttcattcatgagggatctgccccccattgatccaaacacctctcaccaggccccacctctgacattgaggattacatttcaacatgaggtttaggtggggacacatattcaaattacatcagaggtaaagaagaatttgggaagatgaatataagttcagttttgtacattccgtcagtggctattcaagtgtaggtgttgaaattcagggtctgtgacctgtgagactcttcaatgagcagtccaggttttgtttgtttgtttgtttttgagagtctcactctgtcgcccacgctggagtgcagtggcgcaatctgggctcactgcaagctctgccttccgggttcacgccattctcctgcctcagcctcccgagtagctgggactacaggtgcccgccaccacgcccggctaatttttgtattttagtagagatggggtttcaccgtgttagccaggatggtctcgatctcctgaccttgtgatccgcccgcctcggcctcccaaagtgctgggattacaggcttgagccaccgctcccagccgagcagcccaggttttaaaatcctctgcaattttctacaaatgtcctgtattctaattttattctaagaacttgttacgtggtaaataacccccagtagagatgtaaatcaagttattgtgattgaaagtcttcagtcttagtaattggtttcattggtaagtttctcagagaaatggcttcctcctagttaggatttttgtggcttttttttttttttctctcttaaaacagggtcacccaggctgcagtgcagtgacacaatctcagcttactgcagcctcaacctcctgggcccaagtgatcttctcacctcagcctcccaagtagctgggactgcaggtgcttgccatcgtacctagctagtttttgtgttttttgtagagagtttttgcgttttttgtaggccatgttgcctaggctagtctcaaactcctgggctcaggtgatccatgtgcgttagcctcccacagtggtgggatcacaggcgtgagccagcgtgcccagctgggtttttctattcatttagtactgtaggattccttttggtttttcttccattcagtgttactctgaatagcttctcttttctctctcctttccgtaaatctgaaaaggattgtttttagtgtgattgttacattcctcctttttacgtgttctcattggtattctttccaactttgtaaaataattttattaacttttctccactaggctctcaataaacaagactgggtagatggtgagcccacagaagccgagaaggatttttgggaacttgcatcccttgactgttacaaccaccttgctgagtggaaatcacttgaatactgttctacagccagtatagacagtgagaaccccccagacctaaataaaatctggagtgaaccattttatcaggtgggtaaaattattttaagtgattgaaataattattttagataggtgttttctacttaacaaaattgtttaaaacatttcaaaaacaggtagtacttgtgaagcactagggaattgcatgacctgagtccacctacaaaccccatagtattgttaaatctcttatcacttttagctaatcatcttttcaaagtgaatgcaatgcattttaaaataaatattaacattcctagtatgactacataggagcatatttcctgttgtctcttatattacaagaagtcgccccggatcactggctaaacacaggcctcccagctcctgtgacaagaggctctccgcttttctccacaccatacctatcctgactgtgcttgtaaattcctcagtttgtacgtaacatccaaatcatcttccagccaaaagtagttcccattttttgtagaacgtgttcctatatattttgtggttacaaaacaagctattttagatgaatttgttttaaaaattggaggtttactgtttcagacatcaaacatcatcgctttgactttaaatcttgacctgtgaaagtatagcaaagaatataatagaaataaaataattagacatactcaaattggccttctgtagttacaagtatatttttatgttccttaggaaacatatctaccttacatgatccgcagcaagctgaagctgctgctccagggagaggctgaccagtccctgctgacatttattgacaaagctatgcacggggagctccagaaggcgattctagagcttcattacagtcaagagctgagtctgctttacctcctgcaagatgatgttgacagagccaaatattacattcaaaatggcattcagagttttatgcaggtaatactatatattatatatatatgcttgtatatatatagtgtatatatatattataatgtggatctatctgaaatatactatttttaggatatttttaaaactcagtaaactcatgaaaaaaatcaacaaaaattttcaagtactattttcataccacctatttccttctttctgttcttccaataatgctgttcattctgtcctttatcttaatgcctttttaaatcttttttttctattttagaaaggtttcattttttttcctttttgttacctttctcatactcttaaagaacacttgagagtagggtgtttttttgtttgtttgtttgttttttgagaccaagtttctcttttgtcgcctagacagtggagtgcaatggcgcaatctggttcaagtgattctcctgcctcagcctcccgggtagctgggattacaggccctcggctaattttagtatttttagtagagacgaggtttaaccatgttggccaggctggtcttgaactcctgacgtcaggtgattcacctgcctcagtctcccaaagtgctgggattacagacgtgagccaacgctcctgaccaagagtagacttttctatttggggtagcggaatggaagtttggttgctttgtagagaagagcaggggttgatctttcctgattgtttgctgccactctttctttcctttttgcttttctgcgaatcttttcctgacagttgtttgtttgtaagtgaatgtcttgtataaagtttattaataacatttagtataggttagtgacatttagcatagaagcatattcattcattgttttcatttttatttaatgtgttgaagttgattagcactcttgaggaagtttatcaaaaaaagaattggcttctgtagtcagcagttttacattataggatgttaggattgttaaaacttggtggcaagtcgaggcagtgatagcctggtgatgtcagttttattgatttcattgagccaaaatgttattgaaaccttaaatttttttttaaaatttaaactatttgttaactgtctgtgatctaattattaaccattctgaggcatatttatagaataattgctacatttcataatttagagtactgttaaaaacttaaagtcacagcttgattgatttataacatggcatttgtaaatgccctttttttttttttttttttttaagaattattctagtattgatgtcctcttacaccaaagtagactcaccaaattgcagtctgtacaggctttaacagaaattcaggagttcatcagctttataagcaaacaaggtaatttttttcatcggtctttttttttcatttctaattgtggaagagttttagcatctaaattattttctgcttagtgaaagtgcatgtttcttaatgtatgggttggaaactccatcgaatttcctctacaaatacctattttcagatcattgaaataaatgtttaaaatggtcaggcagagttctaggcatcagggctgcaaagtgaaagaaaacatgttgcttaccttaatgaagcttttggagtagcggggtgactccagaggatacctgcccacaaggatggtggggcccaccctggcctgagagggtgcaggactcctggaggagggtcctgagcagtggggaagaggcaggggcttgcagacggaaagctgtggtgcccctgaggtgcacgctgagggctctgggtgccctggcttgaagggagggcaggaaggctgcgggcagcagggcccacatcaggaaggcctttgtatcgctgatgagtgggttttatcccagtgcctatgggaggccacccaagagtctaaggggaagagtacatctttgcaaaggtaaaatgttttgtttgttaatctgaatttcatttttgtcctaaataattaaaattaattacaaaagatgctttcagaatactgataaaaactgatatttatgtctacctagttattttctattttaattttggaaaattatttttcaagtacatattaatcatattaatgacgtatcatttattaagtgcattctactttcaggagctatgttaatctctttatcaatattacctagtcttttttttttttttttttttttttgagacggagtctcactctgtttcgcaggctggagtgcagtggcgggatctcggctcactgcaagctctgcctcccgggttcatgccattctcctgcctcagcctcccaagtagctgggactataggctcccgccaccatgcctggctaattttttgtatttttagtagagatggggtttcaccatgttagccaggatggtctcgatctcctgacctcgtgatccgcccgcctcggcctcccaaagtgctggggtacaggcatgagccaccgtgcctggccaatattacctagtctttataacaactttatgagatggatttttttctcctcattttttagaggcttatagagattgaatgacttgcctaagctaataagtgaaagattttaattttgaacccaggactgtctcatctaatcttgtgttcctgactgctgttttcccccaacagaaagaaaaacacattaacaatgtgaattttcagttttgtgaagattattatgaatctctttgctgagacctttgaggccagaatgttttggacactagaaatattacctgtgtacatgccaggggctagggcagtattctgtaactctacagcttaagttatgaatattcacattgatgccataaacaaagactaagtagccctataccaatgaagatcagattttttttgccaagaaaatttgcttcaaccccatgaaaatctttttagttatcagtgctttttagattttgatattacagatggactgtagacctgtaataaatgtaaaaagaatttgtgcatgtttatttctccatctttattctctgtccttaagcaattgagtttaaatgtcagaatatattaaatttagtatggtaactttgtgttccttttgtaaaagaaaggacttttttgtaatttgggcaggaagtttgaattttctatttactgataatgacctttgtcatttgatcttataattgagctgtgtgtatagtcaccctctaatactatttttaggcaatttatcatctcaagttccccttaagagacttctgaacacctggacaaacagatatccagatgctaaaatggacccaatgaacatctgggatgacatcatcacaaatcggtaagacgtggtccctttcagtcaaatgtggattgttttttgaaattgttggaatggtttttcttccaaaccatggtttagagaaatgtgggatttgagcctagcacagctgttttccatccttcctgtttcccatgtaagtagttccgatagagctctccgtgtctgcagtgtcctctttcccgcttgccctgtggggacgctgctgtcgggaggtgctggtggctgatcctgaacctgcacctccaggaagggagacagggtcagtgtgcatttgcttctctcacaacggaatgttaagtagttagatgacaacaaagaagacgactacataatgatttttattatcctattttttataactaggatttttgacattcttgcctcctacctcccaactccattacacagtcatgtgtcactttcccaggtctcaggtcatgttcatgtcctcatcttctccatcctgtaactaacctgtggaatccatagggcaggtactaaccatgtaataaaatcagagaggtttatggcacacaaatgtgtgtaggaaataggacttaaggactctgaccccaagtgtcatggtctcccattatttcctccactactactttttttttttttttaaactttttattttgagatgagttcttgtggaaaagttgcaagaaaagtagtactctcctgggttctttaacccagattcactgattttttaaataacattttaaacatttttccatgttagtatttgtatttttttcttttctaccagaccctacatattatttattttctgaaccggttgtgagcgtaagctggatacatacctttgcctcgttatagatcagtgttcatttcttaagaaaaagaatttttctttatgtaactactgttcagtgatgaaccttggtgctttcatttttcctctacagcccaatttcagttttgttaattgtcccagtaatgtcctttgtggcattttctctacctctacaacaagatcagtacagaatgatggactctatttatctgatgtgtctttttagtcccctgaaaggctttgtgtgtcctaatactgccacttttgaggaatgttcctctgtttgggtttgtcttacgtttcctcatggtgggactcaggtgatctgtctctggccagaatacttctcaggctagcaaatcacacgtggggcacagtgtccatctgccttttactggtgataatttttttttttttgatgcagtctttttgcccaggctggagtgcggtggcacaatctcagctcactgcaacctccgcctcccaggttcaagcgattctcctgcctcaaccccccaagtagctgggattacaggcacgcactaccatgcccggctaaattttgtatttttagtagagatggggtttcaccatgttggccaagctggtcttgaactcctgacctcaagtgatcctcaagtgagccttggcctcccaaagtaatgggattacaggcattacttaccatgcccagcctggtgataataattttgattgtttggtctctccactgtataatgccatttttttgcttttcttttgcaactaacaaataaatgtaggagctgctttgagacatacaaatgtcctgcttctcctaagacttatccctctgtatttcacatttgtggatgactcctggcccaaaccagtgttgacaataatggttgcaaaattataatttccaactctaccattcatttatattagtctacatcttattgtaagcaggcacccttccttctgtttacttacttatttactttttaaagattatcaataaagactcagggattcaaattttatttagtgggatataacctatactgtccttatttattttgtgttcaattatctcagatttggccaacaggctcccctttaagctaacaaatcaggctcatcttacctgtcttctactgttttcttttagaaatgttatggttttaggtcttacattgaggtctctgatgcactggaagaaaatttttgtaaatggcgtgaggtaggggtaggtgtttactttttccatatagatatctatctagccgcatttgttcaaaagtctttcataattgagtcaccttggcaatttttttgaaactcaattgaccacatatgtgtgggtctatttctggatgctctattgtagcccttgctttgtgtttttttcacaatagcaaactgccttcatttatatcactttatagtacgttttgaagtcagacaggatgagttctcgaacttttcttttttttgagacagggtcttactctgtcacccgataatggctcattgcagtctcagcctcccaggtttaagcagtcctcccacttcagcctctcaagtagctgggaccacaggcgtgcgccaccatgcctggctaatttttttgtctttttttgtggagacagggtttcactatgttgcccaggatggtatgtaactcctgggctcaagcaacacgcccacctcagcctcccagtgtgctgggattacaggcatgaaccatggcacctggctcaactttctttatgaaaactactttattttagttgatctgcatttctatttacattttagaatctgcttgtcaatttgtataaagaaaaactgctgagattttgattgggactgtattgactatagtttaatttggggagttgctatcttaacaatatagagttatcgagttcattaatatggcatatctctgttaatttagatatctttaatttcagtgatttgtattttttcagtatggagatcttggatgtcttttgtgatttattcctaagtattttatgttttttggcactgttatagatggatttatttttaaaattgtattattttccaattatttgctgctaatgtaattgctttttatatattaactttgtatctttgctaacatggtagttttagttcttgttttgcaggttctctgggattttctatcatatcatctgccgatagagccacctttctttctttctgaactttatgccatttatttcattttcctgctttgttaaaaccatgaggacctcaagtacaatcttgaatatacgtgctaaaatgagcatcttagttttattcctgatgttagagaagatagttcactcactcagctttaaaaaataatttttttgtaaatgccttttatcagattgaggaaattcccttctattccaggttttctgagagttttgttttatcatgaatgaatgtcgaattttatcaaacactttttctgcaacagcttaatcatattgtttttctcctttattgtgtttatgaagtattagctttgatgctttttaaatatgaagccaatcttgcattcttagggtaaacccaatacggtcatgatgatcccttaaggattttagcatctacatccaagtgggatattggtgtgtaattttcttttttgtaatatcttcatcaggttttggtattagggttatcatggcctcataagatgagtaaggcatgttcccttctctattttaaaaaaagtttatggccaggcgtggtggcttatgcctctaattccagcactttgggaggccaaggtgggcggatcacctgaggtcaggagttcaagaccagcctgacaaacatggacaaaacctgtctctactaaaaatataaaattagccgagcatggtggcacatgcctgtaatcctagctactcggaggctgaggcaggagaatcgcttgaacccgggaggcagaggttgcggtgaggcaagatcgtaccattgcactccagcctgggcaacaagagcaaaactccgtctccaaaggaaaaaaaaaaattatataagatcctcattatttcatacttgaatatttgataggatttaccagtgaaacctatcctatttgggcatgggttttcccttggggaagatttttgataatgtatataatttccttagtcaatactgatagagaatttaaactttctatttctggctgggcatggtggcttacacctgtaatcccagcactttaggaggccgaggtgggtggatcatttgaggtcaggagttggagaccagcctggccaatatggtgaagccctgcctctactaaaaatacaaaaattagctgaatgtggtggtgggcacctgtagtcccagctactcaggaggctgaggtaggagaatcacttgaacccaggaggtggaggttgcagtgagcagagatcgtgccattgcattccagcctgggagacagagcaagattctgtctcaaaataaataaataaataaataaataaataaataaataaatataaaattctatttttgtgtcatttttgttaaattgtatttttcaatcactttgtccattttctttttaaatttctgccttctttatttgttttttaaagtaaatttgtccatttcatcaaagtcatcaaattattggtataatgttcacattattctcatcctttttattatttgtagtgtctgtggagggaaccccctttttcattccagatattggttatttgtgttctcttttttaacacttgattcatctgggtaaaggtttgtgtcagttttgctttttcaaaggatcagttttttactttgttaattttctttattatttgtctgttttctatttaattgatttctagtatcgtctttactatttttttcttttcctcttaccttatatttgcttttctttttctagtttctttaggtggaaactgttgattttataccttttcttcctcctaatataagcatttaaagttatttgtgtccctgtaaagtactgctttagctgcattctgcacattttggtatgtcattcagttcaacgtatttttctaactctcatgtgacttgatccattaaatatttaagtgttttaatttccaaatacctgggttttctggctatcttagtgatttctaaattccactgtggtcagaaaacaccctctgtatgattttgatccttttaaattttattgagacttcttttatgtgccaacatatggtctattttagtaaatacctatgtaaacttgaaaatttttgtatattctgcagttcctgggtatcaggttttataaatttcaatgagatcaaggtagtcagggatacttttcagatcttccatgtctttactgcttgtttgtgtagttccatcactgctgagaaaaggatgtcaaaatctcctatgattgtagaattgtctgtttctgcctttacttctgtgtatttttacgtactgtattttgattctgttattaggtacatacatatggataactgctgtcttcctaatgaaattatttttattatacattaagttctgggatacatgtgcagaatgtgcaggtttgttacataggtatacacatgccacggtggaaatactttttttttgtgatggaattttgctctagttgcccaggctggagtgcagtggcatgatcttggctcactgcaacctgcatcacccaggttcaagccattctcctgcctcagcctcccgagtagccgggtttacaggcatgtgccaccacgcccagctaattttgtattttttagtagagacagggtttcgccatgttggtcaggctggtctcgaactcctgaccttaggtgatccacccacctcagccttccaaagtgctgggattacaggcgtgaaccaccatgccctgccaaaatactccttttatcattatgaagtaatgatatgttgatgtgtgtgtggatggatttcatgtgtgtttatctgtgaagtaacatataatgaaaacaccactagataacactgtactttcaacagtcatacatattctaaagaacatatgtggttttcctcacatattctttagaacataagtatgtgttctttattatacttaccacactgtactcatcatttattcctaagacccaagtttttctcttgtgtcattttcctttagcctaaaaatcttcgtttagcagttcttgtaatgcaggtctacttgtgatgaactcttgttagttttttccttctctgaagatatctttatttctctgtcattcctgaaggacactttctcagaatgtataatctgggtagattctccctgccccttgtagtatcttttggctgctgtgtctctgaagataatgtcctcgttattcccatcgttgtggcccacatgtaatgtgtcatatttttctggctgcattcaagattttttttctttatcattggttatcagcagtttgattatgatgtgtctaggcctggttctctttgaatttatcccatctgaagttcacttaccttcttgaatctgtacctttttgtcaccagatttggggagttttcagtcattgtgtttcttcaaatgctttttgtccaaatttctcttggtctctttgtgggaatgcagttacacatacatcgtgccttttgacattgttccataggtccctgactctgttcatttttattgtctttttttgttgtttattcatcagattagatcatttctattgatttgtcttcaatcttactgttattttcttttgtcttacttgttcttctagtaagtctgtctagtgactgttttatcttaggtattgtattttccagttgtaaactttccatttggtttattaaaaaatattttctctttttctactgagatgcgcaccttttcatttattgcatgtgtgtttttcttgacctcctggagcatagttaacatagctgctttaaggtccttgtatgatcattccagcatatgggtcagcatagagttggcatctgttttctgttgagatggatacattctcctgattctttttatcagttaatttttgaatgtaacttgtgaatatagtagtcgcttcttatctgtaggagttcaaagatccccagtggaatcctgaaaccatggataataccaaaccttatgtatactgtttttacctatacatacacacatatgataaagcttaatttgtaaatttgtactcttaggcagtaagagtaacagcaataacaataataaagtagaataattcaaacagtatactataataaacgttatgtgagtgtggtctgtctctctcaaaatatcttattgcactatatctccagtaactgaagccagggaaagcaaaactgcaggtaagataagggggactactggattctcttgtgtagatgctggcttataattctgtagctggtgatctgtttagatagtaggctctgtctttccttttgttggttgaaacctcagttcctgtccaaacctgtgctgttttgagtctgtctgcacatgcacacttcagggcagcctgagcctggtgggttcatgtgcagaactagaggatttttctctggttctctcccctccaggattctccctgtagcccctgtctgcctggactccttttcctgttcccctgggtagaatgcagcaggcttgtcttaaggatctcagtcacattgccaccacactccacaggggcaaaagagagtaagacagagaggaaacaggaagctcatcccaatagcagaccttcccagttttgatttccctgcgcatacatacagtctgccatcttttattcactcagagttcttggggagttgtattttatccagtttctagttgttgtcagcagaggataggccacaaggggctcacagtgccataccggatccagactcttgtttttagaaaagatggttctcttcttggtttattctccctgatttgatgtgagaacatgtcacgcagtgtaactcttctctgcctttgtttaatttgttccctctgtctgggactcccttgtcaactccactcctaaaattgcatgcacccttcacagcccaaggaagtctgtctcattctgtggacgttcccacctccctttcctgagatcccaggcactttattcacactggtaggagacatttatggatccagtcattcattatttattgaaatgttaatccagtacccacttgtatttatttttatgattaaaaacagtgaaagcttaaaatcagtggtagctttagggaatgagccagcactgtggttggtgtggggatgaggagcccagagcagtgtggtgagaacaggaaatggccagcaagggttgtatcttgggagtaacaaaaaaagaggaaaaaggaaaaagagatgtgaagcatgatggtttatcttcctgcagtgtttccttctcccctcccctccccctccctcccataccctcccttcccctctactcccctgcactcccctcccctctcctttcctctccttttttcctctttttcctttccttttcttctttcctttctttctttccttccacgcacagggtcttgctgtgccacccaggctggagtgcagtggtgcagtcatagctcactgcagcctcaaattcctgagctcaggcgatcttcctgagtagctgggaatacaggctcacgccaccatgcccagctaatttttacattttttgtcgagatgaggtatcactatgttgcccagggtgttctcgaactccctggccatactgtttctaagaaattggaaatgagttcctggaaaaacaacagaaatttacttgatggttgatcagggatgagctttgtatattagggccctttgtcagtgttactaatattaatagaaataaaattacttggacagaatcatacatgtaaattatgattcaaataaaaagaattttgaagttgggcatggtggcacacgcctattgtttcagcttcttgggaggctgaggcaggaggattgcttgagcccaggaattcaaggctgtagtgtgctatgattacatctgtgaataactactgcactacaggctgggcaatatagtgaggcctgtctctaaaataataataatttaatagcaacctagacttctcttttaaattttcatggctgggcatggtggctcatatctgtaatcccagcctttagaaggattccttgagcccaggagctcgagaccagcctggcaacatagcaagcctccgtttctacaaaaaagtgtaaaacttagcttgatgcggtagcacgcacctgtaaccaaccccggctatttgggaggctgagggaagaggattgtgtgagcttaggaggtcgaggctgcagtgagctgtgattgcaccactacactccaacatgggcaacagagcaagaccctgtctcaaaaaaataaaaaagaaaattttcagtgattttaaactgtttactgttatgtatttatcaccttaagttgggacatataaggagcaaaatggctcaacacagggtatgttacccattcatcaaaagataaaatttaggccagacatgatagctcactcctgtaatcccagcactttgggagcccaaggcaggtgacccaaggatcacctgagggtcaggagttcaagaccagcctggccaacatggtgaaaccccgtctctactaaaaatacaaaaattatctgggtgtggtagtgcacgcctgtagtcccagctactcaggaggctgaggcaggagaatcgcttgaacccagaaggtggaggttgcagtaagtcgagatcgtgccactgcactccatcctgggcgacagaatgagactccatctcaaaaaaaaaataagtaggccgggtgcggtggctcacgcctgtaatcctagcactttgggaggccaaggtggccagataacgagatcaggagatcgagaccatcctggctaacacagtgaaaccccgtctctactaaaaatacaaaaaattagccgggtgtagtggcaggcgcctgtagtcccagctactcaggaggctgaggcaggagaatgacgtgaacccgggaggcagagcatgccgtgagcctagatggtgccactgcactccagcctgggcaacagagtgagactccatctcaaaaaaaaaagaacaaacatttactaaggtttagaatttctgcctgtaattgctatccagcagcttcctattcctgagtctgtgacattgtctcatttttctttgtgtagatgtttctttctcagcaaaatagaggagaagcttacccctcttccagaagataatagtatgaatgtggatcaagatggagaccccagtgacaggatggaagtgcaagagcaggaagaagatatcagctccctgatcaggagttgcaagttttccatgaaaatgaagatgatagacagtgcccggaagcaggtgggtactcgtgtctgtcctccctgctgtgtcacaggattttgctaaattagcttttctctaattttagcttttctttagagtctgaaccttaaaataattggtaggtgttattttttttctctctttataagtaaacttggccgggtgcagtggctcacacctgtaatctcagcattttgagaggccaaggcaggcggatcacttgagcccagaaattagagaccagcttgggcaacagaatgagagcctgtctcagagaaaaaggaaacttgaaggagcacttattcaaaactctccagaaagcctctagagtttattatattcctgttaatcatttcaaaatgattgttagctgttacttgaaaagcagataaacctaatgtcaagtttgatcgttaacaaaatgaatccttaccagttagttacaaattatttttaggtttactttgtaggaattatcatttaatactaggaccccttcttgatattaagtatacattgcttaaaaattgcatgtaatctatttaaatgtatataatctttaaacatactacagaagcttgctatgttaatgaccctctatcaattgctattgcaaggcaaaggatgatattctagtagaaataatacttcttttttgtagctttaaatgctcatttatagatttttctttggatgagtgtaatatcaagtaagaatttttatattgcaaataacagaaaatccaattagaggcaggcagagcaggaactggatgagagaaaagcagggtgtggccagaaggggcgatctgaactgaaggacttagtggtgagggagttggggtcatggggagaggacccagtgtagttaggaaactgtctggcatgatgaggggaaagacatgttccctgccattgttactgtctagtaagagtgggggctgcacacatgatgacaacagcactggtgggcaaagaagagagatgtcagcaaagcctggagggcgcagggaagagaagagcttctgccttggacagggaggtgtctggggaagggggatgtgatttagggtaggctttatgggcatggaaggatttggacatgggatggcactgggtttgcagagggcgggagactgcatccttaccgggatcaggaggccattgaaggttccatgcatgctggctagttgtaagctgtgtgggagattgacagctctggggaaagcaaaggcagagaaagaccaggaagctccacactaggggagtggggtgggagtgagcagggcaagagaggtgctctgtaaggagatccaggagaacctgaggtgacaggagtgatgagagtgtctggctagaaacaactcggatttctagcctgggcggttgaaatggcagtaattaggaagaccaaagtctgatgaaaatgtcttttgaagcttgagagagaattagaggtgtagatttaaaaagacatccatataagcaactaaataaaaaatgggtcaattgtattcagaattaaaactgtcgtgccttacctgagaagctgaagaatgtataaagacaactcatgtaatgggagaaactatttcctgatcacatatctgataagggtctagtatccagaattcataaagaatgcttcacaactgaacaacaaagagtcaaacaacccaattaagaaatgggcatgaagtgtttgaatagacatttatccaaagaagataggcaaatggccaaccagctcatgcaaagatgctcagtatccctaggcttgagggaaatgcaaatcaaatccacaaggagagaccgcttcacacccactgggatggctggaagcaaatacacagataacaaagcttggagaagatgggggaaactggaacccttctgcactgctggtgggaatgtaaaatggtgcatctgctgtggaaaacagtctggcatttcctcaaaaagttaaacgtagaggctagtccaagtgcagtggtttttgcaactaattgatcacaaacatttaagatttctttgttgattctccacttctgatgcttcacttgactatacttaaaaaaaaaaaaatgttgaggccgggcgcgatggctcacgcttgtaatcccagcactttgggaggccgagacaggtggatcacctgaggtcaggggttcgagaccagcctgaccaacacggtgaaaccccgtctctactaaaaatacaaaaattagccggatgtggtggcacatgcctgtaatcccagctactcgggaggctgaggcaggagaatcgcttgaacctgggaggtggaggttgcagagagccaagattgtgccactgtgctccagcctggtgacaagagcaaaactttgcctcaaaaacaaaacaaaacaaaacagttgaacagaggtaccatatgacccgacaattccactcccagacccatgagaaacaaaagcttaagctcacatggaaattcatacacaaatgttcacaggagcattattcaaaatagctggaaaggtggaaacaacccaaataagatgtggcatgtccagccgggtgcagtggctcaggcctgtaattccagcactttgagaggccaaggcgggtggatcacttgacgtcaggagtttgagatcagtctggccaacatggcgaaactccatctctactaaaaatacaaaaattagccagatgtggtagcacacacttgtaatcccaggtacttgggagactgaggcaggagaattgtttgaacccaggaggcacaggttgcagtgagccgagattgtgccattgcactccagcctgggcaataagagtgaaactccatctcaaaaaaaaaaaaaaaaaaaagtggcatgtccgtgcaatggagtattattcagccataaggaggaaagaagtgctgacaggtgctgcaacatgcatgaacctagaaaacatcatgctaagtaaaagatgcgagacacaaaatcaccacttattttytgataccattgttacagaatgtctggtgtaggcaaatccatagagacaggaagggaatttattgttgccaatggctgggtagtgactytgaacagacagtgaatttytttttggggtagtgaaaatgttctggaattaggggtggtggttgtacagctttgtaaatatactaaaaaatactgaattgtacccaccctgccacaccccctggaattttttttttttttttggagacttgctctgttgcccaggctggagtacacagcagctcactgcagcctcaacctcccaggttcaagtgatcctactaccttagtgtccagagtagctgggactataggcacgtgccatggtgctggctaattttttaaattttttagagacggggtcttaccatgttgcctagtctggtttcaaattcctagactcaggtaatcctccctctttggccttccaaaatgctgggattacaggcctgagccactaaacctggcctgaattgtactctttaaatatgaattatatcccagtgataaatttagagacataattgaagctaaagaaatggattcgctactctaaggtggattgtgtcgtgcaaagggggaagcaggccaattagaaacttctgtcacttgtgtatcatcataccaccttctctctttttattgtattcatacagaacaatttctcacttgctatgaaactactgaaggagctgcataaagagtcaaaaaccagagacgattggctggtgagctgggtgcagagctactgccgcctgagccactgccggagccggtcccagggctgctctgagcaggtgctcactgtgctgaaaacagtctctttgttgggtaagttgaccgcttttatccacttatatcttaaagggctgtgttatattgtcttgtgtatcttcctcttctttgtgctgcatcatctgacatttgggaggtaaatctttgcagtaatttcagggaatatagcaaagtgagccagagaatgatagtttaattattttgaaaactttgtgtttgcatataagatgtaaacaaacatgaaaagccatttcagcctgggcgcagtggctcacgcctgtaatccgagcaatttgggcgaccgaggtgggtggatcacgaggtcaggagatcgagaacatcctggccaacgtgatgaaaccccatctctactaaaaatacaaaaactaggctgggcatggtggctcacgcctgtaatcccagcactttgggaggctgaggcaggcagatcatgaggtcaggagatcgagaccatcctggctaacacagtgaaaccccgtctccactgaaaatacaaaaaaattaaccaggcatggtggtgggcgcctgtagtcccagctactcgggaggctgaggcaggagaatggtgtgaacccgggaggtagagcttgcagtgaactgagatcacgccactgcactccaccctggacgacagagaaagactccatctcaaaaagaaaaaaaaaaattacaaaaactagccgggcgtggtggcaggcgcctgtcttcgaagctgctctggaggctgaggcaggagaatgaacctgggaggcggaggttgcagcgagccaaaatcgcgccactgcactccagcctggatgacaacagcaaaactccgtctctcaaaaaaaaaaaaaaaaaagccatttcctcccaaaatagtttagtctttaagactacattaaaggaagaaagctttcttgtacaggtttgggtttggtcccccgctctgttgccctgtgtctgagggtgtgtgctagcattctgatcaggcatgatccagctggttcccagaccagctcttaagcatcagcctcaataaaggtgtctagaggagaagcactctttgtacactgatcccaagagcagaagatcatcctagttggatgtggtggcacgcacccatagtcccagctactggggagtctgaggygggaggatggcttgagatcaggagttcgaggctgcagtgagccatgattgtgcctgtgtgagtagccactgtattctggcctgggcagtgtagtgagaccctgtttctaaaaaaagaagaagaagaagaaaattatccttatgattgctaaataattatatgggcttttttgaggggaagaggaggagtttgctgatgttaatattagtatccatatacccatataataataattacacagagtatggttgtrgttcrtaacagccttgcatgataagcagggccagtagttgtgatcctgtatgtgagataactttggcagagaactgtcacatcatgggcaaggagggcatgtggttgatcaggcctcctagtttcaacactgttatcgcacctctggacactgcagacttagccagcgctggttcagttacttgcccagaaccacacagtcaaagcagaactagaactttaaatgtagcagtgcctgttgcttcattagctatgggccacagtgccaatttaaagatctactctggattattaatatatgtacaaacacattagtacccatttcctattttttataacagaattaggtgctttgaaaaattgcagaatgatgatgcttgaataaaaagttaattcataaagtttcaattgcttagcctctgtgggctttgatacagttacttctaacaaagaacatttttcattaatatgtgagttcaagaaattccctagtcagtatttgaagtcagtttcttatactttcaacatttatttttattaatttcttaatagaaaacaacttttaggccaagcatgttggctcacacttgtaatctcagtgctttgggaggccaaggtgggcagattgctagagctcaggagttcgagaccagcgtgggcaacatggcgaaaccccatctctaccaaaaatacaaaaaatagccgggcatggtggtgcaagcctgtagtcccagctaattgggaggttgaggtgggaggatcgcttgagcctggtaggcaggggttgcagtgagccaaaatcgtgtcgttgcactccagcctgggtaacagagcgagaccctatcccaaaaacaaaagaaaagaaaacttctatagacaatgaatttcttctttttaattccacacacacatacaaaattttgttttgttttgtttttttaatccaacagatgagaacaacgtgtcaagctacttaagcaaaaatattctggctttccgtgaccagaacattctcttgggtacaacttacaggatcatagcgaatgctctcagcagtgagccagcctgccttgctgaaatcgaggaggacaaggctagaagaatcttagagctttctggatccagttcagaggattcagagaaggtaatactggaggaatgttttacgctagtgtgctgtgtatgtcttcaatgtgcagtgttcaggctacaggaaagtaataataaggatgttgctttgtgtttttaaaatatatttgacagttatgcacagccaattttctttttatttatgtatttgtttttatttatttattttctaaattattattatactttaagttttagggtacatgtgcacaatgtgcaggttagttacatatgtatacatgtgccatgctggtgtgctgcacccattaactcatcatttagcattaggtatatctcctaatgctatccctcccccttccccccaccccacaacagtccccagagtatgatgttccccttcctgtgtccatgtgttctcattgttcagttcccacctatgagtgagaacatgtggtgtttgattttttgtccttgcgatagtttactgagaatgatgatttccaatttcatccatgtccctacaaaggacatgaactcatcattttttatggctgcatagtattccatggtgtatatgtgccacattttcttaatccagtctatcattgttggacatttgggttggttccaagtctttgctattgtgaatagtgccgcaataaacatacgtgtgcatgtgtctttatagcagcatgatttatagtcctttgggtatatacccagtaatgggatggcacgcacagccaattttcttatgtggaaaattgacatactccgtgcttcctatttatttgaatgacacaaattttttaatattaaaaatcatgaattttaaatttttttgaattaaaagaactgtagaccgttcttttatgacttttgttaattaaatttccccacccatcaccattcagacgtcccaccagcttatggaacaaatcagccttttctgcatttttatttagtgcctgctttgcttagcttcttgccgattattttgtttttttcaatagttacctgcttccgtctcattcactatgtcctgcctcacctcagttgtggggccttgtcttctccttccatgatgctactagcatctgtgcaggacactgagtgcaggagccgacttccatctccctcttatattcccgacagccacgcactccactgaccagacccagctctgtgttgcttgtgcaccatctggcccgcgctgggcttgcatttttgtttggccagttgttacctgctgaggatcttgctggaattgcttgctccttcacagccagggtggactcttgtttttccagttccatagcttcagtgttattttggagctgttgatccatttatgtgtcatgagtcacaaatggaaagcagagttctttgagaaagcttcagtcatgctcatgggtttaggtctctgtgaattccaggtgatcgcgggtctgtaccagagagcattccagcacctctctgaggctgtgcaggcggctgaggaggaggcccagcctccctcctggagctgtgggcctgcagctggggtgattgatgcttacatgacgctggcagatttctgtgaccaacagctgcgcaaggaggaagagaatgcatcaggtgaattgaaaattaaaaagctagtgttccattatgtcagcataaagtcttatgaattttgtacatacctttggtctcctctttgtttgttttcaaattacaaatattttgaaaatcctactgtctttttaagagacaatggcagccgggtgcagtggatcacttgaggccaggagttcaagaccagcctggccaacgtggtgaaaccccaactctactaagaatacaaaaaaattagctgggcgtggtggcccatgcctgtagtcccagctactcaggaggctggggcaggagaattgcttgaacccaggaggcagaggttgcagtgagccgatatccactactgcacaccagcctgggtgacagagcgagactccatctcaaaaaaaaaaaagagagagacaatggcctctctaagcaacatgacctacatttaaatggagtcaagtggtcctctgtttccatttgtttaatttctactttgatattttgcttgcagcttcaatattactggctcgtgtggcctgcttcatgctcctggaataaattcaataaccaccagttgccccttatgttcccagcccaggattcaaactgtgcttcatgcagaatgggcactctaatggaaggatttggctccaggatagatacaaaactgtacctggtgtttgttggtgtaaagtggtagttaagaagagaacaatgacactacaaaatacaagccaaaaagggaaagtgttagcatttaacatcatagtttatggatattgggatacattgaccattgctttcttctttggtgtccttgatagttattgattctgcagaactgcaggcgtatccagcacttgtggtggagaaaatgttgaaagctttaaaattaaattccaatgaagccagattgaagtttcctagattacttcagattatagaacggtatccagaggagactttgagcctcatgacaaaagaggttggtgtctttattctacttggcggtaaggaactttacagaacttaaagatacgcttatttatattcaaacgcgttagtgtgtgcagtgcatgtattatagcttttcccagccagctgtgaattctgctacattctgaggacataggtaatttaaagctgcaaaaacgagttttcgcatttacccattttcctctgtggrtgttgataaaaacactgtgtctgaacaaggatccagagagatggagacggggtgtgtgggatggtaacgggatcttgtgtgggaaacttgttgcccctgcagatgaggctgtggccagtcacatttgctgtgcccagtgctcacctgtcatttagcccaaagggagtgagcaaggttcagcttgcatcccacctcccaggagcacagcatctgccagcagcacggtgtccagaggggtctgggagcatgagtgaggggtcagcgtatggacatgggaggaacccgcacccttccatgtgacctgccccttggccccaccaagggctgcactgccagctgcactcctgtcctttgggctctgtctgtgtgcaggagggttccactgacttcatttgcaaagtgtagggcctctgaaaggcttcgtagttgacatttatagacgtgtaactggaagatagggccaagctttgagttgaaaatgtaatagttcaaaaagggttacatggttcgttctctattagctttgcatggtgagtttttaaataatgttgatctctgggctgcggggacccagtttgacttttagggccctaaccactccttccacctttttctgcattctgaatagtagactttctcagtaggtattaaacaggttaaggtaaattcagaagtgcaacatgtatgtgtttttcttcaagataagtgagcaaataacttcattatgattttatttttttccaatataatatttatacatgataaaaacagcatttgaatttgtgaggacatgaagtattcactccacgttgtcaaaacacccagtagacacgtgcagtgaagccagtagcctctctcgtgagcttacatgagctgtgtggactgatccttcctcacacgccatgctgtcctcagctcacacgtgcactcaggaagcttgcccatactcaagcctcactctagcattgcagacacatcaggttttatcttcagaaagacaccttaaaagtatcagaggaaaatgtgaacacatttttttaaatggtcttggaatgaagagacaaaaaccagaatccatgaaggaaaatagtttgacttctatacagaaaaagaaaataccgtatacaaagttaaaaaaataaaaagccaggtgcagtggctcacgcctgtaatctcaccactttgggaggccaaggtgggcagatcacgaggtcagcagttcgagaccagcctggccaacacggtgaaaccctactaaagaaacaaaaattagccgggcgtggtggcgagcacctgtaaacccagctactcgggaggctgaggcaggaaaatcacttgaacccaggaggtggaggttgcagtgagccgaggtggcgccactgcactctagcctagacgacagagcaagactctgtctcaaaaaaaacaacaacaacaaaaaaaaaaatgaagaaaaacgtttgcaacacatataagaaacaaaaagctgacttcggcaatctacaaaataaatggtcacaatagaccagtagaaaatggtgggaggaaatgcatgcgtgattaaaggatgtaaggcaaataaacatggaacatacagcctcactaataatgtaagttgaaaatttaaattaggtgtttttcacttctcagattgacagtgattttatttttatttatttatttattttttatttttttggtgacggagtctcgctgtcacccaggctggagtgcagtggcgtgatctcggctcgacagtgattttaaaagatgattatgtgcagtgttggtaaagactttagaaagtagtcagtctaatactttcagaaatgaaaatttgaaaaattctttaccgtggctcatgcctgtaatcccagcactttgggaggccgaggtgggcggatcatgaggtcaggagattgagaccatcctggctaacacagtggaaccctgtctctactaaaaatacaaaaattagctgggcatgatggcacatgcctgtagtcccagctactcgggaggctgaggcaggagaatcacttgaacccaggaggcggaggttgcagtgagccgagatggcgccactgcactccagcctgggcgacacagtgagactcttgtctcataaaaaaaaaaaaaaattccataccaatgtttattacaatttttaaagttgacactgtaattttagttctaggaatttatcctacaggtatatagcacaaagagttacgtgtacaggggaccaggcgcggtggctcatgcctgtaatcccagcactttgggaggccgaagcgggtggatcacctgaggtcaggagttcaagaccagtctggccaacgtggcgaaacttgtctctactaaaagtacaaaaattagctgggtatggtgacgagtgtttgtaatcccagctactcggaaggctgaggtagaaagaattgctaaaacccagaaagcaaaggttgcagtgagctgagatcacgccacagcactccagcctgagcgatacagtgagactccatctcaaaagaaaaaaaaaaaaaaaaaggccgggtgcggtggctcacgcctgtaatcccagccctttgggaggtcgaggtgggccgatcacgaggtcacragattgagaccatcctggcttacatggtgaaaccccatctctactaaaaatacaaaaaattagccaggcgtggtggcaggcgcctgtagtcccagctactcgggaggctgaagtaggagaatggcgtaaacctgggaggcggagcttgcagtgagccgagatcacaccactgcactccagcctgggtgacaatgagactctgtctcaagaaaaaaaaaaaaaaaagagttggccaggcacggtggctcacgcctatagtcccagcactttgggaggccgatgtgggcaggtcacgaggtcaagagattgagaccatcctggccaacatggtgaaacccccatctctactaaaaatacgaaaattagctgggcatggtggcgcacctgtagtcccagctactcagaagtctgaggcaggaagattgcttaaacccaggaggcggaggttgcagtgagccaagatcatgccactgcactccagcctggcgacagagcgagaccccatctcaaaaaaataaataaataaataaagttatgtgtacagggatgtctactgcagcattacctgtgataaaaaattgaaatattcattatagagcagtaaacaacatggaatactacatagccgccaggaggaatgaagtagaagatttttctatacatctgtctaagaacaaccagcagcagctgtctcgtgtgattccattcttgcaacaaaagactgttctcctgcacagaaagtgcctgggagagtccagtggttgccgcagcagaagagagctaggggatggaagacttgttttgtacttgcgtttttatacttctgagttttctttattttggacatatgttacttttataacagatgatgtgagatgttttactcagcattaagtttcagctctctgttttagatctcttccgttccctgctggcagttcatcagctggatcagccacatggtggccttactggacaaagaccaagccgttgctgttcagcactctgtggaagaaatcactgataactacccgcaggctattgtttatcccttcatcataagcagcgaaagctattccttcaaggatacttctactggtcataagaataaggagtttgtggcaaggtaggtaatattacagaaggaataggttgatcaaatactataggttataaaaatgtggttaaagcacacacgtggacactacatttgttttcaaattaattagagttgtcattgaagaataatcttagccgtcgctttgttgaatatatctattctgggtatgttacttgttataggatgtatctcctttaaatactttcatcttacactgctaacaaaacattctgctcatatggtcatgattgcttgggatagactagatgagatgatttttgaaatcagctcctgaaattgtcctgtaatttaaaatacacagaacgactcttccttttaattaggactcagtagatggcctcaagtgtcatcctgtccactcttaaacggatttatgagttgagaccgatgatgagtgagcagtagtgcgcaactatttcaaggatgctttgtacacaaactgtgtagtgttgtagtgacattctccatcatgaggttttggggttttttgtttgtttttaattatgagcagatctgcctcattattttgaatgtattgatttcaacaagatgaagaaaagcgctggcatctttttttttttttttttttttagtttttttaaattaatttatttttatttttatttctttattttttattttttttttgagacagagtattgtgctgtcacctagtgcagtgcaatctcggctgcaacctccacctcccaggtttaagcagttctccctgcctcagcctcctgagtagctgggattacaagcgtgtgccaccatgcccagctaatttttgtatttttagtagcgacagggttttgccaccttggccaggctggtctcgaactcctgacctcaggtgacctcaggtgatccgcccaccttggcctcccaaagtgctaggattacaggcgtgagccaccatgcccagctgaggcccagcttctgttgcagttaatgggtggcttatctgtgaacacacccctgccctactgaggccctgcccaccatactgtttctctgaacagacagctattgtcttgaaaaatgaaagaagagaaaaagatgtgagagacagtgtgtcaagaaagtgaccttgctgggcatgatggtctgtgcctataataccaactacttgggaggccgaggtggaagaatcgcttgaggccaagagttcatgaccagccttggcaacatagtgagatctcatctctaaaatagtaaaataaaaataagctaagcatggtggtgcgtgactgtacttccaactacttaggaggctgaggtgggagaattgcttgagtacaggaattcaaggctgcagtgagctatgactgaacttgtgagttgccactgcagtccaacctggacatcatagtgagaacctgttttttaaaaagtgaccttttctttcataatgtaacttcagaaactatatatcgcgttatatacgtcaaaacgtcaacatcagttgcaagatttgcttttatctaagagcagctctttttttattttaatttttaatttttatgggtacatagtaggtgtctatgtttatggggtacatgggatattttgatacaggcatacagtgtgtaacaatcacatcagggtaagtggagtatccatcacttcaaggatttatcatttctttgtgttataaacattccagttatactcttttagttatttttaaatgtacaataaaaatttactgtagtcaggccgggtgcggtggctcacgcctgtaatcccagcactttgggaggctgaagtgggcggatcaggaggtcaggagatcgagaccatcctggctaatgcggtgaaaccccatctctactaaaaatacaaaaaattagccgggcatggtggcaggtgcctatagtcccagctacttgggaggctraggcaggagaatggcgtgaacccgggaggcggagcttgcagtgagccgagatcaagccactgcactccagcctgggtgacagagcaaaactctgtctcaacaaaaaaaaaaaaaaaaaaattttactgtggtcaccctgttgtgccactaaatactagatcctgtttttcctaactatatttttgtgcccattaaccatccccgctttccacctcccctccccacgagttcagttgttttaatttttagcttccacaaatgagtaagaacatgtgaagtttttctgtgcctgacttatttcacataatgtccttcagttccatccatgttgtttcaagtgacaggatctcattcttttttatggctaaatagtactctattgcatgtatgtactgcattttcttcattcatttgtctgttgatggacacttaggttgcttccaaattttggccgttgtgaatagtgctgcaataaacatgggagtgcagatatcatactgatatcctttcttttgggtatatatccagtagtgggatttctggattatatggtacttctagttgtagtttttttaggaatctccatagtgttcttcatagtggttgtatgagtttacattcccaccaatagtatacaagggttcctctctctacatccttaccagcattcgttattgctgggggtgagatgatacctcgttgtggttttgatttgcatttctctgatgttcattgatgttgagcatgtttttatatacctgtttaccatttgtatgttttcttttgagaaatgtctattcagatcctttgccccattttaaaatgagattggatttttttttcctgttgagttgtttgagcttgttatgtattttggttgttttttgtttgtttgtttttgaggcggtgtattgctctgttgcccagggtagagtgcagtggcgcaatctctgctcactgcaacctgcgcctcccgggttcaagcgattctcctgcctcagcctcctgagtagctgggattacaggcaggcgccaccatgccccgctaatttttgtatttttagtagggacagggtttcaccatgttggccaggctggtctcgaacgcctgacctcgtgatctgcccaccttggcctcccatagtgctgggattacagacatgagccactgcgcccggccatattttgcttattaattccttgtcagatgggtagtttgcaaatgttttctcccattctgtgggttgtcccttcactttattgtttcctttgctgtgcagaagctttttgacttgatgtgatcctcctgtttgtccattttaaatttggttgcatgtgcctgtggggtattactgaagaaatctttgtgcccagaccagtgtcctggagagtttcctgtttttgtttttgtttttgtagttttattggttgagatcttaggtttaagtctttaatctatttggatttgatttttgtatgtggtgagagataggggtctagtttcattattctgcatatggatacccagttttcccaggaccatttattggagactgtcctttccctgatgtatgttcttggcacatttgtgaaaaaatggattcactgcaggtgtgtgaatttatttctgggttctctattctgttccattggcttatgtgtctgtgtttatgccagtgtcatgctgtttgggttactatagctctgtaatataatttgaagttagataatgtgattgtgccagttttattctttttgctcagggtggctttggctttttgctctgggtcttttgtggttccatacaaattttaggattatttttcctatgtctgtgaagaatgtcattggtattttgataaggattgtgttgactctgtagattgctttgggtagtgtggacagatttaacagtattgattcttcccatccatgaacatgaagtaactttgcatttctttgagtcctcttcaatttctttcatccatgttttacagttttcattgtagagatctttcatttctttggcgaagtttattcctaagtattttcttttatttgtggctattgtaaatagaattacttctatgatttctgtttcagattgttcactgttggcatatagaaatgctactgatttttgtatgttgatttttgtatctgcagctttactgaatttatcagttctgatggttttgtggtggagtctttaggtgcctccaaatataagatcgtatcatctgcaagcaaggataatttgacttcttcctttctaatatagataccctttatttctttctcttgtcagcttgctctagctaagactcccagtagtatgtggaataacagtgggcatccttaacatgttcaagatcttagagaaaggttttcagtttttcagtgttcagtatgacactagctgtgagtgtgttgtacatggcttttattgtgttgagatatgttccttctatacctaattttttgagagttttttttatcatgaagggatgttgaattttatcaaatgctttttcaacatccgttaaaatgatcagtggtttttgtcctttattctgttgtgtagatatgattgatttgtgtatttgatctatccttgattgatttgatctatccttgcatctctagaataggtcccacttggtcatgatgaataatctttttaatgtgctgttgaatttggtttgcaagtattttgttgaggatttttgcattaatgttcatcagggatattggcctgtagttttccttttatttgatacgtctttacctggttttggtatcaggataatactggccttgtagaatgagtttggacgtattccctcctcccttgtgttttggaatagtttgagtaggatcggtattaattcttttttaagaacctcatctcttgatagaatagatgcttcttgcttcatttaacattgggtggaattttaaattactatgtagttggttatatatatatgatatgtataaattatacttagttatatataacatacattattttatatatgtataatatataacttatatatgtatggtatataaaatatatattgatttttggaagatatttgattgcctaaactttgtaaatttttttaaataggattaaaagtaagttggatcaaggaggagtgattcaagattttattaatgccttagatcagctctctaatcctgaactgctctttaaggtaatgatagaacggcttctggcacataaaacatataagttgggtaaaacttaattgcaatctagcttgatttttttcttactttttttttcccctgacaggattggagcaatgatgtaagagctgaactagcaaaaacccctgtaaataaaaaaaacattgaaaaaatgtatgaaagaatgtatgcagccttgggtgacccaaaggctccaggcctgggggcctttagaaggaagtttattcaggtatggactggcacagcctgctattttgatagcagagtcgttgtgacagtcaatagttacattattaaatgtaataatatttgtattaaatgtaatcattaatttaacagttctgcatttaaaatgtctgttgaatgctttaggtctcatgctttctgtgacacattgataacatttttaggtcggctggtagcaggtgagtcagtaggtaaaacctcagagtttcattacacgttgttcatgctcagatttttagatctgaaagttacatatagattgggatttccaattcttcaaatggcttgaatattgggccaagaaaatatttgtgtgttaaataagctgataagtattttcaagcacttagttcggggcacagttctgggtgctcaggagatacatggagaagacagatccagtccccaaatacaaaggggttatgtgacaaaactgctcaccaagagctgtgcctaggacaagtgtggtaagtgtgagatctttcagagggtgctggagttggaagggaaacacaccatcatttgatgagaatgatggagcaagtagactgcagtcagcccagttgctacacctttgcagcctgcttggctccttctctccctcctccatctggagacttgcccttgggcttggcgtcagcatcatttctcctttagagcctttcccaaccctccccacgcagggatctccagaagagtcgaatgttcttcctctctcacctaaaacagcttactttacaatctctctgtttagcatgggtcatactgacttttctttctagtttttgtcaaaattacttttattcattaaacctcaagaaatttaagggcatagataagtcttggaactcttgttgccagagttctcaagttccaccatgtatagggcaaaggaagagctttatcctttttaaataactgctttgttactatataattcacatggtccttaagtcatccatttaaagcatacaatgcagtagttttacatatattcacagagtcatgaaatcatcaccatatcaattttagtacattttcatcaccagaaaaaagaaacccatacccattagcagcagggcctccacatagcctccagcctagcctgcccccagcacactgctacctcagccagtgtgcacgttgtgtcggaattcatggccactttgttgctggaagccctgagacttccctgcagggctgtccatggggagcacagttcttacccctgcagcagcacctgatcctgcccaagcctgcagggtgcagaaaggcctcccttgttcctttcaggcaggagatgtgtttggagttttatttctagtaccttagaaaatctatccagaacttttccaccttgtaccaaatcaaaaataacttgcattcgttcaaagaataatctaccaaagcgaagtgcctcaaatatcactttagaggatccttaagggcattatgtctttcagataggatgatgctgattatgtttggaaatagctaatctttctaagaattgaaaattgttttctacatttttcatccacttacagatcaaagaagaaatctgttttatatatgtcaattttcctatagtggattgtcttaaaatagagcacgtttgatttacaccagatttatgttgtgacattagttacaaatttggtaaaaacatttctaattagagatgatcaggtaaatcttgacaactgttgagtaactgctagtaatgctcttgagatttattttttatttgatatcagatttataattcaagtaaatatctgagtagaagctaatgcaaagagataattactatattctaaggtagagtacttataataattgcttttagaaataaacatatctgctgggcatggtggctcacacctgtaatcccagcactttgggagggcgaggcgggcggatcactgggtcaggagttcgagaccagtctggccaacatggtgaaacccatctttactaaaaatacaaaaattagccaggcacggtggtgtgcmcctgtagtcccagctactcaggagggtgaggcaagagaatcacttgaacccaggaggcagaggttgcagtgagccgagatcgcaccaccgcactctagcctgggtgacagagcaagactctgtctcaaaaaaaaaaaaaaaaaaaaaaaaagattaaataatattttttctggtttattacccaaaataatagcttgaaagactcttaataaagaaagtagcattcttaaatttttctcttcagctggtatcagaaattatgagccatttatttctattgaactacttcctttattttgttgtttttaactttgttcctagttatttgtgtcatcataatgatgtagaccactaactagacaatgagtgcacagaggttaaatgacttcgccaagtttttaaagcccttattaggatttataactaaaagtcactactaaccatgtttttgttttttgtttttgagactgagtctcgatctgtcgcccaggctggagtgcggtggcatgatctcggctcactgcaacctccgcctcccggattcaagcaattattctgcctccgcctcctgagtagctgggactacaggcgagtgccaccgcgcttggctaattttttttatttttagtagagatggggtttcaccatattggccaggctggtcttgagctcctgacctcgtgatccacccacctcagcctcccaaagtgctgggattacaggcatgagccaccgcgcctggtcaaccatgtcatttatttatttatttgaggtggagtctcactctatcacccaggctggagtgcagtggcgcgatctcggctcactgcaacctccgcctcccgggttcaagtgattctcctgcctcagcctcccgagtagctgggattacaggcatgagccaccacacccgactaattttttgtattttaagtgggtacagggtttcacaatgttggccaggcttgtctcgaactcctgagctcaagtgatccacctgcctcggcctcccaaagtgctgggattacaggcattaaccgtgtcacttataatggaacacaagaaacaaaaggcagactggatgttttagagtattgaaatattcaaggaaagcaaaactataattttttttttttttagagacacggtctcactcggatacccaggctggagtgcagtggcatcatcatagttcactgtcacttcagactcctgggctcaatagcgatcctcccacttcagcctcctgagtagatggaactacaggcatgtgccatcacacccagctaatgtttttattttttgtagagttggggtcttgctatgttgcccgggttggtctcaaactccttggctcaagtaatcctactatcttggactcccaaagtgctgggattacaggcatgagccaccatgcccaaccaaaactatacatcttaaaagcagagaagaaacatataccattgagcactccattcattacacttataagcttagagccttttccaaagtccaaactaaacatcagtctttatagtaaattcttactaatttcagacttttggaaaagaatttgataaacattttgggaaaggaggttctaaactactgagaatgaagctcagtgacttcaacgacattaccaacatgctacttttaaaaatgaacaaagactcaaagccccctgggaatctgaaagaatgttcaccctggatgagcgacttcaaagtggagttcctgagaaatgagctggagattcccggtgagttaacctccaggggtgacaaaactgtactgtcaggagcacagcactgtaataagaactcgtggtttctggaatagtgatactgggatattgacagttatttctttttttaaagaattttaaaattcaccgaatttttcatcattaggaaaatccataattatgaatgagcacacattactaaatgtttaatgagattatagttcttatatttctgattctgacaaaagttcagattttcatttggtaataatggtaaacagcaatcatagatttcctctgaatgtattcatgctatgctcctgaataacttttcttcagaaatatacaggtatagaggcagattacttcctgggatgtgtacacagttccatttaaagtgacaagtttttaaaaaaaaaaaaaagtgacaagttaatgataagtcactgacctgcaggaaaaaagatcataatattaaggatagagatgcacagcaaattggccagatttcaaggcgtgactttttcagaggaaacctgtgtacattccattttcctcaccccgaatttgccagaggaaaaaaagttttaatctggttgttcatattctcatttcagtgggtataagaaaaaacatatttggagaaacacttttctttgttattaataatgactatgcagttgcatatggttcatttcaagaaaaacatttaaatgtcagccttgtcatatgcagcttgattggccttgagaatatgcagtgttctagtcaatgcatcattttttctacttaggatttgtccatgctattagaatagagtgctaacttccataatcagtcaaaatgagaaataactttttttttttttttgcgatggagtcttgctgtgtcacccaggctggagtgcagtgacgcagtctcggctcactgcaagctctgcctcccgagttcacgccattctcctgcctcagcctcccgagtagctgggactataggcgcccaccaccacacccggccaattttttgtatttttagtagagacggggcttcaccatgtaagccaggatggtctctgtctcctgacctcatgatctgctcgccttggcctcccaaagtgctgggattacaggcgtgagccactgtgcccggccgagaaataacattttttttaaagtcagttccctttaagtgaaaacttttcagtaaaaggttttatcatgttagattggctttttaaaaagtagatcaagaggcatgttttaaaatacaggcggttgtctaacaagctgttcctaagcaaggttctggtttgttttaggtcagtatgacggtaggggaaagccattgccagagtaccacgtgcgaatcgccgggtttgatgagcgggtaggtgtgagggtgtgtgacccagtccctgtcctgatgaacgttcttcagatgagaatgatctgtttgcctttagtatatgagacaacggcccatgttgatcacagatatatcaagtttagcatatttactgaattcctctttttttttttgagacggagtcttgccctgttgcctgggctggagtgcaatgggacggtctcggctcactgcaacctctgcctcccgggttcaaacgattctcctgcctcagcctcccgagtagctgggattacaggcgcacgccatcacgcccagctctgttttttgaatttttagtagagacagggtttcaccatgttggctaggctggtcttgaactcctgacctcatgatccatccacctccgcctccgcaaagtgctgggattacaggtgtgagccactatgcccgggctttttttttttttttcttttttttttttgagacaagagtctcattctgtcagccaggctggagtgcagtggcccattytcagctcgttgcaacctccacaccctgggttcgggcgattctccatgtctcagcctccctagtagctgggatacaggtgtgcgccaccatgcctggctaatttttgtatttttagtagagacaaggtttgaccatgttggccagactggtctcgaactcctgagctcaagtgatctacctgccccatccttccaaagtgctgggattacaggcgtaagccactgctcccggccctgggtttcttaatatattatgtctccagtgtttgaacaacagttctatttaagatatcataaactcaaagagtaagctgtgtgtgagtatccactataaaatatgtgtagcattagcttactactgtaraaagtttgcatgttggctgttgctgcttgctaaagatatccacattcataagcaagtatttataatcaggaatacaacatttctgcgggcacagcagtcaggcacaagcaggtagcaraaattcgttgctggcctgggcgctctgctctttggcactgtcttcagagggcggccccacggaggaatgctcacagccactctggcttttccctctgmrtttgacacgtggctagcctgtgccctgagatgacattctgatttttgaaggtgacagtcatggcgtctctgcgaaggcccaagcgcatcatcatccgtggccatgacgagagggaacaccctttcctggtgaagggtggcgaggacctgcggcaggaccagcgcgtggagcagctcttccaggtcatgaatgggatcctggcccaagactccgcctgcagccagagggccctgcagctgaggacctatagcgttgtgcccatgacctccaggtaactgccaggctgctcccagccagtaggctgctgcatattgcttggcgtccacgggactgtttttctagtgaagaaagagcagtttgggtttactcgttaaccttttattctccctttcaggttaggattaattgagtggcttgaaaatactgttaccttgaaggaccttcttttgaacaccatgtcccaagaggagaaggcggcttacctgaggtaagggcggccacacgccctgctcccccagcagtcgcctcccctcacttctccagtggcaggtcggggccgtgacaggcgcgctcgagagcccacactgcctgccccgcagtctgctggctgggtcaataaaccaaatggagtgctggctgctaaccagtagttgcagatattttaccgtaatacaaaatatttattaackttgggtggggggaagaaaaattgttgaaggaaataaataataataaaattatcagataacatgtagtaaaacattttctgtgggctaggtactgttctcaatttttaacgtgtatgaaccaatttacttctcaccaacaacctgcaaggtaagtattattatcactgctatacagatgaggaagctgaggcccagaaaggtcaagtaacctgtcctgtgtcacttagcctgtaaagtggggtagctgggattactagtaattctaggtcatgatgtggatgcttttttatttttctgtatccttttctctattttccaagttttctacaattaacatgtacattttaaccacaaggttttttttatttcctttttgtttttgtaaagaaaaacaaggacaacatgagaaacattttgagggttgacagattttgacaaccaaagttgacaggtttgggtgacaagctgtaggataaaggaacagcttcagggcttctttctctttgatgttctctgattcttttttaaaagtttttaaataggagcagtgttcccttcagtcaggaaagatttctgaaaatatcaaacatattcttatcaaactcatattcccaggtgataattactctacagggcagtgttcaccaacttttagttccagacatttgagtcctttgcttagaattgtttctactttccctggaagacagggcaactgatgagcacgcttcctggagtctcacaaattgcagatctggccctggcactgaggctctgcctgacaatgcaggtgccaagcaggtgtcgcctttcctgtggtacctgcctgcatttgtgggatggaatggtagcgtggaaccgcacaggattaacataggtaccaggagagttgaaagcaccttacataatggaattatgaaaataatttccaactgcctttttacagggcacttccaatacccattatttaaatccttgctgttttttttcttaattcagcatgttacagtgttttgtttttttgagacagagtctctctctatcaccaggctggagtgcagtggcgtgatctcggctcactgtggtctccgcttcccgggttccagcaattctcctgcctcagccttccgagtagctgagattacaggcgtgcaccaccatgcccagctaatttttgtatttttagtagggatgggatttcactatgttggccaggatgatcttgatctcttgacctcgtgatccgcccccattggcctcctaaagtactgggattacaggcctgagccactgcgcccggcctacagttttataacctaagaattttcatctcagtttaaactaggaggagagaattttaagatggagtggactacttttaaagctaactttaatagcaactcagaaaagatttcacctgaagtgattgaattgctaagtcacacgtgaaactgttctgtctttagattttatcgggaaaacttgttaaagctttccacacaaaagtacttaaacatacgtgtatcacattgtttcccattgcccaggtactgcctttttcctaggaaacactgaaaacagcttttcaagttcacttaaacatccattgtcatttaagaaaatattttctcataggagtgcagaagccttattggaagaaaaaagaaaaacaaaatattttctcatacttactatggattgtgtgtatatctacctattggaaatataaagaaagatgtggcactggctgggcgcagtagctcacgcctgtaatcccagcactttgggaggccaaggtgggcggatcgcctgaggtcaggaattcgagaccagtctggtcaacatggcaaaaccctgtctctactgaaaatagaaaaattagctgggtgtagtggcgggcgcctgtaatcccagccacttaggaggctgaggcatgagaattgcttgaacccaggaggtagaggttgtagcaagccgagattgcaccaatgcactccagcctgggcgacagagtaagactctgtctcaaaaaaaaaaaaaaaaaaaagacaaaacaaaacaaaagaaaaagaggccaggcgtggtggctcacacctgtaatcccagcactttgggaggccgaggcgggcggatcacgaggtcaggcattcgagaccagcctggccaacgtggtgaaaccccgtctctactaaaaatacagaaattagctgagcatggtggcatttgcctgtaatcccagctactcaggaagctgaagcaggagaatcacttgaatccatgaggcagaggttgcagtgggccaagatcgcaccactgcactccagcctggcgacagagctagactcccatctcaaaaaaacaaaagaaaaagatgtggaagtggtctaaataaagataaaaacagacataatccatctttagcaaaactgtgcgggctttttggctatggtagtgacatggcctgaggcttccagcagccgcctgtggtgctgtcgccctcttgctatggttctttctaggtcaaagtttcagaattgcatgcctggttaataaacagttatgtttagttcatcttattcctctctatgtcagtgggaaatttgttggatctgatggttttgtacctgaatttttcataggcaatagcttggatttctttaggagtaattaagaatgaataatggtatattgaaattcaagatccagagtaatgtgggttcaatgttaatattgaatatggttaaaagtcttattattttttcctgcctctttgctatttttcaatgaattcttggtgatctttgcctttgaaatcacataatgctaaaatcttcctaattccaattccccttttctcactcattagtgatcccagggcaccgccgtgtgaatataaagattggctgacaaaaatgtcaggaaaacatgatgttggagcttacatgctaatgtataagtaagtttggttttgatttttctttgtattagttagttcattcttctgcaaattgcatgttttcttttgattcttagctttgcctcagagagatcatcaagattattcgatatttgagtctcaatataaacaaaaagttttaaaatttaaattttaagtcagagaaattttttctaattagatgtttctattattaaatcataggggcgctaatcgtactgaaacagtcacgtcttttagaaaacgagaaagtaaagtgcctgctgatctcttaaagtaagtacccttctgccctcacccttagtgggatcacagcagccgcacagctgtgtctcttttgtaggcgggccttcgtgaggatgagtacaagccctgaggctttcctggcgctccgctcccacttcgccagctctcacgctctgatatgcatcagccactggatcctcgggattggagacagacatctgaacaactttatggtggccatggagactggcggcgtgatcgggatcgactttgggcatgcgtttggatccgctacacaggtgcacttgctgtgctctcgtgatcctgggcaaggcgagagtcatcataggactttcaacaacctccagaaatagacagtttttaaggaaaaacaacatattagttagattcgttttgtcatggtcattgaatgcagaaagggataatcacttagttcagcctcattcagtcaggtcacagaagtcatggtgatcagtgatatcatcagagccggtaattaaatgtgttcgcagatcaaaggaagactctaagaaagttttaggaagccccgtaataaaaatgtctggtcaaaaatgtgatacagatcttttctctggttaacctctgaatgttttggatcatccttctcaatctctgcggccctgtgtcctgtgcacgtgggttttgcattgagggataactcaagccgagggggttactctcgagcataggaactcacatctgtgtagctgatttcaagggaagcagagtctgtatttttactaaatgtgaacagtaactatgtgaggatgctgccatttgtgctcggtactttgagagttctggcttacatattctgctccttgccttttttcttgtttagtttctgccagtccctgagttgatgccttttcggctaactcgccagtttatcaatctgatgttaccaatgaaagaaacgggccttatgtacagcatcatggtacacgcactccgggccttccgctcagaccctggcctgctcaccaacaccatggatgtgtttgtcaaggagccctcctttgattggaaagtaggttttgtttcatgtgcacttttcacttttgtgacagtgtccccgtgatcaagctggtatctctcgtgtatgatggaagtgcattgagtcatgttgatgaaaatatttacattattttgtacagcatttctcaaagttagtatttaggattgtctgcttgaaaaccagttaagaggctgggcccagtggctcacacctataatcccaaaactttgggaggcagagacgggaggatcacctgaggtcaggagttggagaccagcctggccaacatggtaaaaccctgtctctactaaaaatacagaaattagctgggcgtggtaacgcacacctgtaatcccagctccttgsgaggctgaggcaggagaatggcttgaaaccaggaggcagaggttgcagtgagccgagatcacgccactgcactccagcctgggtgacaagagtgaaactccgcctcaaaaaaaaaaaaattaacaggcaaaacctttatttggagaaataaggggactgctgaggcccctcgtctcgtgatgtgtgtgccatggagtctgtatgaacagctttgtagctgtagaaagcaaggctgctcctggttatagatgtttgtttactttaagatcattactagatttaatctgtttgggcatgattgtatataccattatgatcagccgggaaaatcatgttcttttcttctagaattttgaacagaaaatgctgaaaaaaggagggtcatggattcaagaartaaatgttgctgaaaaaaattggtacccccgacagaaaatatgttacgctaagagaaagttagcaggtgccaatccagcagtcattacttggtaagatttttatatgtggaaaaaactaacggactaccracatgctactgtttctcgaggagccaacatatatacaaagtgctgagctcttgacactctgttagcatgacttctctgctttcattgaggaggaaagcagggcttagagaggctgacttccccaaagccagggcaaggcctgcaactctgacgtatgtgacccctgcactgtcttcaggtttaaactcagtccctggaacagtggcgccaattggagaaacagaaggtgcactcttagacagttgccagaatattgttacatgcatgaggagacttaggttttaaatttgcttttgtcctttttagggcgtttgaccctgatgaatatagtacctaggtatgaaaagcactgtgtgggcttgttagatgagaattcaatttgggttggcttttaggttagccttaaagttttctcttgttgaggtctaaagcaaatagaaatttatggagatgattcataggaatgaaaaaagttggactttagaattaagtaatagtggcaatctattgtcaacttatttttgacaagggtgccaagaccattcagtgacctttccaacaaatagcgctggcaaaagaatgaagttaggtccttgtttcacaccatgtggaaaaattaattcagaatggatcagagagctaagtgtaagagtcaaaactataaaacacttagaaataggagtaaatcagctgggcgtggtggctcacgcctcaacactttgggaggccaaggctagtggatcacttgaggtcaggagttygagaccaccctggccatcaaggtgaaaccccatctctactaaaaatacaaaaattagctgggcatggtggtgcgcacctgtaatcccagctgctagggaggctgagggaggagaatgacttgaacctggggaggcggaggttgcagtgagccaagatggcaccactgtactccagcctaggcgacaaagtgagactctgcctcagaaaaaaaaaaaaaaaaggaataggagtaaatcatcctgaccttggattttgttgtgatacttgccattttttaggtatgacactgaaagcacaagcaagaaacaaatatatacattggacttcatcaaaattaaacaattttgtgcttcacagagtgctatcaagaaggtgtttcagccttccaaatgggataaaatatttgcaagtcatgtatctgatatgggacttgtatctagaatacattaaaaaaactcttattgcctaataataggtagatagataacccaattaaaaatggtcagggctgggcgcagtggctcacacctgtaatcccagctactagggaggctgaggcaggagaatcacttgaacccaggaggcagaggttgcagtgagccgagatcacgccattgcactccggcctgggtgacagagcaagaccctgtctcaaaaaaaaaaaaaaaaaaaaaaaaatggtcaaaagacttgaactgacatttctttaatgaaaatatacaaatggccaataagcggcatgcaaaaatgctcaacgtcactaktcatcagggaaatccaagtgagatactacctcacacctgctaggatggctattaattaattaatttatttatttatttatttatttatttttgagacaaagtcttgctctgtcacccaggctggagtgcaatggcacgatatggactcactgcaacccccacctcctgggttcaagcgatcctcctgtccgagcctcctgagtagctggaattataggttsatgctaccacgcctggtaatttttgtatttttagtagaaatggggtttcgccatgttggccaggctggtcttgaactcctgacctcaggcgagccaccacgccttgccagatgactataattttaaaatggggctaatgcagtggctcacacctgtaatcccagcactttgggaggccaaggcaggaggataactagagcccgggagttcaagtctagcctgggcaacatagcaagaccctgtctctaccaaaaatttttaaaactttctctttttttaattaaaaaaaaaggaatctaacaagtgttgaggatgtagagaaggtggactcctcatactctgctggtgggagtgggaaaaggtgcagctgctgtgggaaagtggcagttcttcacaaagttaaacatagagttaccattggacccatcaatgccactcctaggtgaatcctaggaattcactcaggagaagtgaaggcatacattcacacaaaaacttgagcagcataattcatgttctgttttcctacaaatccagtctttgacttcaaggttataagccacagaaaatactctgtgagtgatgacgtggggaatgtgtttggataggatcactagggatgcaggcaacaaaggacaatgacacatgctttgtgttttctgtgtttgttttttttccagtgatgagctactcctgggtcatgagaaggcccctgccttcaragactatgtggctgtggcacgaggaagcaaagatcacaacattcgtgcccaagaaccagagagtgggctttcagaagagactcaagtgaagtgcctgatggaccaggcaacagaccccaacatccttggcagaacctgggaaggatgggagccctggatgtgaggtctgtgggagtctgcagatagaaagcattacattgtttaaagaatctactatactttggttggcagcattccatgagctgattttcctgaaacactaaagagaaatgtcttttgtgctacagtttcgtagcatgagtttaaatcaagattatgatgagtaaatgtgtatgggttaaatcaaagataaggttatagtaacatcaaagattaggtgaggtttatagaaagatagatatccaggcttaccaaagtattaagtcaagaatataatatgtgatcagctttcaaagsatttacaagtgctgcaagttagtgaaacagctgtctccgtaaatggaggaaatgtggggaagccttggaatgcccttctggttctggcacattggaaagcacactcagaaggcttcatcaccaagattttgggagagtaaagctaagtatagttgatgtaacattgtagaagcagcataggaacaataagaacaataggtaaagctataattatggcttatatttagaaatgactgcatttgatattttaggatatttttctaggttttttcctttcattttattctcttctagttttgacattttatgatagatttgctctctagaaggaaacgtctttatttaggagggcaaaaattttggtcatagcattcacttttgctattccaatctacaactggaagatacataaaagtgctttgcattgaatttgggataacttcaaaaatcccatggttgttgttagggatagtactaagcatttcagttccaggagaataaaagaaattcctatttgaaatgaattcctcatttggaggaaaaaaagcatgcattctagcacaacaagatgaaattatggaatacaaaagtggctccttcccatgtgcagtccctgtccccccccgccagtcctccacacccaaactgtttctgattggcttttagctttttgttgtttttttttttccttctaacacttgtatttggaggctcttctgtgattttgagaagtatactcttgagtgtttaataaagtttttttccaaaagtagtgtgtatctcttttatgcagtttcaagagcaaaatattcatcttacaaaatagtttattatattacttgcctagtttgttctgataaatgcgggttaaatgcattatggcatttaaaataaacatttatggccaggcacaatggcgtacacttgtgatccaagcatgttgggaggccaaggcttgaactccttgagcccaggagttaaagaccaacgtgggcaacataatgagatcccatgtctatttttaaaaataacaaatttatcttctcaacaaatgacacctattgaaccaaatttcatctgtaaagaaaaataagtaatcgtgtgtgtgaaaaatctggtgcacatgatctagtaaatatttttgcacaaaaatgaccaaagtaagcccactttggagtaagttgataatatattgttttctgtaacaactaattagctataattcttgcttgagtcctgataattcgggctacattcattaaatggatcacctacattgtgggaaaccctgtttttttaatgactacttttcatatcaatagaagttgattgttacagccaggtgtggcagctcacgcctgtaattccagcactttaggaggccgaggcgggtggatcacctgaggtcgggagttcgagaccagcctgaccaacatggagaaaccccgtctgcactaaaagtacaaaattagccaggcgtggtggtgcatgcctgtaatcccagctactcgggaggctgaagcaggagaatcgcttgaacccaggaggcggaggttgcggtgagccaagatcatgccattgcactccagcctgggcaacaagagcaaaactcagtctcaaaaaaaaaaaaaaaaaaaaaaagattgttacaggttgtgtgtgtggttccagtctcaaagctgtgtgctcaaaaagttcatcattgctcacgagaatgcagtaagaagaaacatgctgtgtacagcattcagaaaacattcataaagttacactagatgttaaatggtcattacacaacgaaggaactgcacatctgaatcatcactggggctcaaactttaacttgtgattcttgctgaataagaatatttgatttggaaaccaaacaaaaaacacttaacactgattacaattacaaggaaatatgaatgatatgaatggtaatatttacattataaacagattttgatattcaggttgtatatgaaacatttgttcttcaaccccaaaataacccaggaagtttccgatttaagcttaatgaagacttgaatgatcccatgcttatgaatatttattttagtagtttgtcagactaaaaacccaagtatataataaactcctttaggacaagtactgtgtcctaatcactatcttgtcaacacctaatagtctggcacatgatagtcaacagaacaaagccataggaataatttagtaaagaattcaacttttaaaaactataagaaatataaattattggctgggcgtggtggctcatgcctataatcccagcactttgggaggctgaggcggtggatcacgaggtcaggaaatcaagaccatcctggctaacacggtgaaaccccgtctctactaaaaatagaaaaaattagccaggcgtggtggcaggcgcctatagtcctagctactcaggaggcgggagaatggcatgaaccggggaggcggagcttgcagtgagctgagatggcgccactgcactccagcctgggcgacaaagcgagactctgtctcaaaaaaataagtacataaaaattatttcactgacgagaatttttaaagcgccgttattttccaccccaagttggagtctttataccgtgggtcttgccaaaacnnnnnnnnnnnnnnnnnnnnnnnnnnnnnnnnnnnnnnnnnnnnnnnnnnnnnnnnnnnnnnnnnnnnnnnnnnnnnnnnnnnnnnnnnnnnnnnnnnnnnnnnnnnnnnnnnnnnnnnnnnnnnnnnnnnnnnnnnnnnnnnnnnnnnnnnnnnnnnnnnnnnnnnnnnnnnnnnnnnnnnnnnnnnnnnnnnnnnnnnnnnnnnnnnnnnnnnnnnnnnnnnnnnnnnnnnnctcaaactcctgacaggtgatctgcctgcctcagcctcccaaaagtgttgggattacaggcgtgagccactgcacctgtcctgccaaaaactctttgagcttcagaatgttgtctgtattaaaatgaaaatacagctctggagttgcatgaagttgcttttgaatattttatgaaagtaaagaatttagggatcatgccactgcactccagcctgggcgacacacttatttttgagacagtgtctcaaaaaaagaaattaaggatcagcttttcaaaaagtgaaaaggccattgggctttgataggaattgcattgaatctgcagattgctttgggtaattgccatcttaacaatactgtatttcaatccacgagcacagaatgcatttccacttatttatatcttgtttagtttctttcaacaatggtttgcaattttcagtagttttaaatatttctaatgttttgtttccttggttaaatgtattcctagctattttgttcttttggatattgttgtaaatggaattgtttttcctaactttgtttccagattattcattgctagtgtatacaaatgcttattttgtgtgttggtcttttctcctgcaactttgctgaattaacttaatagctttagtatttattttttgtatttcggattttctgtatataggatgatgtcttctgtgcgtagagacagttttatttcttttccaatttgactaccttttcttttttcttacctaattgttctggctagaacattcagcacaatgctgagcagcagtggtaaaagtgggcatccttctcttgttcctagtcttagggagaaagttttcatctcttaccattgagtgtgatgttagctgtgggttttcttttcttttttttcttttttttttttttttgagacggagtcttgctctgtcacccaggctggagtgcagtggtctgcaacctccgcctcccgggttcaagcgattctcctgcctcagcctcctgagtagctgggatacaggcgtgcaccaccacacgggctaactttttgtatttttagtagagatggggtttcatggtgttggccaggatggtcctgatctcctaatctcgtgatccacccgcttcggcctcccaaagtgctgggattacaggtgtgagccactgtgcccggccagctgtgggttttcataaatgccctttatcatgttgaagaagttccttctaagtttggtaagtgtttttattatgaaatggtgaattttcccaagtggttttttttttttttttggcatcaaaatgaacctgtggtttttctcctttagtctataaatgtcatgtattatatcgatttatatttgtatattgaaccacactttctttgctgggatgaattctacctggccatggtgaataatcctttataattgttggttttagtttgctaatatttcatcgaggatttttgcatcaagaggagatattaatctctagttttcttgtggtgcctttgtctgaccttgttatcagggtagtgttggcttcataaaatgggttagaaagttttccttcctctgatatttactggaagagtttgagaaagatttggtattaattatttaaaggttttgtggaattcaacagtgaaggcatgtggtgctagttttgtcttcgttggaggtttttcatcgctgattcaatcactgcttgttatagatctgttcacattttctattttttcttgagtcagttttggtaatttgtgtgtttctaggaatttgtccatttcatccagtttatctaatgcactggcatttatttcggtaaggttagtggtagtgtccctgtgttcatttctgatagttatttgttttttctttttcttaatatagcttaatcatttttagctttataggtaaaggtgagtcaattttgttagcctcttcaaagaaccaactttgttttgttgattttgtttttcccttttttttttcttttttctttctttctttttttttttttttttttgagacagggtctctctctgttgccaaggctagagtgcagtggcgtgatctcggctcactgcaacctccacctcccagttttaagcgattctcctgctttagcctcccaagtagctgggatttcacaggtacccaccatcacacccggctagtttttgtattttatttttatttttattttttcgagacggagtcttgctgttgtcccctgggctggagtgcaatggcgcaatcttggcttactgccacctttgcctcctggcttccagcaattctcctacctcagcctcctgagtagctgagattacaagcacctgccactacatccagctaatttttgtatttttagtggagaccgggtttcaccgtgttggccaggctggccgcgaactgctgacctcaggtgatccacctgcctcggcctcccaaagtgctgggattacaggtatgagccaccgcgcctggccatttttgtattattagcagagacagggtttcaccatggtggccaggctggtcttgaattcctgatcccaagtgattgagatttgatttgtgtcccttaggtttagatggttgatagtgttgttcaagtctgctatttccttattgttatgtttagatgttccattattgacaatggggtattgaggtctccaactattattttattttaatttttttgaggtggagtctcattccatctcccagactggagtgcagtggcatggtctcagctcactgcaacctccgcctcccgggttcaagcaattcccctgcctcagcctcccgagtagctgggactacaggcacctgccaccatgcccagctgagttttgtatttgtatttgtattttttttagtagagacggggttttgccatgttggccaggccaatcccgaaatcctgacctcaagcgatccacccacctcgacctcccaaagtgcctggattacaggcgtgagccaccatgcccaaccttcaactattattttcgatctgtctcttctcccttcagttcaatgtttgcttcatatgttttggagatttgctgtttggcgtttgtgtctttataattcttacaatgtttttgatggactgaccttttatcaatatctaacgtcccttttttttatctcttgtaacaagttttgacttaaagtcttataaagtcttattttctgttattagtagtcacgccagctttcttttttttttttttttttttttttttttttttttttttttttgagacagagttttgctcttgttgcccagactggagtgcaatggcacaatctcagccatgccagctttctgttggttactaatgcatggaaaatatttttccatcctttcactgtaaatctcgttgtgcctttggatttaagtcacctgtagatagcatgtagttaggtcatgtttttaaaatccattctgccaatctctctttcagttggtggattaaatacatttacattcaaaatgatttttgattaggaacaacttctgtcactttgctgtttgttttctataaatttcaatctttttcccctaaattcctccaatagtgttttgtatttgattgattttgctagtattccatttgaattccctcgttttcttttctgtatgttttaaagttttatcttagtggttatcctggtgattataattaatagcttaaatttctaagaatatagtttgaattgatacaacttagctattgagttgtttgagctccttatatattcaggttatgaatccattatcaaatgggtagtttgcaaatattttttcccattctgcgggttgttttttactatgttgattattttgctgtgcagctttttggcttgatgtaatcc

SEQ ID NO: 96698 - DNA, 141454 bp, Homo sapiens
  misc_feature (1)...(141454): n = A,T,C or G
ggcaagctagaagcctgttgaagtaatttaggcaagaggtgatgatggtctaaaactagaatggtggtaagggaatttgggggaaagtggataggtttgatatttaggagatagaatctagtccttatgttttaaagatataaactgaagtatctgcagataaattgatatgaggtctagacttttctttaatccaactgaggagagagaaaatgagaaaggtggttataaatgaaacaaagactaaccatatgctgataatcattgattgggtgatggacataaaggagttccttattgtgtctacttttatatatatttgaaagtccccataacaaaaagttaaacaaaataaagtgcctgggaaatgctgaagggaaaatattcagtagggagatagacataggaaatataaatcttggagagagataagggaagagcaatgaattttggagtgaacagcagacggaaagttaattgaagccttgagtgtgaatgaaataataaaaaagagaaaagaaactaagttagaatcctgaggaatatcaacagtaacgggaatggcaaagaagtgttgttaacaagtaagcgtcatggagtccaaagaaagctttccaagaaagcagcagtggtctacattaggggtctccaacccctgggccacagtactggccagtggcctgttaggaaccgggccacacagcaggaggtgagtggagggcaagcaagtgaagcttcatctcttttcacagcagcttcccatcactggcattaccgcctgagctccgcctcctgtcagatcagcagggcattaaattctcataggagtgcaaaccctattgtgaactgcacatgtgacagatgtaggttgcatgctctttatgagaatctaatgcctgatgatctctcattgtctcccatcaccccagatgggaccgtctagttgcagaaaaacaaactcagggctcccactgattctacattatggtgagttgtataatgacttattatatattacaatgtaataatagtgcaaaataaatgtaatgtgcttgaatcatcccgaaaacatccctccacctccctgtccatggaaaaactgtcttccacaaaactggtccttggtgccaaaaaggttgaggacagctggtctctattgtcaaatgctgctaaaaggtcaaaggaaagaactggtcaacagccatatgaaagtcattggtaactctggtgagaggcacttaaggggtgggagggcaaacaggacagagagtatagtatacgtaggtttagggctgagtagaaggtgtagaaatggaaccagcctggataatacatgagttactagagggaggatgtctacttggaatgctgacttcttgaatcaactcatttgttaaaatactgctatagatgtttgatttctctaaatgacctgctactctccttttattctgttctacactctcctgccagattcaagtgtagctttgaccatcactcttatatgaaatctcccagagcctctccaatacttactgaagtctgtacaaatgtctcagactactctaaatgttcccttgtaccagccaaaggggaccgtgtccctccctcagcatgctttttgttcatactgctgcctctagttagaatatattccttttccccaatttctgtctcttgaagtcctcctcatccttcaagtccaatctcagatatggtgacaccttctccttgagctccttcctgatacacctcttctttccactggagtagattgtgtcctctatttttccaatacatgctgtttatatccctgtcctggcattcactggatttcactttgctcttaattgtctatgttctcattatatcctttctgtatccacaaattgtacattacctgaaattaactttttttttttttcctctgagacaggatttggctctgttgctcaggctggaatgtagtggcgagattgtggcttactgtaaccctggcttccttggctcaagccatcctcctacctcagcctctcaagtagctgggactacaagtgttagccactatgccccgctgaaactaacttcatcttcctcatttttgtgtctgtcacagaagtacctaacccaatatcttgcccaaaatgactttttgaattaaatgggatttctgaggctctattatttataaggcttgcaaatttatactgcattttagaattaccatgctatttagctattgccttccagatagcattctaatttttataatctttcttcatatgttctaaaaatagctaaaatttggtatttttaaactatttttcagatgtgttatttaagcttaaaagtatacttattttagtttttaaatgcatcagttatttaattaggttcttggtaagacatttagaacacctatttgctaggataaactccattcatcagagcaaacacagattacaggtagccctggagctaaggaatagctttgatttttggtaacatttacgagtccacaactttctaattttttttttttttttttgagatggagtcttgctctgtcacccaggctagagtgcagtggtgcgatctctgctcactgcaaactctgcttcccgggatcaagtggttctcctgcctcagcctccccagcagctgggattacagatgcccgccaccacgccaggctaatttttgtatttttagtagagatggggtttcaccatgttggcaggctggtgtcgaactcctgacctcaagtgatccacccgcctcaggctcccaaagtgctggggtaacaggagtgagctagcgtgcttggccacgagtccacagctttctgatcaaccttgcattgctccataatcttctattactctctttctgtgttgacgatgtcactttcccagtatttgggcttccatagcatcatcttcttaagcaagcattggtaagatgttttggaattttcacattgctgatttcaattttgtgatgacctctggtgtgtttcccacagaatgtgaatgaggaccagaggtccagtcacaattaacaagccactcctcagctgctccagtaaaaccaccctcttgcctttgtggtgcccagtgaggataagcagaatgatcccaggagagaagctagtttgcagttttctctgtgctgactgaagtgtttctgtttgttttttctgtggctcaacagcagctttccaggcacatctttggaaggatctaggcattttgtagggtttactttgcaaaaagtatcaccattcttgttgccaccaactggttttgtagcaatggcaagaaccttttcctttttcaagtctggactttcttctttttaattctggatttagtacccgagtacttcctcttgtacctggcctttttgacatagcagattgagaatatctgccaattcctctgataaggacaggatttccgctgcaggggggcttccctttctttggctttttagccttgaggtgtttttgtttgtgttttttgacggagtttcgctcttgttgcccaagctggaatgcaatgatgcaatctcggctcactgcaacctccgcctctcggggtcaagcgattctcctgcctcagccttccgaatagctgagattatgggtgcccaccagcacacccagctaattttttgtatttttagtagaaatggagtttcaccatgttagccaggctggtctcgaattcctgacctcaggtgatccgcctgcctcagcctcccaaagtgctgggattacaggcgtgagccaccgtgcccaaccgaagttatgttttaaccttgccactagcatcagccttcttggcttcacgtttcttctccttggtgtctggcttctcaactttttcccccaccatcttacaagacgggaaggagctattttttttaatacatgttggaatatcctggctatgcagatacaaatagtaatataacatccacccaaatataacattaaattttgattaaataataattaattcaaatcctactaaaagaaaacccttagggatacattgaagcttcatcatttcattcccttctctcccttccacaggtgcaactatcctggagttgatatctatctttgccaaacatgttttcatacttttatcaaacatatttgtatacataactcacacaacgcattgttttgtggttttaagattgtatataaatgatatgacactattatgtatacctttgaatttgctttttcaatcaatgtagttttcaggattcatcgttggtataggtagtataattcattcattttaactatgaaattatattccactttatgactttaccccctcttatttaatctttgctgtaatcttgtgaggtagacattattaatcccattttataaatgaaaaaatggaagtattaagagattaagtaactttactgaggtcatatagtttctagcagatggaatgagaacttgtgtagggcctgtaactcccaatcccatgtcctttctcctaaaacattcagtgattcattcaacaaatgtttactgaacaccacctatgtgccaggcacagttttaggtcctgggtatctgagagtgaacaaaatagacaagaccttgctctccaagagcttacactctaactggagagagacaataatatagtatgtccgggtgtggtggctctcacctctaattctagtactttggaaggctgaggtgggaggagcgtgtgaggccaagagtttgagaccagcctgggcaacatagcaagaccttgtctctacaaaaaataattagccaggcgtggtggcatgtctgtagtcccagctactcaggaggctgaggcaggaggatcaattgagcccaggctgaggtgagaggatcgcttgagcctgggagattgaggctgcagtgagctatgattgcaacattcattgcactagaacctgaacaacagagtaagacaatgtatctaacaaaaaaaagagggtgagacagaatgtgtatatatgttagtctatatgaggctctttggtgttaatttggcaaacacctgaaggaaaaagggcaatgacagagtggtgttcaaggcagagagtacagcaaatgcaaagttcttgaggcaagagcatatttggctgtcattccatcacttttttctttaagatactgtatcggttaactatcctcatgtaccaaagaacaaatgtaaacatactgcatgactttgagtgattaactacataactttgacatgtcaacaatctcttatggtggtcatctttccaataaattgagttgagctagaaaatgtgtattgccaaaatccattgatttactttaaaaattaaatcacaggttgcggatgcccgtaatggtggcatttccacacacagtactgttgctgatttgatgagacacaaatataatccaaccccattttcaaatattaaaagttggtagggtcctcaacgaaacctaacagtgacttcaagttgaaaaaaaatgcttaaaaggaaaaaaacagggagagcccaccttttggcctgtatctctcagaaagagggacaagagcggtgggaacgtgaggaacttttaaaatgtgagagcgttactctggggaaacctggagtttactcttggcctttactcgctggactgtcatagttctcacatttgtgaagcgagtctgggctggcggccctcaagccctatcctcccccgatgcggaagtcttgcttctctgtgcctcccaggcttgagaacagcagagtctggccgctcaaaacgaaagcttcacgaacgtcgctcgctcggtgctgagaaagaagcctgacgcgacccgggaaacttgaccgacgcacgcccgcccgcttgccccgccccctaacggcttcccggcttcccccgggtcctatgcagaaaagacgctgggcctggcaagcggggccagtagcggcttccgggaggagttttggcctccacacggctscgtcgggcgccgcgctcttccggcagcggtagctttggagacgccgggaacccgcgttggcgtggttgactagtgcctcgcagcctcagcatgggggaacatggcctggagctggcttccatgatccccgccctgcgggagctgggcaggtagggctaggcccagcctgggtcctgcatcctcctccgctgattccggcttgggtttcacgtgctctcccctcccctgctgckctatggctgggatcccctaagcccccgctgcggcccttgtggagatgctccgtggctgatttgggcgcttctccctcagagtgcccgttgatagcacatggggcagtcgccacaaacctgcgggaagccggtccgtgggggagagaggcgtctgccggccctggtttaccactcaccccgatcgagagtttgcttcctgcagctggaggaagagtccctgctgatcgctttctggtcacttttctacactcattttcttctcgaaaatctttttccttagacgagggacttgacccatcagtttctgttctttgtgatcactcgtggaggaattggtttttagccttacattttgtccccaaactgcccttgaaagaaaatcaccgcttctcattttctgcaagtgacatcacttgctggaaaaggcagtttttttctttgaagtgaagtcatagtacatactgaagatgtgacctccctcgtattgatcgtccagttcccgatccgttattttagtcagaaattggagagatagacccctgggtccacaaaatctcagcgtgcacagagtgttgccaaaatttggagacaatttaatatttcatttgcaaatgcatgttgtctgtaaacctcatgaaaaccagtatcttaccacaaggagggagaggtgttgatggctctcacacctcttcaatacacaggcaggcttccctgaaccaggcctaaagactcggtagagcttgttttgctttgtttgttttaattctacactactgcgaacaagaaataaataagcttgtgctgctaccgcagttaaattatcatttggaataactgcttcccaatttcttaaactgtttgaaaactttccacacaaagtcaaagctgacattaagccaatgggatagctacttctctttctttttgcagcgcagttgtgttcatttccactggttggccatccaaataatctagtctcaatatatgaataaaaggataaatgaagggaccattcttgtcgtaactgcatcactatttttgagtgtgtgaattttttccacttatctgtggcaagtatactttgtgtttagtttataaaataacctctacctctctaaaagaagaggaagaaaagtgatcattgtaggaagttggtttacaaatttcatctttcaggctcattgtgaagctgagtatatttttgccactttgctttaaagtagaattaactggttaatacttctcttccctcttctgtcttcctccgtgagtcctgttaataaaaataattggttcttggattatatatagtcggtttcatcagtagagtttatgttacctttcatttatttgtagctattccaagagaaagaatagaaaaactgacccacagagagttgtctaatagtttttaattgtcatggctttttcattacaactacttgaatcaaaaaagctaatcaattttcatagtatatccatgacatagaatgaaacaagtgttaccactgtttaagaaaaagggacagagaagttgaagaaccaaaggcacagctagcagataacagagctaggtttcagattcaagctttcaaggccttttcttccaaaatgtttcctcttaattgactatggcaattagactactgaaaaaaaaagagatattagtgttctaatttatgggctgctcttcctcagtccctcagataaattttgtcctattgtttttttgctattagcagtctgctctgcataatcttgctaaatgacctttccactctcctgccttcaactataatctgctatttgatgactactaatatgtttctccaaatcatgtcttctatagaattgtatatttactgtatactggtagtttcactgagtgtcctatgtgtagttaaggttcagaatatccaatacaaattccccacatgtcctagctttcacaagctttctttttttaaattaaaaaaattatttttctcttattcattgaagtagagatatctcagtacatggcaccatattcacttakttctccaaactggaaatctagaagtcattcttaactattttcacatgtgctttcagtctatgtccttggccctcttttaatctgtgctgtcttcccaagtaatcttacctaatctcatggctttaaatgtcatccatatgctgataactcccaaatttatatttctagatcggagatatatattaggttgcttactcaacatccacactgggaagtgaaaattaacatatccaaagcagaacgcctgatttactgcgcccttgaatttgttccttctcctgtgttatcgtaaatatgccaaccaaaagcctaggagtcatccttggtttttttcccttgtcgcttaataatccataagttagttctgacaaccatatgtttaagatacatctagaatctaacacttctcactgtctccactgctaccaccagaatttcttacctgaactattacagtaaccttagttgatctttccatttctacttttacctacttataatagattttccactcagtaaagtgatttttcatctattagtcatattgtaagttcccctgcacaaaaccgtcctttgacattccagcacacttaaaatcagtataaaatccaaactccttaccaaggcctctaaggttctacataatctggctcagcctgcctctgacttcatcaccttttatccctcttttgcttactttactctagtgatactgaccttgtttctccaggataccaaggctgttcctgcctttaatcgtttgctgttccttctatctgaacactggatggtttcatttagatgtcatttcagaatcaccttctctgattttcctacttgagattgctttgtagttgtaagacattttcaaatgtgatagttgctattaaaatgttaaatggaacagtgggatgtggaggaggttctgaggagcagcagcatgagccactagaggagatttgatggtgtaaagaagctagtcacgtgaatctgggatggaataggaagtacaaaggcccataagtgggaatgagcctgctttttttttttttttgagacggagtctcgccctctccagtggcgtgatctctgctcactgcaacctctgcctcccgggttcaagcgattttcctgtctcagcctccctttcctgtagctgggactacaggcttgcaccaccgagctaatttttatattgttagtgaagatggggtnnnnnnnnnnnnnnnnnnnnnnnnnnnnnnnnnnnnnnnnnnnnnnnnnnnnnnnnnnnnnnnnnnnnnnnnnnnnnnnnnnnnnnnnnnnnnnnnnnnnnnnnnnnnnnnnnnnnnnnnnnnnnnnnnnnnnnnnnnnnnnnnnnnnnnnnnnnnnnnnnnnnnnnnnnnnnnnnnnnnnnnnnnnnnnnnnnnnnnnnnnnnnnnnnnnnnnnnnnnnnnnnnnnnnnnnnnnnnnnnnnnnnnnnnnnnnnnnnnnnnnnnnctttagccacatagagcctcttacagtttccagtgcttggactaccctccctcttacccttatttcactgccttgtcccttagggagtcagttttgtatcacctcgttaaggaagccatgactgacagggccctgctcagggctgagtgtccctttgtgttctttcttgggcctgtcagttcttaaccataattacctcttgtttgtcctttaatctgcaaattattttagggcaggtgcattctgtcttggttatcctggtatttgatgcttacctcagaggaggtgcctaagctttatataatacttacattaatactcaaattttatagtatgcttttgaaaagttataccctcttagctcagttccagggtagaagtcacaaaataagaagtgctcactcctgtgagttttctttcttttttctttttttttttttttttgagactggctcacctgttgctcaggctggagttcaatagcatgaacatgtctcactgcaacctctgcctcctggggtcaagcgatcctcccacctcagcctcccaagtagctgggactacaggtgtgtgccaccatgcctggctaatttttgtatttttgtagacggggtttcaccatgttgcccaggctggtctcaaactcctgggctcaagtgatccgcccacctcagcctcccaaagtgctgggattacagacatgagccaccacgcccggccaagtttctttcttctgatagtagatctaatgaatggtaatcaatttacatttttctaaaactgatttttaaaaattacacaaataatacatgagtacataatctttacaaaatgaaactttgtaagaaactctgaccactacccacaatcctggctcctcttcccatgttcctctttgttcacatttttaaatgatacttgtgaaattactgtggtttatcataatgtctcctgactttgtctaaaacaattcatgttaccttgtaattacagattttgaattttttgttaaatttgtgatgccctatactatggtagccactagccaaatgtgaccattgaccacctcacatgcggctagtctaaattgagatgtgctgtaaatataagatacacagtgggtttcaaagacttagtaccagaaaaaagaatgtaaaagatctcatgaataatttttatatcgattacacattcacctaatatttcagatatattgttaggatcaaytgtttttttcctgtttcttttcttaatgtggctaccagaaaataacaaaattatggcttacgttatatttctattggccagcgctgatttaaataagatacatagcactaagttgttttgctttcatatgcaaatgtaactacttgttctttgattcttttttttttttaaggactttatttagtagcatatacaaacttgcttttttttttttttttttttgagatgaagtctcactctgtcatccaggctggagtgcagtggtgcgatcttggctcactgcaacctccacctccatgtcccagcgattctcctgcctcagtgccacagcttcccaagtaactaggattataggcgcccaccaccacgcctggctaatttttctatcttttagtagagaaagggtttcaccatgttgggcagcctgatctggaactcctgacctgaagtgatcagtccgtctcagcctcccaaagtgctgtgattacaggcatgagccaccacgcctggccctttgattctttgtgtctagagtttatgttacttaaaaacatttgttaatttcagtaagtttttctattaagcaagttctaggtgatgtagcagaggcaaaaagaaataaaatgcattttctctcctataagagcttacggtctaatggcactttaggacatgcagagagaaataaagcacagtctgccacctgtaggagcttatagtctagtggcagggaataggtaaatattccataggtccagaaggctgtacattaggaatgaagaaaccacaaaattcaggaaggttcttatgaaccattcattcattgaagagttgtttttttttctttaaatgtctactatgtaccaggaccagagaacagttcttttttttcttttctattttttggagacaggggtctggttttgtcaccgaggctggagtgcagtgacacaatcttggctcactgtagcctcccaggctcaagcgatcctcccacctcagcctcctgagtagctggggactacaggtgtgtgtctctatacctgctcatttttctatttcttttgtagagacagggtttcatcatgttgctcaggctggtctcaaactcctgagctcaagcagtctgcccaccttggactcccaaagcactgggattacaggcatgagctaccatgcccgaccagtatcagttcttttatggcatttattagctgtaaatgctattgatcctatatgtaatcaattaggattggactttgtggtttgaataatcaaaaaaaaaaaaaaaaaaaaaaaaaaaagtcaggccgggcgtggtggctcacgccgataatcccagcactttgggagaccgaggcggatggatcatgaggtcagtaaatcgaaaccatcctggctaacatggtgcaaccccgtctctactaaaaatacaaaaaattagccgggcgtggtggcacgtgcctgtagtcccagctactcgggaggctgaggcaggagaatcacttgaagctgcgaggcggaggttgcagtgagccgagatcacaccactgcgctccagcctgggcgacagagcgagactccgtctcaaaagaaaaaaaaaagaaaaagggccgggtgcggtggctcacgcctgtaatctcagcactttgggaggctgaggcgggcggattacctgaggtcaggagttcgagccagcctggccaacatggtgaaaccccgtctctactaaaaatacaaaaattagctgggtgtggtggcacacgcctgtaatcctagctacttgggaggctgaggcaggagaattgcttgagcccgggtggcggaggttgcagtgagccaagatcgtgccactaactgcacttcaccctggccgacagagcgagactctgtatcagaaaaagaaaaaaattcactctttttcttttaccactatttgagataataagtggggaaaatgtatgaacattttacagtgctatatagaaataaattgtgacatatatgaaatatatgctattatttataggtaactgtcttactacaccctaagttgttttgtcagaagtgatggactttgctaatcactcacacataacccactgtgaatcctctaggtagagttaatcattccctgctttgggtgtacatgatacttgcttttgattatttatttatttatttatttatttatttatttattgagactgagtctcgctctgtcgcccaggctggagtacagtggcgcgatctcgactcactgcaatctccgcctcccagattcaagcgattctcctgcctcagcctcctgagcagctgggactacaggcgcccgccaccacacccagctgatttttgtgttttcagcagagatggggtttcaccatgttagccgggatggtttagatctactgacctcatgatccgcctgccttagcctcccaaaatgctcgtattacaggcgtgagccaccatgcccggccgcttttgattatttaagtgcattcctctcctctccccagcaactattctgagttnnnnnnnnnnnnnnnnnnnnnnnnnnnnnnnnnnnnnnnnnnnnnnnnnnnnnnnnnnnnnnnnnnnnnnnnnnnnnnnnnnnnnnnnnnnnnnnnnnnnnnnnnnnnnnnnnnnnnnnnnnnnnnnnnnnnnnnnnnnnnnnnnnnnnnnnnnnnnnnnnnnnnnnnnnnnnnnnnnnnnnnnnnnnnnnnnnnnnnnnnnnnnnnnnnnnnnnnnnnnnnnnnnnnnnnnnnnnnnnnnnnnnnnnnnnnnnnnnnnnnnnnnnnnnnnnnnnnnnnnnnnnnnnnnnnnnnnnnnnnnnnnnnnnnnnnnnnnnnnnnnnnnnnnnnnnnnnnnnnnnnnnnnnnnnnnnnnnnnnnnnnnnnnnnnnnnnnnnnnnnnnnnnnnnnnnnnnnnnnnnnnnnnnnnnnnnnnnnnnnnnnnnnnnnnnnnnnnnnnnnnnnnnnnnnnnnnnnnnnnnnnnnnnnnnnnnnnnnnnnnnnnnnnnnnnnnnnnnnnnnnnnnnnnnnnnnnnnnnnnnnnnnnnnnnnnnnnnnnnnnnnnnnnnnnnnnnnnnnnnnnnnnnnnnnnnnnnnnnnnnnnnnnnnnnnnnnnnnnnnnnnnnnnnnnnnnnnnnnnnnnnnnnnnnnnnnnnnnnnnnnnnnnnnnnnnnnnnnnnnnnnnnnnnnnnnnnnnnnnnnnnnnnnnnnnnnnnnnnnnnnnnnnnnnnnnnnnnnnnnnnnnnnnnnnnnnnnnnnnnnnnnnnnnnnnnnnnnnnnnnnnnnnnnnnnnnnnnnnnnnnnnnnnnnnnnnnnnnnnnnnnnnnnnnnnnnnnnnnnnnnnnnnnnnnnnnnnnnnnnnnnnnnnnnnnnnnnnnnnnnnnnnnnnnnnnnnnnnnnnnnnnnaaatatttgcaaatcatatgtctgataaggagtttaatatctagaatatattaagaactcctacagcttaacaacaaatataacctgatgaaaaacagaaaaagaacttgaatagacatttctccaaagaagatatacaaatggacaaataagcacatgagaagatgctcacaattactaatcattagggagatgcaaatcaaaaccacaggatactgtttcacacccattatgatagctattaataaaaaaacagttggggctgggcatgttggctgatgcctgtaatcccagcactttgggaggctgaggcaggcggatcacgaggtcaggagattgagaccatcctggccaacatggtaaaaccccatctctactaaaatacaaaaaattagccaggcatggtggtgcatgcctgtagtaccagctacttgagaggctgaggcaggagaattgcttgaacccgggagacagaggttgcagtgagttgagatcatgccactgcactccagcctggtgacagagcaagactctgtctcaaaaaaaaccaaaaaacaaaaaaaatcccacaaaaaaaaaacacagttgggcatggtgactcatgcctacaatcccagcactttgggaggtcaaagcaggcagatcgcttgagcccaggagattgagaccagcctgggcaacgtggtgaaaccctgtctctacaaaaaatacaaaaaattagctgggtgtggtgacatgcacctgtggtgccagctactcaggaggctgaggtgggaggatctcctgaggctgggaggttgaggctgcagtgagttatgggtgcaccactgcacagtaacctgggcaatagggttagaccctgtcgccaaaaggggaaaataaaataataataaaaaaacacccagaaaataacgtgtgttggtgaagatgtggagaaattggaacccttgtccactgcaggtgggagtgtacaatggtacagccactgtggaaaagggtattagcgttccaccaaaaatttagtttttatgtgcttcagaagggaggaagtgaatgctaattggtccataggcagtcatgggtgggcctggaaaaagcaccctaagttctcgctgtggtccgtgtaactggcagccaggcttccaggcttcaagctgttcctggcttgaaggtgggtcttcactggggacccacccctttcctcccaggagcctacttcctgctgccatcaacctgccacccactacaccgaggctgttcgtgccgaggggcgcctgcaggcccatattgagctgccctcagcctaccgcttggcctgcccaaagtccagagggagatgaggcagcagggggctggtgtgtcagtgccgtcctgagcacatgcacacgcggcctggtcctgacaacacctgggctccccmacaactttgctccgaaattggtgtgggtgccgggagcggggagaggccaggcagcgggagcaggcatttccaagtctgtgagggcagggggccttcccggccctggaaagagcagggatgcctgggtttgcagccgtggttgggcggctgcagctgcacccaggatggctgggctcccgaccctgcaactcggaagggggcggggcttccacctgtcttgcacctcagaagggggcggggcttctgcccactagcgccctggagagagcagccctagcaccaccttcctcaccgctccaamtgggctgccactgccatcaatagcacatttcaatttgtactaatcacatttcaagttctccctagttacttgtagctagtggccaccatattgagaagttcaggtctaggctttgctgattggatctctttagtattacttagcatattcttttttttcttgtaagttggtaacatattcagattttcttttcaatttttaaacagaagaatactgtgaatatcaacattgacactgaacacatttgatgagttctactttagagaaattttttttgcwaatgaaactgagtcactttaaggattaaaagcttttaatttgtattttagtgccacaccagaggaatataatacagttgtacagaagccaagacaaattctgtgtcaattcattgaccggatacttacagatgtaaatgttggtaagaaaccaattatttcttatataaactttataaattagacttttcttttccatgtataaattatagtagcattttctccatgtagttttagatatggagtatttatgatagttactattttcaagcaagttatttgttaatcagtattgcttattgcttgttacaaaatttgaattaggcttttaaaataattctcttttcctgtttgttatctagattttctactgcttgctatgagttctttaatattggatattatatgtaaaaatatttgtccagtaccaatcatgtggaccctattttggttagctgttatgccagtggtagactaatagcaaatgccacccaaaaaaacctctttaagtaagttactctttaagtaggttcatgcctgtgcctataggagattataggattatgtgagttactgaatcaattattgcctgtttgtgccaatctgctagacagaatattaccaacctggcaagatggtgtcacatttgtcatatctgttgaaattacatgggagggataatataaaatggcattaggctcagggtttataatttggattccaaatttggcgcagattttatgacttagactagccattaatcctttctttttcaatcagtaaaatgatgggttgctgaaaaataacaaaggactactgaatacttacaagatgtgtttttgtatcgtattcatattccctccgtttagactacttgcccttcccctctctgaccaactcctcatctaggaatcatttccttcacagtgtcctcccagatacctgtttctccttattctggattagtgctgttaccatattgtattataattattagttggtttgtttggcgccccactggattgtgagaacttttttttaatccttagattttagcattgcctggcatattattcctgaagtacatgtttgataaatagatgtatggtagaggaatgcatgtgatttttaaacatttaaaattagataagactgtagtgttggctgggcacggtggctcacgcctgtaatcccaacactttgggaggccgaggtgggtggatcacctgaggtcaggagtttgagaccagcctggccaacatgacgaaaccctgtctctactaaaaataccaaaattagctgggtgtggtggcacacacctgtagtcctagctactcaggaggctgaggcagaagaatcacttgtaccccggaggcacaggttgcagtgagccaagatcacaccactacactccagcctgggcaacagagtgagactgtgtctcaaaaaaaaaaaagactgtagtgtttagccccatcaatttagcttgaatgttgttgagtgctgtgctggatataattctggtcaccaaagtctggttccccacccccaccccactttttgtttttttttttttaattttaagagacagartcttgctttgttccaggctggagtgcaatagtgtgatcgtagctcactactgccttgaacttctgggctcaagggaatcctccagcctcagccccctgagtagctgggactataggcacactaccactcccagctaattttaagaaaaattttttttgtagagacgggatcttgacatcttatccaggctggtcttgagttcctgggctcaggtgatccgcccacttcagcctcccaaagtacaggggttacaggagtgaggcaccttgcctggcccacagtctggtttcttaacaaaaggaccattgtttaatttgtcatgactctttaaaatgaatcttattgttttagttgctgtagaacttgtaaagaaaactgactctcagccaacctccgtgatgttgcttgatttcatccagcatatcatgaaatcctccccacttatgtttgtaaatgtgagtggaagccatgaggccaaaggcagttgtattggtaagtgctgttattcatgcattcacttgccatctgttctataaaatcctccttttactgctcttctgaaatattacatrtacaggattatacttttttgggtcagctttgctataaattgaaggagcaaaatggtaatggttatttttccttcacatatccttattgttttctttttagtattgtatactaggtacttagaaataatcaaatttgtttatttgccattgaacactttggcatggttttcttttttctgtttttggtaatctctttcttctagatcagagcttggcaagctgtagtccacagggtggctgcctgtttttgtgaacaaagttttggtgttttgttttgtttcctttttttttttttttttttttttttttaaataagacagggtctcgctatgttgcccaggctggtcttgaactggtagactcaagggatcctcctgcctcagcctcctgcatacctgggaccataggcacatgctactgtgcctggcttcagtttttgtaaacaaagttttattagaacacagccatgctcattcttttacttattggctgtgactactacaaaggcaacttgggcactcaagccaaaaatattactatctggtcctttaaaaaaagtttgctgaccgctattctatatattgaagcttttctctaggcttattctttattgcacctactacttttgtcccttcattggkgtcttcataaagagatgcaaaataaacattttttttgtataatggataaagtattttaaaattttttgttcaaactttaactcaactttgatagcatgtcctccaagaagtttttttctgagcactacttctaactgcttagaactggcttggttattcctttattctctcttagtactaagtgttctgcatttcatctatcatagaggctattaaactgtgctctaatcattggtttgtctatattctttcctacagtagtttttaaactacaggtcataacccactagtgggttatgaaattaggcaattatcagcatttaaaacaagatgaaataaactagaaaatatcataggctgggcacgatgtctcacgcctgtaatcccagcactttgggagttcgagaccagcctaggcaacatggcaaaaycctgtctctaccaaaaccaaaccaaaccaaaccaaaacaaaacagaraaacattagctgaacatggtggcacatgcctgtggtacaagctacttggaaggctgaggcacactaattgctttagcctgggaggcagagattgcagtgagctaagaccatgccgttgcactccagcctgggtaacagagtgagaacctgtctcaagaaaaaaaaaaagaaaatattatagtacattgtatgtaataagagtaagtactatttaatgaaccttttgttttaaatatttaaataaaatgcatgtatatgtactgggtcatgatataaaatgttatttctttgttgcagtcaaaaagctcaagaaactgtactgtgagattcatgaggacaggactatgactgatttattcttgtgtacctgagacagagtcaccactcaaattttagttgaaagaatgacaatagctaccctttattgaacatttattttactttggaactgtgctgagtatttcatgtgcattttcttatttggtcctcacagtaacccataacatagatagcattattctccttatacatgaaattacagaggttcagagaaatgaaaagtttatacaactagtaagtggaaagctaggaccttgcctgtctgactccaaagttgttacaggcatacctcagaaatattgtgggttcagttccagaccactacaataaagtgaatattgcaataaagtaagtcacatgaattttttggtttcccagtgcatataaaagttatgtttacgttgtaccttaagtgtggaatagcattatgtctaaaaaacaatgtatgtaccctaattaaaaatactttattactaaaaaatgctaacgattatatcatccttcaacaagttgtaatatttgtgctggtggagtgtcttgccttgatgttgagggcctttctctggattaggctttggcttaagggaatgttgtggctggtttgatcttctttttttcctactggaaatttcctcatcttttaacgatttgatcttctattcagagtacaaaaactttctccataccagcaataaggctgtttcactttctcatcaatggtgcgttcagtggagtagtacttttaatttcctccaaaaactttttctttgttttaacaagttggttgtttggtgaaagaggcctagctttcaacttgtcttggctttcaacatgccttcctcagtaggcttaatcatttctagcttttgatttgaagtgagagatgtgtgactcttcctttcatttgaacacatagaggccattgtaagggttattaattaacctaatttcaatactgtgtctcagggaatagggagacacaaggagagggagagagatggggaactgctggtcggtgggtcagaacacatacatttatccattaagtttgccaccttatatcggtgtggttcatgacagctccaaacaattacaatagtaacatcaaacgtcactgatcacagatcaccataacagatacgataataatgaaaatgtttgaaatattttgagaattaccaaaatgtgatacagagacatgaagtgaccacatgctattggaaaaatggcactgatacacttgcttgatgcagagttaccacaaccttcaatttgtgacaaatgcagtatctgcaacgtgcaataaaactgggtatgcctgtgttctaaactattatgtttccattgtgaagagaatgttttacactcttgttagtgaagtttattctttaaaagtcaatcgtcaaggatttagcaaatgaattagcacttcggatatacttgtttatttaatatyttttttgtttatttcaaagaattcagtaattggatcataacgagacttctgcggattgcagcaactccctcctgtcatttgttacacaagaaaatctgtgaagtcatctgttcattattatttctttttaaaagcaagagtcctgctatytttggggtactcacaaaagaattattacaactttttgaagacttggtttacctccatagaagaaatgtgatgggtcatgctgtggaatggccagtggtcatgagccgatttttaagtcaattagatgaacacatgggatatttacaatcagctcctttgcagttgatgagtatgcaaaatttagaatttattgaagtcactttattaayggttcttactcgtattattgcaattgtgttttttagaaggcaagaactcttactttggcagataggttgtgttctgctagagtatggtagtccaaaaattaaatccctagcaattagctttttaacagaactttttcagcttggaggactaccagcacaaccagctagcacttttttcagctcatttttggaattattaaaacaccttgtagaaatggatactgaccaattgaaactctatgaagagccattatcaaagctgataaagacactatttccctttgaagcagaagcttatagaaatattgaacctrtctatttaaatatgctgctggaaaaactctgtgtcatgtttgaagacggtgtgctcatgcggcttaagtctgatttgctaaaagcagctttgtgccatttactgcagtatttccttaaatttgtgccagctgggtatgaatctgctttacaagtcaggaaggtctatgtgagaaatatttgtaaagctcttttggatgtgcttggaattgaggtagatgcagaggtaagtaatttttcaggttactagttaagtatgtattttgttcatcatttaattgtatacatatgtgcaaaatgtaataataagaaaatagaatatctttaatagtaatttatatttggaacataatgattttcatagtgtagtctggctcactattatggacttttactttgatttcagaaggatttgttcattaagttggtaatgaactgccaatggagtagaatgtttctaagtagaatctgtgaagtgtaaatgtatttgttgcattattaattaaaagggggcagttaccaacttaattgcagaagctttggtcaatcagattatgtgtctgacaagttataatcaatcacttttagaaaacctatgaatgattaatcatgccaaattatgcgcttttttctatttggactgtgggagtcaggtaatacaataaaatcatcagagatgcagtaacttgattaaatattttagtttattaatcttgctggattaaagttacatgaagaaagttggtaattcccttacagaattttttataagggaattaaaatttatagcattttggtaagaggaaaaacaggatgtagagagaaggatttgtttaaaccttctaagactatagaaccatagtctatatatagacttaaataatatagatcaatttagatgtttattttgctttaygagactctaaaagtagtttcactagaaaacacctaacatctaatacattcttgctgcctatgmataatataaatatattttctaaggaatatttctggaaattattttttattttctcagtacttgttgggcccactttatgcagctttgaaaatggaaagtatggaaatcattgaggagattcaatgccaaactcaacaggaaaacctcagcagtaatagtgatggaatatcacccaaaaggcgtcgtctcagctcgtctctaaacccttctaaragagcaccaaaacagactgaggagtatgatgaccttcattcagtttgtatttagccattaaataaaactttgttcacttttaaaaatcagctttagttaagtgctttgatttaaatacacaaagaacatctttctaaatgtagccaagggagtgcttaaaatatttttataattattgtagacggttagtagtataaaacatttcatggttaaatatagttactttgcatgtttttatatgcttatctaatttaactttttaatatgtgaaaaatctttgagactgtgcatctattagcaatttttaaaacrttaaccaactattttttataaagtggctaagttgccatatttcagttacttctgaacattgttttaattgttttaaatcttagtataaatttcaggctgggcgcggtggctcacgcctgtaatcccagcactttgggaggccgaggcgggcagatcacgaggtcagaagatcgagatcatcctggctaacacggtgaaaccctgtctctactaaaaatacaaaaaattagccaagcgtggtggttggcgcctgtagtcccagctactcgggaggctgaggcaggagaatggcgtgaacccgggaggcggagcttgcagtgagccgagatggcgccactgcactccagcctgggagacagagtgagactctgtctcacaaaaaaaaaaaatttttttgaatagttgatattacatagtatgttttattctaaatatgtttcatgttttaaccaaatttatattgcatatgaatatctctctactatattcataattatagaattaaacatgtggacatgaaccaaaagagcatattatggagtgcactgaaacagaaagctgaatcccttcagatttcccttgaatacagtggcctaaagaatcctgttattgagatgttagaaggaattgctgttgtcttacaactgactgctctgtgtactgttcattgttctcatcaaaacatgaactggtaaaacaaacttcttgtttcttggggttgggtttcctgtaatgaacttggatttactgtttactcattattcacttgactcatgtaaccttagaacacaaacttttcactgaagtagttaataaatttattttctattgagtcaaatgctaggtacggtgctaagcactgtatatatcttagttaatatttacaatagtcctgtaaggtaaaggctattatgcctattttaaaaattagaaactgacactcagagaaactgaggctcttttttgtctgaagccaaaactgactttcctggggacacatgattagaaagtaccagaacacatttgtgtacaactcaaaacccagtgtttggctgttgaagacagggtctcgctttgtctcccaggctggtgcacagtggcatgatcatggctcactacagccttgatctctatccggggctcaagtgagcctcccatgtagctggaactataggcatgtgccgccacaccctaatttagaaaaaattttttttgtagagatgggtttccctatattggcccggctggtctcaaactcctgggctcaagtgatcctcccacctcaggctcccaaagtcatttggttcccaaatcctaagggtgatttaagctgacataaatagattcaacttaaaatagtaataacatattacttgatttgcatgtttactttaaattgttatagataaatttcgtactcacaatttcttttggctttactacaattttatgtttgactataacaaaattcatcttaattccaatgtttttaacaaaatgtacttactgcagccgtactttcaaggactgtcaacataaatccaagaagaaaccttctgtagtgataacttggatgtcattggatttttacacaaaagtgcttaagagctgtagaagtttgttagaatctgttcagaaactggacctggaggcaaccattgataaggtggtgaaaatttatgatgctttgatttatatgcaaggtgagtacaaattagcaacagatcagaataacctttaaagataatcagtatagaaatatgctttcttttttgcctgaagcctaagtgcgtgtttggaatactcagaagttttttcctgatttcagttctattaaatttgtcaataatagaagttctgagttgccaatttatgtgcataatattttgattctttagtcaatagaaattatttataacttcaaagttttttaatttgggagtttgaggaatgccgtgattcttctttaaaacaggcatagataacatgtttttataaagtcacatttaatttctttgggttcacagacctcagaccatcgtttatagatctctgtgttaagaatttctgcttatccaatgatcattatgatagtatttcaaatgtctttatttttatttaaaagagatatgattaaggaaaagttataattaatgacttattttgtgcttctgtagtaaacagttcatttgaagatcatatcctggaagatttatgtggaatgctctcacttccatggatttattcccattctgatgacggctgtttaaagttgaccacatttgccgctaatcttctaacattaagctgtaggatttcagatagctattgtaagtgctcacaagaatgtgtgnnnnnnnnnnnnnnnnnnnnnnnnnnnnnnnnnnnnnnnnnnnnnnnnnnnnnnnnnnnnnnnnnnnnnnnnnnnnnnnnnnnnnnnnnnnnnnnnnnnnnnnnnnnnnnnnnnnnnnnnnnnnnnnnnnnnnnnnnnnnnnnnnnnnnnnnnnnnnnnnnnnnnnnnnnnnnnnnnnnnnnnnnnnnnnnnnnnnnnnnnnnnnnnnnnnnnnnnnnnnnnnnnnnnnnnnnnnnngccttgtgtggtttgttttaactcatctctatataggacttctaagacttatttatatttttttcaataattaaaagagcaggtacatttttaatagttcagaagggggttagatacataaaaagtaacacataaaagcctgccccacatatcccatttcctttctttttgtaaaacatttgcaatgtgtccttacatatcattatcttcatttaataaaattaggaagtatttgagaaatattttaaaaagaagaacaatataccaaaaattcttataccaacttctcagtttaagaaatagaaacattaggccaggcacggtggctcacgcctgtaatcccagcactttgggaggccaaggcatgcggatctcttgaggtcaggagcttgagaccagcctggccaacatggcaaaacctcatctcttctaaaaatacaaaaattagccaggcatggtggctcacgcctgtagtcccagctactagggaggctgagatacaagaatctcttgaacccaggaggcagaggtttcagtgagccaagattgcacccctgcactccagcctgggctattagagatatgatggaagcctttgtccctctatgatttcattcccctcatttttttccccagagattactactgttctgaatttggtgttgattgttctgttgaatgttctattacttttactatatatgtatttatttataaataatataagaaattgttttgcttcttacagcttacattttgttgatcaacactatctttatgagacttatccatggtgatatgggtaactctagtttttatttaaacttccaaatagtagccaaatttggatggacactatcagacctcctattggtggacaatcaagttgtttccaacttttcacaattacaagcaacatttaaatgaatatttttataaatgattctttagtcattctaagtccttgctgtttgaaaagtatgctccacagaccastagcatcgccaccatttagggacttgttagaaatggagcgtctttgattctgctgaaagagcacattaaaaaaaaagagagagaaagaaagaaatggggaatcttatgctccacccagacctactgaatcagaatctgcattttaacaagataggtgattcatatccatattaaagtttgagaagcattattttaacgtttttacctacctaggagtagtattgttgggttatagagtttgcacatcttcacctctattctgctgtattgttctccaaagatacaccagtttacactcctgttagcagagtatgagttccacatcctcactgacacttagctgactttaaaatttttgctatctagaaaataaaaaatgtcatggagttaagtatcttaaattttttctttttcctatctggtaggtatgattttcaatttgcatttccttgattatttagtaaggttgtgtatagacctttttcagtgcacttgctttattttctgaaaaggagcttttaattaaattaggtattaaatgtattttaagtgttacttgacttttatttatatatatgtatacacaaatgttactttacttatatatatgtatatgtgtatacataaaattaacattagtagaaatcttgtttaatagacttaattttttcagcaccacaggcacaatcacgatgtgtgtttcttctgactctgtttccaagaagaatattccttgartggagaacagcagtttacaactgggccctgcagagctcccatgaagtaatccgggctagttgtgttagtggattttttatcttattgcagcagcagaattcttgtaacagagttcccaagattcttatgtatgtactaagattttaatttgaatatatcactctattggaaagatcataattgtctggctatgtatgcagggttgtgtttattgttgaatatgtaaagcaaatgttgcttttagttttagaatttaacattttttccttctaggctttgttttaccagtacttttgtcccaaattaagcaagactatttagaccacaaaattaggcaagaaagtttagtactttttcttttttttccccagagataaagtcaaagatgattctgacattgtcaagaaagaatttgcttctatacttggtcaacttgtctgtactcttcacggcatgttttatctgacaagttctttaacagaacctttctctgaacacggacatgtggacctcttctgtaggaacttgaaagccacttctcaacatgaatgttcatcttctcaactaaaagcttctgtctgcaagccattccttttcctactgaaaaaaaaaatacctagtccagtaaaacttggtgagtgattatgacttatttaatactttaaaacctatttaagctctgcttttcaaatcagtaaaagaattagactgaagccttgaaaaattacaggaagttacatgctttatagattcagtgctcagtattgattagttataaatgggataactggtattagatcgcatcacaaaactggtagragaggtgattttgggatttttcgaatactcttgtgatttgacagcctaaatggggcatacctgatggttgtttcaatattgtaagattcaatattagattatcttctttagtgataccagagatcgtcttaatgtgccccctgttacaaccttggaccttgagaacttcaaatagttaaattactttgcccaactgaggactatagagtgtatcttcttggccactttccagtggtaatggagtataaatttttatgaagtatgagatttatacaaatacttagaagatccatttgtttaggtagtaagttgaaacttgttctgaagtttcaatagaaactttctattgaaagcaatagaaagtactccctaaatcttgtaatgtaaggttaacaataaagctaagatccccttgagaaatgtgcttttctttttttctttttttttttttccccgagacggagttttgctcttgttgcccaggctgaagtacaatggcgccatcttggctcactgcaacctctgcctcctgggttcagacgattctcctgccccagcctccggagtagctgggattacaggcgtgtgccaccaggcctggcaaatttttgcatttttagtagagacagggtttcaccatgttggtcaggctagtctccaactcctgacctcaggtaatctacccactctgtcccccsaaagtgctggggttacaggcatgagccaccatgcccggcctttcttctttctttttttttttttaagagacagggtcttgctctgtcacccaggctagagtgcagtggcgcaatcatggctcactgcagtctgcatccttgatctcccaggctcaagtgatcctcccacctcagcctcttgagtagctggaaccatagtatgtgccactacacccagctaatttttaaattttttgtagagagggatctcactttgttgcccaggctggtctttgaactcctagcttcaagtgatcctcccaccttggcctcccagagtgttgggattacaggtatgagtcaccactcctggcctgcaatgtgtttttaagtttatcttggtaacatataatggtctacaaaatctgaaagagacttgttattttataacaattctggaaattattttagatttaaattatttataggctgagtgcagtggttcgctcctttaacaccagcacttcgggaggccgagacaggcggattgcctgagctcaggtgttcgagaccagtctgggcaacatggtgaagccccatctctacaaaaaatacaaaaattagccaggcatggtggtgcatgcctgtggtcccagctacttgggaggctgaggtgggaggatcacttgaacctgggaggtcagggctgcatgctgcagtgagccgtgatcatgccactgcactccagcctgggtgacagagcaagaccctatatcaaaaaaaaaaagtgacatttattaaatataaagtaattttaatttatargtatccattttaatttcctaaaattctgtgtgctatacatacttaaatatgaaacattgacattataagagaacttaggattcttcatggcatattatttgttgacaatatttttacagtacarccttgacatttaatatgttaaattaggtattgtatactcttgtccttcagctttcatagataatctacatcatctttgtaagcatcttgattttagagaagatgaaacagatgtaaaagcagttcttggaactttattaaatttaatggargatccagacaaagatgttagagtggcttttagtggaaatatcaagcacatattggaatccttggactctgaagatggatttataaaggaggttgataatttttgtttttaacatttgagtttacgtcaacctagctctaaaaatttctttaaccagttaattttattgttctagcttttgtcttaagaatgaaggaagcatatacacatgcccaaatatnnnnnnnnnnnnnnnnnnnnnnnnnnnnnnnnnnnnnnnnnnnnnnnnnnnnnnnnnnnnnnnnnnnnnnnnnnnnnnnnnnnnnnnnnntttggccattctccatttttatttgcttgctgttaaaaatggtgatatgatatttgtgatattatagacaaaatgtgagtcaacatgaatttatttgtagatttccgtttgtttctgggatattggagatatatatgtgtgtgtatgtgtgtgtgtgtgtgtgtgtgtgtgtttgtgtattcatatgtatgttgtttttaattttagggccgcaaaaggagatttggtaccatttgcactcttacacttattgcattgtttgttatccaagtcagcatctgtctctggagcagcatacacagaaattagagctctggttgcagctaaaagtgttaaactgcaaagttttttcagccagtataagaaacccatctgtcaggtaagagtcagcgtttgtctggactataggcaacagcagtactttttaagagttacaaaaaagaagaatatttatacatgttttattttgcttgcttttcttttttcttcaatttatattttaagttcaggggtatattgcagcatgtagaggtttgctacataggtaaacgtgtcgtggtggtttgctgcacaggtcatctcatcacctaggtataagcccagcatgcattaactattatttctgatactctcccttcccccacccccctgacaggccccagtgtgtgttgttccccccatgtgtccatgtgttctcatcattcagctcctacttataagtgagaacttgtggtgtttggttttctgttcctgtgttagtttgctgaggataatggcttccaattccattcatgtccctgcaaaggacatgatcttgttcctttttatggctgtatagtattccatggtgtatatgtaccatattttcttcatccagtctgtcattgatgggcatttaggttaactccatgactttgctttttttttttttttttttgagatggagtattgctctgttgtccaggctggagtgcaatggtgcaatctcagttcactgcaaccttcacctcccaggttcacgtgattctcctgcctcagcctcccaagtaactggtattataggtgcctgccaccatgcctggctaatttttgtatttttagtagagatgaggtttcaccatgttggccaagttggtcttgaactcctgatctcaagcaatccacccgtctcagcctcccaaagtgctaggattacaggcatgagccactgcacctggccaactttgctattgtaaatggtgctgcagtgaacctacatgtgcatgtatctttactatagaatgatttatattcctttgggtatatacccagtagtgggattgctgggtcaaatggtatttctgcctctaggtctttgaggagttgccacactgtcttccacaatggtttaactaatttagactcccaccaacggtataaaagcattcccttttctcggaaaccttgccagtatctgttttttgactttttaataatagccattctgactggcgtgagatggtatctcattgtagttttgatcagtgatgttgagctttttttcatgttcgttggctggctgcatgtatgtcttctttggagaagagtctgtttatgtcctttgcccacttttgtttttttcttgtaaatttgtttaagttctttgtagactctggatattagacctctgtcagatgaatagattgcaaacattttctcctattctgtaggttgtctgtccactgtgatgatagtttattttgctgtgcagaagctcttgagtttaaatagatcctatttgtcaatttttgctttgttgaaattgcttttggtgtttttgtgatgaaatctttgcctgtgcctatagcctgaggtattgcctagattttcttctagagtttttatagttttgagttttacatttaagtctttaatccatcttgagttaatttttgtatatggtgtgaggaaggggtccagttttaattttctgcatatggctagtcagttctcccagcaccatttattaaatagagagtcctttccctgttgcttgtttttgtcaggtttgttaaagatcggatggttgtaggtgtgtcgtcttatttctgagttctctaatctgttccatttgcttgctttttaaaagttttattttcttttttattttaaacatttcttagagaccaaatttcactctgttgtccaggcagcatacagtgacatggaatggtgtgatcataactcactgaaacctctaactcctgggcttagagatcctcccactttagcctcttgagtagctgggactacaggtgtgcaccaccacacctagctaatttttatttatttatctgtagagatggggttttagagagagcagccctattttgcccaggctgctctctaactcctggccccaaatgatcctcccacttctgcctctgaaagtgctgggattactgtcatgagccactgtgcctggttttaaaaagaaagcattgtgcttgctttaaaaaattattgttaaggctgggcgtggtgactcacacctgtaatctcagcactttgggaggccaaggtgggcgcatcacctgaggtcaggagtttgagaccagccttgctagcatggtgaaaccccatgtctactaaaaatacaaaaattaaccgggcatggggcgggcatctgtaatcccagctactcaggaggctgaggcagaagaatcgcctgaacccaggaggtggcggttgcagtgagccaagatcgcacctctgcattccagcctgagtgacagagcaagactctgtctttaaaaaaaaaaaattattgtcaaaaacgatgtattttgtttatagtttatttactataactgaaatcttgccatttttatattttaggatattggtctgaagatacaggttataaatgagggaggaaggaaatcatcttataatggtgtatagactttttagtgatagtaaactgttttacaccttgatattatgttatatgacactttgttttaaatatattcaattaatggctgaaaagttaggttatgctaaaatactgaatttatttgtggtataatccttagcatgatattcaagttttttaactaagtctgattatgtcatctgtgaaaggcagattatgacatagtctacctcattaaggttgttataaaaattgaatggaccaattcagataatgtagaatactatttgatactgccctctatggtggcttaaaaagtattagttaaaatttcttctttgtgtgaaaactcacaataaaatggtttttgctctagtttttggtagaatcccttcactctagtcagatgacagcacttccgaatactccatgccagaatgctgacgtgcgaaaacaagatgtggctcaccagagagaaatggctttaaatacgttgtctgaaattgccaacgttttcgactttcctgatcttaatcgttttcttactgtaagttgcaacatatagttcacttgaggtttgcaattcagtattttgttcattccattctagattttgactttgatatgagattattgcttatgctgtaaaacttaagtttaagtggatttgagtcattgttctttatggttagctgtcctgaaaagttaatactaattgaataatgctaatcaattcagttagctatttgagcccttatgtctttggtgctatgatttgttccgttggcaattcaaagtctaatatgatcatttctgcttctaaggtgttggaataataaagtataaaattatagtggtataaatgatctactattacatattttatagtatggagtggactccaaatatgtgtggcatttaaaaatatttttgcacatagcttatgtgaatatttttttcacccagacaaatgtactttttggtaattgttgcattctttttcagaggacattacaagttctactacctgatcttgctgccaaagcaagccctgcagcttctgctctcattcgaactttaggaaaacaattaaatgtcaatcgtagagagattttaataaacaacttcaaatatattttttctcatttggtctgttcttgttccaaagatgaattagaacgtgcccttcattatctgaaggtaattgaatatttctatatattttacttttttatataaattagcattataggaaagatgtaacattcttctaggaaagagggtgagtaaattatagcctatcctagaagaatgtaagtttaaatgttgttatgttaaataatctttgtcctgagagcatattaaatagaattctccttttgttttctttgatcatttcaccataatgggatatgataggcatcctttcatgggagaggttctcagcctatttcattatagtacttttcagttgattggagttataagttgactgatgatacacacttaattatatccataggaagaggcaatcaccttcaaatgtagtataatgtctatattttagttacttggtgttctgattacaatttggtccaggtttttggtagtttttacatttaaaattataacctgtgcttcttttttttggtgtcatattaacaaaatatctctgaggaatatgaaactacatgggaacaggaaaactatgagaaatatgcatataactttactgttttctctgatgttaatttacttaatttgtttcataatatatgccagcagcacatctctttccacgagagttagtgaatatcaaatgtatttattcatcttgagaaagtattattcgactgtatattgtggagatagaatgatagtaataagtatttatggagtatttaatacatgtcagaaattgagctaaacaattgatatggatcatttcatgcaatcctcacagttacccaatgagataaaggtactcttaattttttttttttttttttgtgatgggagttttgctctgtagcccaggctggagtgcagtggcacgatctcggctcactgcaacctccacctcctgggttcaagcgattctcctgccttagcctcctgagtagctgggattacaggtgtctgccaccaggcctggctaatttttgtatttttagtagaggtggggtttcaccatgttggccaggctggtgtccaactcctggctgcaagtgatccacctgccttggcctcccaaagtgctggaattacaggtgtgaaccaacacgcccagccaaaggtactatttttttgttttgtttcatagataaggaactaaggcagagtgaggttagattaggtaacttgtccaagtcagcatatctgataaatgacagctagaatttaaactaaagcaatctgaacagaaagactgctataagccactatactacatttcctcccagggttgtgtgtccccaataatgagttgatgatattataagaccttagagaaaactaggacttgctttttaatattttatttctaaataaagttggatcacttctcttcattacatataatccatgggagacctaccaggatannnnnnnnnnnnnnnnnnnnnnnnnnnnnnnnnnnnnnnnnnnnnnnnnnnnnnnnnnnnnnnnnnnnnnnnnnnnnnnnnnnnnnnnnnnnnnnnnnnnnnnnnnnnnnnnnnnnnnnnnnnnnnnnnnnnnnnnnnnnnnnnnnnnnnnnnnnnnnnnnnnnnnnnnnnnnnnnnnnnnnnnnnnnnnnnnnnnnnnnnnnnnnnnnnnnnnnnnnnnnnnnnnnnnnnnnnnnnnnnnnnnnnnnnnnnnnnnnnnnnnnnnnnnnnnnnnnnnnnnnnnnnnnnnnnnnnnnnnnnnnnnnnnnnnnnnnnnnnnnnnnnnnnnnnnnnnnnnnnnnnnnnnnnnnnnnnnnnnnnnnnnnnnnnnnnnnnnnnnnnnnnnnnnnnnnnnnnnnnnnnnnnnnnnnnnnnnnnnnnnnnnnnnnnnnnnnnnnnnnnnnnnnnnnnnnnnnnnnnnnnnatatcacctgaactgatggtaaggaatatgttctatgaggtttttttgtttgtttttcttccttttgcagcttaattataaaattgaagaaatcatatttttggtcattttctggctgctagccatttgtttaaattttaagttgrtatttttattttgaaaaggctgatttaaatcacgtggtcacatgcacaagatcatgaacacgagatcacgtttattttcttatagcattatcacaactttgtttacatatttacatatttagggcattaacaacatatattagcattgaaaaatgtggacttttaagtgtttttagtagattttattttttcactgaataaaaatgttgaagtttatttttctctactacttttaaattacatgtatattagaatatgtttgtagctctcctctcaccctgcccctccgactactctttccttaggtcaacaaatgaaacttttcaattctaactgtagtttaatccattattggatagaagggaagtttggaaatatgtctctattttaaatctttccctaccataaatttgtatttgaaatcactttactgtttatctatcttaaaaaaatatgtaaatccacagaattaaattattattttttctttcaactgcccttattcttgtaacagacttaaaggactgttggcaaaatattttaacccatttatgccagaggttgcaaattttttttgtgaaaaatcagactttggtgatgaccttgagcagtaggatataaataacttctacaagcttaccattccaataatggaatactagacataagttcattaagagagatttttatctctggtttctcatttcccattctagtctggctcttttctcactattccatgaaattccttttgtcaggatcaccaacagtcttctgggctattaaatctcatagtcacttctctgtcctatcttattcaacctttcagtatcattcaatacaattggccattctttcctgcgtggcatctgtgataccacattgtcttgattttcttttttgcttcactgttcactcatatttaggcttctttactggctttttccctgtaaattatctactttatcctctaaatgttagaataactcaggactatgtaactggctcttttttctcagtcatcattctctcctttaatgatcttctttgatctttttctttaatatgagttacattttgataatttttagttgaaatttcagtccagactgcctctgagcttggttttataggttaggtcctgggaggaaacagatggcatacacacaaacatttacacagaaatagtttaacaaaggggctacttttagtgacatggcaaggttaagggaaccagcaaggaatgttaaggaacccaggtactacaaaccgcagaaaacttaatgccccccttagttctgggaaaggggaagaaatagtgttactagaacctgattgagagccagaaccatgaggggggtcctctcattgtagaggaacatagccactgccagaactacctcaaaacacagacagagcaggaaatatgaataccatactctctcctcctaccctctgttctagtggtatttcctgctgactgaattcagtggaaagccagagggtaagggatcctaagtaatgcagtccggtcagtgtcccaggtacggagcagggcagaaggcggcagagaatggacctgaggatgacagaagatggcaaacagatattcaccttttcatcatctctactctcatgtcttataagcatctcaaacaattccaaatataatatgttcattagaaatctttattttccctttctaatctgtttttctcccagtctttcccatctcagtaatggtacygctatctaccagttgcatgagacaaaacctgagaagcattcgtgagccctccatttcctttatccttttataattaatgagcaaatcctatcaagtctctccaaaatatatcttttcatttctgccaccaccacccttacacaaataatgatcatctttcttgggacagctgtgaacatctcctaatggttctgtcctttcattcttccctctctacaattaattatttacacagcctttggagtgctctttttacaaactcatatcgttcccctgattaaattccttcaatggttttcattgcccttaacataaaataaaatctgtaaggcatacatgatctgcctacctttctactctcacatggtacaactcttttcttcctttctccctatatttcaacatggtttcctttgtgtttcttaaacatgccaaactttttcctgcttcgagacctaggccctggatggtctctctgcttggaataatctcctggatctttctcattctttagatttcaagagtttcctgagtaccctgtctcgactcccttaccacatttcttgtctatcacaggattgtgtttattttcttatagcattatcacaactttgtttacatacttactacttatttagtgtcttccattcatgctagtctaccttgtaagctaatgagagagaatgactctgcttatcttgtacacctgtacccagtataggattctaggcatacataataagtatttggtgatagataatatattggtaggtagataaagtcaaataattgtttgtctgagtgcaagaactttaatattggaatgttgacatagattgtgtgatccttatctgctttttatttaagcaacataggctggaaccatacaattagtgaattgtggcttaccatgccaaagttgagtctcaacctaaatcagaagtttgcagaacaaaatgcaattttagattttaaaaaccagatgatttcctgtgctaggcaagataaagatttatcctgacatctaatctggagagacttgtaggatacctcactcctctctattatatggtagcacacaccctcctacccttttcttggtaatgcatggaacctgaagatacctaaatcagatgcctcaacatcaagcagtgcaactttcttatggagttcaaaatgctttagttgctactcattcccagctcattttttttttttttttttttgctcctttcttctgcctgtacataaagacatgaaacaaaagaatattcttctttacagactggtcacattctcagtttgtagtaatatgaayaaattgatttaatacttagctatatactaagttcttagtgaatgggatttttttttttttttttttttttttttttggaggcaggattttgctctgtcacccaggctggactgcagtggtgcaatctcagcccactgcaacctctgcctccagcgcttaagcaatcttcccacctcagcctcctgagtagctgggaccacaggtgcatgccaccatgcttggctaattttttttgtagagatggggttttgccatgttacccaggctggtctcaaacttctgagctcatgtaatccacctgcctcagcctcccaaattgctgggattataggcgtgagccaccacacctagccaataaatggtatcttatttagcctttacaacaactctatgcagtaggtggttttattattcacattttacaaacttggaagaattaagtaacttatagaagatcacacattaggaagtgtcaaaattaagattcaaacctagatttggctgacttaaagcccatgccctctcctccaggaccttctcttaagaaagtattaacttggccgagcacagtggcttacacctgaaatcccagcactctgagaggccaaagcaggaggattgcttgagcccaggagtttgagaccagcctgggcaacatggcgaaactccatctctacaaaaaatacaaaaaattagctgggcgaggtggtgcgtgcctgtagtcacaggtactcaggaggctgagctgggaggattgcttgagtctaggaggttgaggctgcagtgagtcgtgattgtgccactacacttcagcctaggtgacagagaccctgtcgagagaggaagaaaagaagaggagagaaaagaaaaaagagagagaaaggaggaaagaaagaaatagaaaggaaggaaggaactctaagaaaaaagaggaggaaagaaagaaaaagaaagagggagggagggaggaaggaaggaaggaaccctgtttaagtaaaagaggaagaaagaaagagaaagagggaggaaggaagcaaaggagggaggaatggaagggaaggagggagggaggaaaggagggaggaagaaaggacggacggagggagggaggaaaggagggaggaagaagggatggacggagggagggaggaaaagagggacggagggaggaaggaaggaaggaaggaactaaggaaggaactctgtttacttcaggaaacctaaagcgtcatggatgatgatatctagtctgcaacttttgatgcccatggtcttgtgcctcttttcccctgttacttccagggatattatcccctatgtcagatcattattctggtagaataccttttccttaatcgtacttttctaccatagctctaaatgtcatagaataagggcagtcccttgtctttctctattcttttctttcttcttttcctctccaccccacatcccgacatgaattagatcctgaggatcccaccccagttcactccatgattaaaaaactcatcattttctcattgtactgtactgtttaatcatattttttcgtggtgactataaatcattcctttaaatactacatgtttctttaaatactacatgtgaagatatatgcttttggagaaacttaattaaccaagtgtttatttctaatatgctaatctagttaggtaaaatataaatgacattaattaaataattaaaatgtcaacttaagaaattcaatctgtataaagcttacatattatctgtttttatttcttaggctgattatttacaacccaaattgttgggcattttggctttttttaacatgcagttactgagctctagtgttggcattgaagataagaaaatggtaagtggtgatagttccagagtgctaagatagaattcatacagaatatagataaattctgcatctagctacaaacattcaaagatgagaaataaccaaatatgacattctctattgctgaagaactcatatacgttttttgggagtctaaaaattggaattgtattygtttcatttctttagtttaggagggatagaacacccaacccaaagtgactaaaaggaacttgtggctgtgttactaaaagcgtaaggatgatgtagctttaggcataacttgattttggactcaaaaaagttctcagagtcagtcttttggctcagattcatctgggttggctctgtacttaagagccagttaatgacctcaatggcttcaagctcacgtcatcacaacatctagtccagcatttgaagagagagactagcaatcactgaaagctcaaacaaaagttgcatcattgagtctccttggtttagattggtctggtgtgggtcatggctcatggtgtttttgaacaccagaaatcttaggttattataatgtaaagcaactttatgtttaaatgcttgtgccacagtgaagtttcattatgactgctgcaacagttggccaccgttggaaattttcgtcctataaattggagtaaaattttagatattgataaaatttctctttctgttgctttccacctctgcagtcagtaagattacaataaaaacaaacaaaaaacacctacgaatggaagcttttatttcagtgtatactctcccctccttttttttttattaaggagccaagaaagacatatgttaccatattaaattttgcaaatttcagcaaccaatgcctgttcttttggtgtcaactagtaaattcaatcccccaaccaactactattccatctacatggcttctttcctattgtttccccaattgctatyctaagggagagaatcaccttgaatctaagaaaactacagtttgtcttgtaaaccataaataactaaaatgttttggcatataaagtcgaccagagtttctttaccccttcattataaactggagctgctgataacaggtctggttctgtgtttttcatgtgtttcattttctgagtgtatcattaattatttgttttactaaattcaggacatcttgaatttaatatcattaggacaaaaatttccttaactactgattactaggaagtattccatttactacaaaaattgttatatggtctcaaatttaaatgattttaattcagtttgttttatatatgtgtatggcagtttgggatagatatgaaagaaattaaacaatatgcattatacctttaataaattagaaattgtactgttctagatgaatactgggctaaaataacaaatcaccttcaagggaaaaaacaaaaaagaactcaacttgtatttttcaaatttataattaccacataagacataagcaattggacaaaacaaactggccaacatttattcaatcttttgtattatctgagaatagatgacaccctgatactgggtgggaagcacttgtccttagggctcatctgcttctggcagcatgtttataagctttactctgaagcactacttaactctataggccttgaacagtttgatgtctttgatgaagttaatgggacccaaacatgtcagttctgtgagggtgaagatgatgaccacactgagaactggccttcgattcaaggatgattttcctgaattgtgttgcaggtaaatgactgcctgagtttattaattttttttttttttgcattttccagtagcactaacttgaattcttatctctttgagggaaattgggttcaaataataaataaggtagaaagactatttatttgtatttaaaatagaacatatttacttcttttaaaacattttactatggaagtcttttaacatactgggaaatagaagagttatcaatgaacctacatacctatttcccaactttagcagttatcaacattgctagttttttttaatccacttctacctttttgattgttggttggggtattttagagaagatcccagaatcttatcattgtgcttgtaaatactttagatgtatctaacggatgaggacatttaaaaaataaccttcatgaattattatacttagcaggattaatagaaatatctaatctaaaactcagtccttagtcacatttcctccagttgtctcaaaggtatttttcccaaagacattgtatatattatgttgtatatgaccagagatgtttgtatgtatcagagatgtttttccagagatgtttgtatgtatcatagtttcttgaattagactataaatgaagtttacatatgtgtatttggttgcctggctccttaagtgtctcttgtaaacagcctcatcccttaaattctctactcacacattttacttattttaggctgttaagattttaggatgttggatttggcgaatagctaatttaacttttccctctattttttctttcctccctgtcttttctataaatgggtacttagatatagatgcttgattagatttaggttcaatttattatgataacatacctcataggtgaggctttgtgcttctcttgtggcacagtatgagccacataataatatctggttgtccacttttagtaatggtaagattagacagtaggttttatcaacctgaatccctttattataaaattccccactaatctttcatctgatgattttagcattaattaatgatcattgcctaagtccattatttcattgcagttgatgaaataatgattttctaattttattattccttctgtatttactaggtgggattcttcttaaaacaaaattcctcataaaatttggctagccgggcatgattgtgcgtatctgtagtcccagctgcttaggaagctgaggtggaaggatcatttgaggccaggagtttgagtctagcctgggcaacatagcaggaccttgtctttaaaagcaaaacaaccatagttcatataaagcagttcataaatacttgaatatttccctttagttaatcaatttaggaatataggtttgtgctgtagcaacctccagtgaagtttttttaatatcattttgataacgtagatttttataagtttgattattttttatccattaaagtcactatccttttttattgctgaaattgtcccatcttaagcaagtagaaatcccttcaagttggcatctatgagttttgatatgacctctattaatctcttatagattctctgctttctggcatgacaagatgacctgggcttatcttgaacatttcctgcctctgactcaaaattagtgatttcttcaaggaaacctggctctggttcctttgagcccagattaattccaagcataggcactctttgggcctactgtcattgcttctaagtcttaagtgaatgtagctactagaaaatttttataaagaataggttttagaatcacgtgaagtacttattttctgtgtgcatgtgctaccaatttaacatttagttaggttcacttgtttcagtttctttaaaacttttaagggttgctttttccctctattttatttaatttaaaagttatataaaacatttgcatagtcccaaattcaaatctgtgtaacaaattatagtcagaaatctagattccaatttcgacctctacagatatctatttttattaatttttgtatatccaccctctgtaaaagaataagtaaatgcacacacacatactttttttttattattaattctgccccaaacactgtttttcaccttgcttttttgacttcacataatttggacatcactttatttgaatatatagcactgatctttattccatgtttaaagctgccttttaatctattgtttgtatatatcatgtgtcttcaactaattactgattgatagagctttacaaataataaaagtaattggacttcatttctatttgttttttcacatagagcttgggactgctttgttcgctgcctggatcatgcttgtctgggctcccttctcagtcatgtaatagtagctttgttacctcttatacacatccagcctaaagaaactgcagctatcttccactacctcataattgaaaacaggtattgtaactgaaattaatagtaaaataataactttttaaactgtatttttatgtctcaaaattactgatggtaatgtggaaactgtcacttttttgaatttcagggtttatcaataaacaaaagtaattggcatgtaattacatattgaaatgatgctatttcagttgtggcattgcttctattataattatttccaaagctcactaataggtcaccagttaaaaattacttttcattaattctgtaaatgtgtaacctaatttacctttcttttcacagtcaaaaggcagatagttgaatagcatgagaaaggttaggagagatacctactttctgcagcttaccttagttgaaacccttattacctcattgcgttaagctttgaaccagcctctcttcctttaagctttcatcacttttcttgatattgttactagaactgtgttttaaaaatatctctttattggtgtcattccagcatacaaaggcattctgagattctccatttcctaattgataaattccaaattgcttagcttgatattgaaggctttctaaaaatgtggccacagactatttcttactatcttcccccataatttttcaaaacaggcattaggctatagccagtgtggattactattgacagaacatgcattattctttcccatttgtatttttgattcaggctgctttttagactgggatgtctttttatatatttaattttttttctgtgattttacttaatgttgtatataatcattcctttgcttgtgaaaagttgggattgaagtactacttatttacctactcacccatatgctattgctggtccctttagtcagttgcagtaactgtctaatgagggagaaatcatagaagaaggaaaagttaatgtgtttttatttagttaaaatacttttatttttgatatttttatattttgtgcatgataaaacaacaaaatcactaatttagattttgggactacttttcaagtaccttttaaatttttttgtacatagtcatgtctttgctgtttattgcagaagtgtcatttctctacctttctcataatcataagaaaaatcctgaccaggcatggtggctcatgccaacaataccaatactttgggaggacaaggctggaggattgcttgaggccaggagcctgggcaacatagtgagaacctcatctctacaaaaaatacagaaacatttaaaaaaaaaaagcaaaaagagcctgtaatcctagctactgcaggctgaggcaggaagattgtttgaacccaggagtttgaggctgcagtgagttatgatcatgctgcaagatagaagaccttaagcttgctgaatgaaggcactactttggctttgtttattgttccatccccagtgactagcagagtgcttagcatgtagtagcacatagtagttatttaatatatatttattgcatgagttaatgaagactaggatttagaaatgcttatatttggacccagaaagattagagcatttattatattagaaggaaattaaaaattatagccctgacaaggattatttatgtatttttttctataattcttcatgataatttgtatattgaggtagtctttgtctgtctattgctacattccaaatcactccaaaacctagtatcttaaaacaatgagcatttttatttgctcataattttgcaatctggactgtgctcagctggtcagttctactggtcttacaagtggtcactgatgtggccacattcagggggcaggtagactgggctgggccctctctcattccgtgtagtctcacagtctgtctctctgtaccacggtctgtccatgttggtggcaacacttcttacgtagtgactcagggctctccagaacacacaaatggaaacttgcaggcatttttaacaggccccaaattggcacagtatatcttctgccacagtctatttgctaaagcaagtcacacactcagcccagcttgaagaggaagggactgtatatatgggtttgtatgctgagaagcatggtttattgtagcactattatagagtgattttcatagctttggtcattttccactaataatttagctgagcatcttagacatagttagaaaatactttgcagctcagtaatcaactagcacttttaattatgaattaaattggccttagtttcaacttttactttacatttttttagtattcatattcttggcaaataattctttttattccaactaactattagggatgctgtgcaagattttcttcatgaaatatattttttacctgatcatccagaattaaaaaagataaaagccgttctccaggaatacagaaaggtatttaatttttaatttgtggtttaggagatcattaatacagaattgttcccaagttccaatacatgaaataaagatcctttaggatcatatctagggataatatagtcctattctgatagctaattcctggtgagtagataatgctaccatgaatccatgacttttggagggaagttttagcatttagattaaatatgtaacaccattagatagaacagagagcaaaaaatacaattcttatgcctttactacccagaccaaagtgtccttacttattgtcccaaaaagaagcgctaccacagcggcacaccctaagagaagaaaggaaagctgtgggatgattctagttttgttgtgctacaaaccatgatatagaaatgtcagatgtgaatgattcctgagatttagaaggggaataatttataattccagcatcttaaatcttagtgagctctctaaaattatgaagatgttagtggtgatttcatagaacttctgggtagaaagtgggacacctgaccttaggtgtcaccttgggtagtgaaaggaattgaattacctatataatccatagacctggttcaaagctattatgtagccctttgtaaattaagggaaacttgtacttcctgtcaagaagtacttattttagagaagtaaattcttacttagttgggataaaatttttctccaggtctaacagttttacaatgaaatccctttccctcagaattactaaaaatgatttgtgctgtacaaaggaaggaatggaaatttcattactttaaaaaattggtttggtatagtttaatggtaactatatagagaattcaggcctttggaaatgggtgttaaaatagttgattaataagttctgtctnnnnnnnnnnnnnnnnnnnnttctgtctctctgtgctttgtatataggagacctctgagagcactgatcttcagacaactcttcagctctctatgaaggccattcaacatgaaaatgtcgatgttcgtattcatgctcttacaagcttgaaggaaaccttgtataaaaatcaggtatgctaatatgatataattaaaaatgtataacaaagaaagattggaggcttaaagaaaagatgacaaaatgacatttttgtttgagatttagtgaaagaagaaatttttattttacctgaattatcagatctgactgagaattaggaatccatgagatgccctttgagcttgaatcttagggatttgcagtttttgttgtttttgaaggatcatgatttgatggttatattttaggttactgcatcttcgtaagtaaacatgtatataattgtataatacagcagcagtttatgtaagtcttctcacatatttcctatggatatatgtcatatgaaatgtcagcaattttactattgtacattttgactgaattaacgttagttttaatgaagctaaatctttaagtttactttttcaaggggtgagtgaactttattcttttctttggcaacataatgtagattatccctaaacttgatgatagtgagaactggtatttaaaataccagatcactgtatatgaataaattggaaaaaatttaacggaattactcatttttgcatatctagaacccatatggtaagatatgagagcctaagaccctcatgaattttgggattaccattctataatggaagggttatatttccttccattaatagaagcaagcacttacttaggacaaaagatatacgtgatggtaatgagcacatttttctggggcagtgagtttgtataaccaatgtgggtagcagccagtgtggagatgatcccaacagaggggaggagccttgaatctcctctaggttaagtgttgtgccttcctgactatagatgtgcattatcaacgttacagcctctattcctgctctaaactacaatgaaactaccctgtgcttgcccctagccccatacctttacctggttttcaggtaactcaaaggacttttagccttttaatttaatacagagatttatgaatcacaaaggttttctcctctttgcatagaggttttctagtttaggttatttccaagcagatggcacagtcattgtctaacataaggaaacttcacctcaatcatcacttcctagatataaataactaaatctgagaattcaagaagatttcttacagtcttaaggaaagctgcagctgcctcactttgcctcctggatcacagaagataaatcatatgtggcaacttccttacaggattccttcaatgtaaagccccaatgctaatagattacctagacagaataagaagggaagtgtacttgtaggagtcttgagtactctgattaagatataatagccgtatattattatgggatttttttaaagtaagtatttaatgtagtttagcatctataactggataaatttatggcaggctggtaagaaaaactaaaggcaaggaagattggaagatccatgaggaggtaagaaaagaataaagatccagaaacacgtcttcctaaccatactccagcaggcactggcccaaaacacctaggaataaagagagaaggaaatgggttttttcccaactgtggcaagaagatagcattaaagttgaatacaattgaattaagacttccaatagtactgtccaaaggacctttctgtgaggatgaaaatattctatatctatactcttcagcagtagccactagccacatgtggctctcttgagcacttgaaatatatgctcaaacattatgttctgagtaacagaatttttaattctatttaattttgctaatttaaatttatttacttatttacttttagaggcagggtctctccagtacaggggtgtgatgatagctccctgcagcctgaaactcctgggctcaagcaattctcccacttcagcctcctgagtagctaagattacaggtgtgtgccaccatgctcacctaatttttttttttaagagatggggtcttgctatgttgcccaggctggtcttgaactcctggcctcatgcagtccccttgcctgggcctctgggagtactggtattacaggtgtgagccactctacctggcctaatttaaatttaaatagccacatgtggatagtagctattgtattggacagtgcagctctacaagttggttgaacctacaggaataccaccagagcatgaaactggcataagataagaggatgagaggccagagtctttgtagttagtactcttaagagtccatgagacaacagatgcaaaagattctgttttagaatttaaaatttagccacagggagaggaaaagatactttaagagtggattgaaaggaggtttttatttaaaaatacacctaaagttgtggtaggagtggctaaacaaatgattgggtgtaatgtagcaacaaagcaaattccaagaggtggtgataggaaagttaataagatgatcgctggtatagcattagatacttaactattttttatggaatgaccctgcaaaagccctgtactgatgggtagtcccagacagtcattgacattgaagagatgacaccttctacttatttttaaggaggaatatatatttttgaaggaatagaagacttctaagctcagtggatggcagaaaatgatttctatgtagaaaagtcagactagagatcaaattaagaaaccatataattggtttctgaagattgatactagtcaggaatccatttgataaaatcccaaaaagataactttgtaagaagccaaaataaacttttatggcaatgcagaattctaataaaatgacatttactaacgtttacacataagagaagaggctattgaaaataaaactgggaggtggagccaagatggccaaataggaacagctccagtctacagctcccagcgtgagtgacgcagaagatgggtgatttctgcatttccaactgaggtaccgggttcatctcactggggagtgtcagacagtgggtgcaggacagtgggtgcagcccacygagcatgagccgaagcagggcacttctcaaaagaagacatttatgcagccaaaaaacacatgaaaaaatgctcatcctcactggccatcagagaaatgcaaatcaaaaccacaatgagataccatctcacaccagttagaatggtgatcattaaaaagtcaggaaacaacaggtgctggagaggatgtggggaaataggaacacttttacactgttggtgggactgtaaactagttcaaccattgtggaagtcagtgtggcgattcctcagggatctagaactagaaataccatttgacccagccatcccattactgggtatatacccaaaggattataaaacatgctgctataaagacacatgcacacatatgtttattgcagcactattcacaatagcaaagacttggaaccaacccaaatgtccaagaatgatagactgaattaagaaaatgtggcacatataccccatggaatactatgcagccataaaaaaggatgagttcatgtcctttgtagggacatggatgaagctggaaaccatcattctcagcaaactatttcaaggacaaaaaacgaaacaccgcatgttctcactcattggtgggaattgaacaatgagaacacatggacacaggaagggtaacatcacacactggggcctgttgtggggtgaggggctgggggagggatagcattaggagatatacctaatgttaaatgacgagttaatgggtgcagcacaccaacatggcacatgtatacatatgtaacaaacctgcacgttgtgtacaagtaccctaaaacttaaagtataataataaaaataaaataaaataaaataaaataaaactgctagagactttcaggttgtcttaggataatggtggatgcctacatctgaatttctgtgtagcccctgaaatatcataaagagtgtcaagcagagcaattgaaaccacacataatttacaccttcaacagaactttgagacagaatattatgaacttcaaattacttgtaactaacagagatatctgtggagctcatatcttaaccttgtatggtgttgagagcgggtacgttctgatgagactgtataaaaaaagaagaaaatgaagaataggaactaagaattgatggagcaaagagaaaatcaccaacagaaagagagtcatactcttaagtgcaacattactgaaaataagtccaggatgtggtatgtcagactactggctacagggaaggtacttgaaagtatgcccaacgtttgtagtctctgaaaatcagtttcttgggagtagtaaaagaagaggagaggagaggcactcttcagagactatggcataaacagaaagaagaaagtaagagggagaattttaagggtcctgcagaagtaaaagaaatgtacaaaatcagagatgaaccaaatcctccccctgctaccagaaaaagaaaaaaaagctattcatgaagaaaactgcacttcactatgctgacgtggatactcatgaaagagaaatcctgaagccactacagaatgcttactgcagatagctgttatggagggttttctagtttagaaatttcacaatatgtgtagaaaaaatatatgtatgcaaggttcctgtaagacaaaaatagaaaatgaaaataaagtctgtgaattgatgacagttcctcctcaaaaccaaccataacatggaagaagattgaacttagcagtataactttaattgaatattttaaacaatcattttcagatataaaaaaagttgcatgaaaaatttaaaaaacaagagaaataaaaaccaagatgaaacgagggtgattgaacttaggaaagaaattgaaatgaagattaaattacaagaactacaggggagaatatatttgactaaacatttagcaaggggcattgaataaaggtataaaaaacagaagaaaaatgagataaaggagtaaaatagataaaggagtaaaaaggagtaaaaagaaaaagtagttgaaatggaagattggcaaagatttcacctgcaaataattgatgtctctgaagaataaaaccaaaacaagagaacagaattaatatttaaaattataatccaagaaagctttctggaaataaaagacctaatctacatattgaaaagacttgtatcctggagaaaattgacccaggataattaactctgagacatatcctagactttaataataaaaagtcttcaaagcttcctggccaaaaaattttttttcaaaaaattacttgcaaggagaaaaaaaagtagattggtatcagaattctcagtaggaatgtacagagtgggcctagaaaatagcagcatttttttaaaatgtcaaaaaatgtcataaagtatgagtcaagaaagagtcaagctgtccttagagtatcatgtatgagaacatggttttaaacctacaagaattgaagtaatatggttttcacaagtgatcccttcctaagagatgtattagaggatgagcttcattaagtcaagagatgactgggcagactttggcaaaaggtctgatggttactgtttatgtatttaacgaaatatataagactaaaacaacaatagggcaagtgtgggataattatatgtaaatgttatattctaataaactagaaataatgcaatttttttaaatgagagaagggggagagtaaggagtaagtaagataagctcagtaattgttgcataggcaatnnnnnnnnnnnnnnnnnnnnnnnnnnnnnnnnnnnnnnnnnnnnnnnnnnnnnnnnnnnnnnnnnnnnnnnnnnnnnnnnnnnnnnnnnnnnnnnnnnnnnnnnnnnnnnnnnnnnnnnnnnnnnnnnnnnnnnnnnnnnnnnnnnnnnnnnnnnnnnnnnnnnnnnnnnnnnnnnnnnnnnnnnnnnnnnnnnnnnnnnnnnnnnnnnnnnnnnnnnnnnnnnnnnnnnnnnnnnnnnnnnnnnnnnnnnnnnnnnnnnnnnnnnnnnnnnctgggcacggtagctcacgcctgtaatcccagcactttgggaggccaaggcaggcagtatcacgaggtcaggagttcaagaccagcctgaccaacatggtgaaacgctgtctctactaaaaatacaaaaattaaccaggcatgatggcgcacctgtaatcccagctgctcaggaggctgaagcaggagaatcgcttgaacccgggaggcagaggttgcagtgagccgagattgcgccactgcactccagcctgggtgacacagcgagactctgcctcaaaaaaaaaaaaaaaaaaaaaaaaaaaatatatatatatatatatatatatatatgataattccagaacaaaagtataaactgtcatccttacccaaataaatgattttttaaacacgaaacaggatagagggaagaaagcactaattatagtatactgtattataattataatccattgtattataataaaaaatctgacagaattgtagccaagcatctgagtcacattaataagtgtgaacaaccttaaaattaaaaaatttacaaattggcttacaaagtaagaaacaactctctaccacatgcaagatacgtacctaaagtgattcagaaaggccaaaaataaagggataagcaaaaattatccagataagtggaaagtataagaaagcaggaattctcattctgccaccaaacaaaatagaactgaagctgaaaagcattaaatatgaccaaaatggatactttttaatgcttaatgccataattcataaggaagatttaatagttatgaatatgctccaaataacacaccagccaccttgataaagccaaaataagaagcttaagaagatatatatagaaactcaatcagaggagactaccatgttattctcagtataaaataagttagtagataaatacgtagaagatctaaataacataataaagtagctattgtgaatatatgtcagacattacaccttgataatagaagcatactttaaagagcagatagaacattcataaaaattgattattgtattagttggatctttgtgttagtttgctagggctgctataacaaagtactacaaactgaatgactttaaacaacagaaacagaaatttattgtctcacagctcccatgggctagaagtttgagatcaaggtggtggcagggttggttccttttgagagcttctggtggtttgctggcaacctttggtattcttgaataaacagatccatagagatagaaagtagattaatggttgcctagggttaggaggtttgggggaaatggggagtgattgctgatgggtacagattccttttgagatggtaaaaatgttctgaaattaaatagaagtgatggttgcacttgtgatatacttcattatactaaaacttgtgaatatactaaagaccattcatttgtacaccttagaagagttaattttatagtatgtgaaacaaatattttattaaaactatttaagaaaagatagtacaggaagaaaataataaaaataaaagcagaaatatagagaacagaaagcagtaaaattaattaatgagtaaaaatgctagcaaaaaactagcgaaattggtaaatgtcaaatatgtaaataataaactgttgaaacatagaaggtatttaaaaatcacaagagactactttgtacccttttacacaaataaatttgtaaacatgtatacttttcctggaatatatagtgtatcaaaatgaactctagctgaaatagaaagcttaaaagattagtttctgtaggagaaatagagaatattataaaagaacttcatccataggaaagcaccaggcccagataaggggatttttaaatcaaattttcacaaactaaatagtctcagtggtgtttaaattgtcctggagtataggaaatgaaagaaaacttccatttttaaaaaagcggcaatatataacagtgttcagtagaccgaaaaaagatagcatgaaacaaaaaattaaagattatcatattaatatcagtgtaaaaaattataaatgaaatattatcaaacaaatcaatttcacattaagaaaacaccccatgctgggtgtagtggctcatgcctgtaatcccaacactttgggaggccaaggcagatggattgcttgagcccaagggttcgagaccagcctgagcaatatagcaagaccccatctctacaaaaaatacaaaaattagccaggcatggtggcacatgcctaaagtccaagctacttggaggttgaggtgggaggatcaccttggcctggggagtttgaggctgcagtgagccaagatcatgccactgcattccagccagggcaacagagcgggaccctgtctcaaaaaaaaaaaaacaaaaacaaacccacaataccccatgaccagttgcattttattccagtattgcaaagatggttaatacttagcaatccacgaatgtaattcactatattaatagatctaaagagaaaatcatgctattatttccatagatgccgaatagactttgacacatttcatcacctacttcaaatgaaaacactcaagaaaacagaaattgatgaatattatcttaatgtatatgtgtacatatatgtatgcatgtttatatatgtactatgtatatatatacatagtacatatatacacatacttaatgggaaacaagaaacattcccactgaaagcaaggtttcctattatctgcactatttagcgttcacttggaggtattggctaaggaatttagggaaaaaagcaatcagacataaaagttggaaaagatgtaaaactatatttacagatgatatgataatcagagacataagaattggaaaagatgtaaaattatctccatttcttatgctaatatacttcggaaattatagagaattactgataaaactaacttgaccacagatgaattcagtaaaataggggatataaaattaacataaaaattaataattttcatatgacaagtggtaactaggtagaaatttttttggaataccccatttacaatagcaacaggaaaacaatatagttgagtataaacttaacaagaaatgcatacaccaacaaaagaaaaattttaaaatgcttctgaaagacacaaaagggtaatagatttaactaaatggaaaccatcactgttttagtctgtttgctttgctgtaaaggaattatagtaaattaccctgaggctgggtaatttattaaaaagaagaggtttatttggcttatggttctgcaacctatacaagaagcatggtgccagcatctgcttctggtgagggtttcagcaagcctgagcctttactcatagccaaaggggaaggggagttggcatatcacatggtgagagagggagcaagaaagcaatgggaggagtgccacactctcaaataaccagttatcacttgaactaatggagtccagctcacacctgaactaatagagaaagaactcacttattatcacagggatggcaccaagccattcatgagggatccacccatgtgacccaaacacctgccaccagatctcacctccaacactgggggtcacatttcaatatgagatttggaatggacagatacctaagctatatcaatcccttattattgggtaggttgatgttataacgatttcagttctccttaggttaattaatggaatgcaatcccaatgaaaatgtcaccaaagttgttttttttttaactgtaggaggtttataataatgctcatatggaaaaataaaacatgtaaaaaatagctagtaaactccccctgtaaaaaaaaaggttatgagaatatagtagcccaaccaaacattaatatactttgtagccactacagttataacaaagaggtaactagtatatgaataaccagaccagtgggaaacaataggaggtctagaaatagacccaagtacatatggacatttagtatatgataaaaagtgacacttcttatctgagttttacttttaactgattaccagggtgtgtatgtgtgggggtggggaggcggtctttacagctgaattaacctgtaatgttatttaagaaatcagctattgaagattctggataagattaaatgtcttttcgtttttcttttgaaatgtattactgtaatttgtattactcattacagttctaacatggagtttgagatgctcctatacacttgacttgtgctagaaagaaaataatataaatgaagtagctttaaagtgatcacacaagtgcaaggtctaaatcttcactggcttgagaattgtttcttcttacttaacattttattcattacagcatcctgaagagatagctgaaaaaagactatttgaattgacatatttatcattaggctacctctttcttcctccctcttttccatcctcacagaacccttttttatatcttttttccttctttactagttgttatacacttttcaaacttcttgttttaacctaatagttgctcctccacttatctactgaaatatctgtccactgtcctttaaaagttactctgtgttttttcttattcattgcttctttgccgtacaagtatatttgttattgtacatatcatatgatattttagttatttgtctgttttcctcttagactgtgaacttgttaagacttgttttactgattttttgtatattgataaaatgcacagtaactgcttgtttaatggattaatgatcaaagactttcagacatttaatgattctaattgtacaggacatattgttgaactatattatgtgaactcatcaaaaactagctgaaaaaattgcagatacagaaatttaattttgtcaatatttatgttagatattccttaatatttttaagcttcctagctcaggaaaacatactagtttgtagaaattacgtataaattttctttctacttttattttaggaaaaactgataaagtatgcaacagacagtgaaacagtagaacctattatctcacagttggtgacagtgcttttgaaaggttgccaagatgcaaactctcaagctcggttgctctgtggggaatgtttaggggaattgggggcgatagatccaggtcgattagatttctcaacaactgaaactcaaggaaaagattttacatttgtggtaagtagtggaaatttggaatgacaaaagagttctctgtcctattgaggtttatatatttcatttacaaagaactattcagcttatccttaataaaagcttcacctagaaccagacaatcagttaacttctgagtttatttcttttactattgcagaaacctttagccaaaagcaataaagtttgaaccccatctagggtgttatattcttgtaaataaagcttcctaatataataatgacaatacttaaagcctaatcaattatttaaatattactttttaaacattattgctagtgtttccatggataactagtttccaggatattacagtagtaatgttttgtagtcaaatgagtttgggaactccatatagaacaaaattaaatgtgaccttttaaaaaaaatgtgacttttaatgtatctgtgtgcattgtgaatctctaagactatatctccaagagttatactatatgcgtatattaaaattattccttagaggttctcagatgactcttgggctctacagaatgcaacgtaggagatgttatgtatacattttgtgtttttttttggatggagtctcgctctgtcacccaggctggagtgcagtggtgcgatcttggcttactgcaacctctgcctcctggattcaagcgattgtcctgcctcagcctcccgagtagctgggattacaggcgtgcaccaccacgcctggctaatttttgtatttttagtagagatgggctttcaccatattggccagtctggtcttgaactcctgacctcatgatccgctctccttggcctcccagaatgctggaattagagccattagccaccatgcctggcctacattttgctttttaagggttaaaaaacaaacaatgcaaattgtcagagatatgcaaaagttgaataattttttgtacaccttagaaatagcctaaaaagctttacattttggctttttagctacagattatattgtagtcttgataccaaacttagtttgaacctcactgtcttttcctttgtctaagttaaattcacttacgcagttaagttaaattcaccatggaaaaagcagtacacctaagaaaatttatagcagttatcctggaattttcttttttttttttctgattgagactggagtagaagattcaagctttgcctatggattattgatggagctaacaagagcttaccttgcgtatgctgataatagccgagctcaagattcagctgcctatgccattcaggtaagagtggatatagtcattactggctttaaattgtttaattcaaataagaacgttgtaaattctatacttgtgaaactcctttttgttttaattctcacttttatcaaagttatacaagttcatgataaacattttagagtacagaagcatacctcttaaccaattattataggtatagttactttcaaaatttttgtatgtatatacaaatatatactactgcctcagctttgtgacttaaatgagttacttaaatcattctaggcattgaaataaatgtcctaaggatgttcacagctctaaaactataaaattctgtttatttttctatgtacaagcataactcagagatagtaggggttcagttccagaccaccacaataaagcaagtatctctataaagcaagttacatgaattcttcagtttcccagtgcatattaacgttatgtttacactatactatagtctgtcaggtgtgcaatagcattatgtctaaaaaccaatgtacatgcctttatttaaaaaatactttgttgctaaaaaatgctaaccatcttctgagccttcgcaagtcataatggttttgctggtggaagattttgcctcaatgttgatgatgctgattaattacggtggtggttgctgaaggttggaatggctgtggcaatttcttaaaaaaatcagacaacgaagtttgccacatcagttgcctttcatgaaaggtttctctgtagcctgtgaygctgtttgataccattttccccacagtagaacttctttcaaaatttgaatgagtcctctcaaaccttgccactgcttaatcaactaagtttatgtaatgttctaaatccttcgttgtcacctgaacagtgttcacagcattttgagtggaaccacagtagattccatctccagaaaccactttctttgcttataaaaagcaactcctcgtccattcaggttttatcatgagaaggcagtaattcagtcctatcttcaggctccacttctaactctagttttcttgctgtttttatcacatctctagttacttcctccactgaaattttgagcctctcagagttatccaggaggggttggaatcaacttctttcaaactcctgttaatgttgatagatattttgacttctcatgaatcatgaacgttcttaatgatatctagaatagtgaattctttccagaaggttttcagtttactctgcccagatccatcagaggaattactatctgtggccgctataaccttataaaatgtatttcttaagtaataaaacttgaaagtcaaaattaccccttgatacacgggctgcaaaatggatgttgtgttagcaggcacgaaaacaacattaatatccttgtatagctccatcagagctcccaggtgacaggtacattgtcaatgagcagtaatatttggaaaggaatcttttattgtgaccagtaggtctcaacagtgagcttaaaatattcagtaaaccatgctgtaaacagatgtgttgtcattcaggctttgttgctgcatttatagagcacaggcagagtagatttcacataattttttatttttaaattttttttacttttattgttctaattttcaatttttatgggtatatagtagacgcatatatttagatttagcctaattcctaacagccctaggatgtatggaatcgtcaatgagcattggcttcaatttaaagtcaccaattgcattagcccttaacaagagagttattaacctgtcctttgaagctttgaagccaggcattgacttctcctctctagctgtgaaagtcctggatagcatcttcttccaacagaatagaatgattttagctagatcttctggataacttgctgcagcttctctatcaatagttgcttcttcaccttacacttttatgttatagagacagcttcttttccttaaacctcatgaagcaacctctgtttgcttcaaactttttgggtttttttttgttttttaagaagcgccccttgagttgtatcacttcaaactttttttctgcaacttattctcctctctcagatttcatagaattggagagaactagggcttttctttggattaggctttggcttaagggaatgttgtggctagtttgatcttttatccagaccactaaaactttctctatatcagaaataagactgtttctctttcttatatttgatgtattcattggagtaacacttttaatttccttcaagaactttttctttgcatttatacttggctgttaggtgcaagacacctagcttttggcttgtctaggtttttgacatgccttcttcactaggcttagtcatttctagcttttgatttaaagtgagagatgtgcgattcctcctttcatatgtatacttagaggccactgtagggtcattaattggcctaatttcaatattcttakgtctttggaaatatgaagtcccaaagagagtgagggggatggaacggctggtcagaacacacaccacatttatcgattaggttcactgtcttatatgggcacagtttgtggagccccaaagcaattacaacagtaacatcaaagatcactgatcatatatcactataacagatatagtaataatgaaaaagtttgaaatattttgagaattaccgaaatgcgacatagagacatgaagtgagcatatgttgttgggaaaatggcactgatagatttactgcatgcatagtggccacaaaccttctatttctaaaaaaacaaacagacaaaaaaaacagcatccatgaagcataaataaagcgaagtgcaataaaatgagttatggctgtatttttataactaagatatgtagaacattgacgaatataaagcgttatctgcttcactgtggacttacaaatgtaaaatatgtatttgtaggagttgctttctatttatgactgtagagagatggagaccaacggcccaggtcaccaattgtggaggagatttcctgagcatgttcgggaaatactagaacctcatctaaataccaggtatgtaggcttatttaatgtattttcataaaattgtttttaattatataaaaataatgcgatttttttggccgggtgcagtggctcacgcctgtaatcccagcactttgggaggctgaggcgggcggatcacgaggtcaggagttcgagatcagcctgaccaacatggtgaaacgccatctctactaaaaatacaaaaattagccgggcgtggtggtgcacatctgtaatcccagctacttgggaggctggggcaggagaatcacttgaacccaggaggcagaggttgcagtgagccgagattgtgccattgcactacagcctgggtgacagagcgagactttgtttggaaaaaaaaaaaaaaattaatgtgatttttgatatagttttttaacattaaaagtgttttagtatctcctcatgtatatttttcactatgatttatgcttataatttgtctagatgagaagtgcagtctgctcattgggttaaattctacaactttaaatattcagataaatttattgaagttaaaaggattgatttttttaaaagttcaatggtcggtagtaaattgaaagaatatactttaagctgaatgtgagttgaattctttgataggtataagtaatacagaaatttaaagtttaaagctagtcagaaagcctttagtaggcccaattaaagattttcattactcccaatttctcctcatgaatatattttcaccctctgcttttaaaaaaatgtatttaatctcttaaaaaatttaaatgactttgttaggactgacgaaatatgcaagatgacatgcaaatacatgaagcattttatatgaaaaaaatccatacaactataaattatttctatttagaaactactttttggtaccctaggtacacatgcatattagatacttgactttggacaaataacttctttgaaccttagaaagtgcctagacttatactaacagtctttataaaagcccagaggtatgcatatttatttcctagataattttttatacttagaaatcttttaaacatcattttatgtcttatgactagcattattaaagaagtgattatttagcattattattattagccttattaaagaagaattattactgttattattattatttttgagacagagtctcactctgttgcccaggctggagtgcagtgatgcggtatcagctcactgcagcctctacctcctgggttcaagtgattctcctgcctcagtctcccaagtagctgggattacaggcgtgcaccgccatgcctggctactttttgtatttttagtagagatgaagtttcatcatattggccaggctggtctcctggccttaagtgatctgcctgtctgggcttcccaaagtgctgggattgcaggcatgagccatcacacctggccactattagcattatttaaaaagtaaagttaaagactaaagttaaaatttggattttcatttttgaggactccatacttcccccattttcttagtctgtattttgtatagcacctgtagatgtcaaagaatttctgtaatctactggaaagtttatgacctttgtagtcacacaggcttaggtttgattgttggctttgcatttgctagctctgaagtcttgggcaagttatttaacatttccaggttttaattttttaattttgaaaacatggataattttacccactttgtatgattattgttaggaataaaggagataatattaaaagtacttagcaaagtgcctgatatttagttgacactcaataataaatgcttattcaatcctagcttgcttaataagttctttgtttttggggggagaatttgtgaggttggctatcatatacttcataagaagtagaagccaacatttctgcctacttgtcatgtttttcataggaagcaacttttaagtggtcttttaaaagtagatcttaacaaagcaatggaaattcttttggtctttagcttttatacctgagcagttagaataacctctcgaatggttcctcaatgatggaagttaggagatttacctagttgggatctgcttattgaaattggagccacataaaattaagaggttgatagagtgcgttttcaatagcgttgattcccttttgtatgaaaaactaaaataccaggttagcctgtagctcaattttatagcttggactgcttgatatttactccagaggacctagggaaatatggaatttcttaaaagcatattcatatttttgctgcctttaagttatactccctactttatgtttttttttttttaatttgggctctttatatataatcactaaatctggattaaaggatggctgtatttgggagactgaaatttagaaccagatagaacaactgcagttcaaaatcaccatagaaataactttaggagaaaacatcaggttatgactaggcagagcctggcttgtatcccagtatcagtagttttctagctaagtttactataaatttgataaaaatcatccagagaactatacgcgtgatgattcaaaatagggatttgaattttttctcctggtttagtgtgatggttaactgagagattattggatttttcaactgttagaaacttggaatacagtgaaatatgtatatatatatatatatatatatatatatattatttgggtataagactttgggtatagggcatttgttatttcctaagcttttattggtgatttgaaagaaacccatgccattcaaaaaaatcctacacacaggtagccgtaagatgagagctgtgtgaacatgtttaaatgttaatgctgaggaacaaatagaaagggtcatgttgaagtaatgtgagagagaagtgatagttggtgtagtaaggaccccaaggagcatccggaatgggagagccgtggcccttatagggaattatacttagaaggaatagatctctttttttgcaatagggaaagataaaataatggatggaacacagctaagtttacagatttcattgcrggaagcaatgattttgtttttactctgtgaagtaggaggtataggagatgacctcattggctgaaagtggcaatggagttggtgtaggtgactttaggagggtggtgatggtttgaaataatcactggaaaacagaagagagccaataatgaaaacgtagaaggaattctgtaactttagcggcccactgactttgaagactaagaatacatagtagtactaatcttataagtgggttagtgattttcctgtatcagtgcagtagcctgagtatcatttcagtaaagacaaatatttagactgattcaaggttgggaggttagcagatgaataccgctggaaaagacagtgtggcaatggagtgggtagaggatattaccaagagaatgctagaagtgaaggaccatacagactaagatggttgtggaaagaggcaaagagacaggggtgtcatagatcaggagagcttagcagggtcacggaacagaagatctcaacaagagagaatgggtgtgctggaataactgggtgaaaaaactggaaatttaggaaactatgaccatacaatgagatgtctaaataattgatttcaaagtgaagaaattctttgaattagcatgggagccctgataattcctgagccctgataagtagagaagaaagtcattggaaacttctgagcttgattaagtgctccagctagacactgaagtcacccaggatgataataacactgggaagaaagaaaaccctgagcagtgttctaaagttatcaatgagtttggtaatcagtgtgttgcatagttacccataatgaggagtagaaaatggtagtatacctgggtggcttgaacttcaaaggaacaggtttttcttatataagaatagagttggaaggatctgaggaagaggagggggcagactcaaatccttagaagtattttaggtgtccaagaatgacctacttcacccctaagaaggatactggaaaaaggtaagcagattgcagtaaaggcaaggcagtactgaggtagtcaactgaaggagttgctgtaatttactaaaattctaaacaggtggatttatctttttaataaacaaattttcaaaattacagatacaagagttctcagaagtcaaccgattggtctggagtaaagaagccaatttacttaagtaaattgggtagtaactttgcagaatggtcagcatcttgggcaggttatcttattacaaaggtaagaaaccctgttcagtttgttaactgaatggaaattctaaaggaaaccagaacatctatctgaatgcctagcacacacaataatcattgaagtatttgtgctgataatcatagaaatttttgaagaaaatgttaactaatagagaataataatttctctgtagttactaataatagcttctgagtgaaaagtaattgttttaccaagaaaattactatggtcttaatgtgtgtgtaaaattacrtttattccttttatattgtaaaataatactatgtaaaaggatgtaaatgctatgtcagagttttttacataataaaaagacattcaataaagagatatattatactctaatagcatttctaaaagaagttatattatctgaactttctctaaaataaaaataaagatttttacaatgaattttcatagaaaaacaggtatatttctatttccttaatgagaaatttttacatgctggatagacaaaaggtactctgtgttccaagaaaatgtttacagtatatttaaaatttacaatttttgtttttaatttacctttcttttttttttttttttttktgacggagtcttgctcttgccacccagccggagtgcagtggtgcgatctcggctcactgtaagtctccgcctaccgggttcaagtgattctcccgcctcagcctcctgagtagctgggattacaggcatgagtcatcacacccggctaatctttgtatttttttttttttttcgagacggagtctcactctgtcgcccaggctggagtgcagtggcgcgatctcagctcactgcaagctccgcctcccgggttcatgccattctcctgcctcagcctcccaagtggctgggattacaggtgcccaccaccacgcccggctaatttttttgtatttttttagtagagacggggtttcaccgtgttagccaggatggtctcgatctcctgacctcaggtgatctgcccgcctctgcccctcaaagtactggtattacaggcgtgagccaccgtgccccacctttaattaacatttctgttagtgttttaaaatatcattatactaattcgtagttagtaacttcaagacattttctttttttttgagacggaatctcgctctgtcactcaggctggagtgcagtctcggctcactgcaacctccgcctcccgggtttaagtggttctcctgcctcagcctcccgagtatctggaactacaggcacccgccaccataccagctaatttttgtgtgtgttttttttgtagagactgggtttcaccatgttggccaggatggtctcgatctcttgacctcgtgatcctcccaccttggcctcccaaagtgctgggattacaggcgtgagccaccatgcccggctgacattttctttttttaatgaatatactgaaaatataatgtgtgaaatgtggaatactgttaactattttcagctctggaatattaagggtttttttttgttttttggctttgtatttgaagaaaaaatctctttaaaattttatgagttcaacagtgttagcaaatcaaaagttaagtcataacaaaatttgactttaaccccaaataatttaattaaaaaattaattaaaaaactttttaaatttaaaaatgaatactcgtttgtgataaattatctcacatgctactctttgacatttaatcaatatgtgaaagtgtgttactgtctacacattttgcatttacaggttcgacatgatcttgccagtaaaattttcacctgctgtagcattatgatgaagcatgatttcaaagtgaccatctatcttcttccacatattctggtgtatgtcttactgggttgtaatcaagaagatcagcaggaggtgagataaatcatcttacttggtttttgaacatgtgaaacttactttctccaatgtaattagtattagaaaggctacctattagtaggaaatgtagacctatgtatggctatgtatgttcatttacatatctttgcctgtttggtgtgtgtatccctttaattgnnnnnnnnnnnnnnnnnnnncatattttcaaaattattccaacttagtcattttctttttaaccttttcacattttgccacgcagaaattttaaatgtaaatgcaaaatttatacatcttttatagattattaattttaaaccttttatgtgatgcctcatctaatgtcatgaacttatttgctatattttcttttaatccttctgtttttatatttagtcttcaattactctgaacttaattttgcatatagtgtgaaatattactgtaagtttttttcactgttaacaaagtttcattatcatttattgaataatctagaatattttaaaatttttaaaattttctttagtcgttaacatattttctttttagactaatatttggattgatttaattatagataagaacaatagaggaatgtattattgatcaattgtgttttccttttctttttttgagacagagcctccctttgttgcccaggttggggtgcagtgatgctcttggctcactgcaacctccacctcccaggttcaagtgattctcctgcctcagccttctgagtagctgggattacacacatgtgccaccatgcctggctaatttttttgtatttttagtatagacagggtttcaccatgttgaccaggctggtcttgacctcaggcaattgggctgcctcagcctcccaaagtgctgggattacaggccaacatgcctggccaattgtgttttttcttttgaaaatttttgccttagaatggttagctttagatgtcatataatagttaaatggtattatatagatattattattaattataaatgattctcataggtttatgcagaaattatggcagttctaaagcatgacgatcagcataccataaatacccaagacattgcatctgatctgtgtcaactcagtacacagactgtgttctccatgcttgaccatctcacacagtgggcaaggcacaaatttcaggcactgaaagctgagaaatgtccacacagcaaatcaaacagaaataaggtagactcaatgggtgagttatcacttctgtttctttttttttttttttttttagctattcaccaattagctcttccctttatcagttctataatttaagcactagcttaaaaaataccttgcttcatgttttttattgttgttgttgttgtttggagatggagtttccctcttgttgcccaggctggagtgcagtggcgtgacctcggctcactgcaatctctgcctcccgggttcaagcaattctcctgcctcagcctcccaagtagctgggattacaggtgcccaccaccacacccagctaattttttcgtgtatttttagtagagacagggttttgccatattggccagactggtctcgaactcctgacctcaggtgatctatctgccttggcctcccaaagtgctgggattacaggcatgagccaccgcacccagctgttttgtgtatttttaaaatgggtaatagtgtggccttttcactgagaaaaaacagtgaatttatagtaataagacctttctctcttcttactctcacttcgacaaggcacatatttattttttctttgtataaaatggggttaatatttttatttttatttattaatttttttttgagatggagtcttgctctgttgcccaggctggagtgcagtgacaggatcttggctcactgcaacctctacctcctgggttcaagcagttctcctgcctcagctttgcgagtagctgggattacaggtgtgtgccaccatggccagctaatttttgtatttttagtagagacggggtttcaccatgttggccaggctggtctccaactcctggcctcaagagatccacccacctcagcctcccaaagtgctgggattacaggtgtgagccaccacacctggccaaaatggggttaatattatctcccttaggagattattgtgaggaataaatgagatgatgaacagataaattataaaatgtgaaataaatgagatgctaatattgttattaacctaatcctccctgttaacatattatatgtttcctcagtttttgtgtgtgtgtgtgtgtgtatgtgtgtactctgttctttgtcattcttcacttggaaaatattctttgtaatctttttcacatttaagttttaaatttcaagggagattttaattttatttatttcatggcctaaagagaagctatttttatttatttatttttcttgtctctagtagtgtttgatatctagccagctgtccagatatgcttagtatgcattactacactacaccctgctctatcttaccttgcactgtttttttcctgtgatattacaactttcactaagaagaatcttgatttaaaaatgacaactgctaatttgtccctatgatataagcattgatgagaagaattatattcatcacacactaatggatattcttactttctttgaaccttttttttttttccattcttggcaataagtggatggttataatctggccttataccttagctgttctcacagacatcaagtatttttccttcaggctttcaggctaattgaaaaactatctaacagtccttaaagaggccttcacttccataattctcagtttgtgagcatctccctcttgttctgttgaagcagatactttcctgttgttaagcaaaatagtttattatttttctgaaatttcctggacttgccaataattacctgcttggagaatgtttttgtctggaatgtggctattaatatatttttatatttaactattgaatgtttgttttttaatttttttttctttttttgagactaagtctctctctgttgcccaggctggagttgcagtggtgtgatcttggctcactgcagcttccacctcctgggttcaagtgattctcatgcctcatgcccagctaatattttgtacttttagtagagacggggcttcaccatgttggccaggctggtctctaactcctgggctcaagcagtccatctgcctcgatctcccaaagtgttggaattataggtgtgagccagcacaaccagcctgttagtttttatttctgcatgtcaaaatggtactgtaaaaccaaacactctattatcaccattttcagtgacagtagcttttttttttttttttttttctgagacagtctcactctatagcccaagctggagtgcagtggcatgatcttggctcactgcaacctccacctcccaggcttaagcgattcttgtgcctcagcctcctgagtagctggggctacaggcacatgccaccatacccgactaattttttgtattttaatggagacagggtttcaccacactgcccagggtggtcccaaactcctgcgctcaggcgatccacctgccttggcctcccagagtgctgggattacagacgtgagccactgtgcctggccaaaattctagcttttaagaataacatttgtaatgattcaaaagtacaatacctttaacatttctttaacatttttgtagagacccccatctctacaaaaaatacaaaaattagctgggtgtggtggtgtgcacctgtagtcctaggttactcacaaggctgaagtgtggggattgcttgagcctgtgaggttgaggctacggtgagacaagatcacacccctgcactccagcctgggcagcagagtgagaccctgtctccaaaaaaaaaaaaaaaaaaaaaaaaaaatcagaatttgaaatcatctacaaattttgatggaaataaggaccttattttaaatataatctgtttagaatatactaccttaggctaggtgtggtagctcacacctgtaatcctagcactttgggaggccgaggcaggaggatcacttgagctcaggagttcaagatcaacctgtgcaacataatgagacttcatctttacaaaaaatacaaaacttggccaggcgtggtggcacatgcctatggtcccagctactcgggaggctgaggcaggatcacttaagtccaggaggtgaaggctgcagtgagctatgatcttgccactgcactgcagcctcagtgagaatgagatcaaaataattttttttaaaaagtaagtaaataaataaaaataaaatatactgccttatttaaattttgaagaaatttgttgcctgttttctacacacttatgaatcattaaaatttagaagttttaaataattcgtaaactagactgtcctcatttagaagtttttaatttttgtctttttgtacactcttgaaaaattatcctaaagtacttgtggttttactttgaaggcacttttactttcaatttctttcttttttttttttttttttgatacggagtctcgctctgtcacccaggctggagtgcagtggcgtgatctcagctcactgcaagctccgcctcccaggttcacgccattctcctgcctcagccccccgagtagctgggactaaaggcacccgtcaccacgcccggctaatttttttgtatttttagtagagacggggtttcaccgtgttagccgggatggtctcgatctcctaaccttgtgatccgcctgcctcggcctcccaaagtgctgggattacaggcgtgaaccatcatgcccagccattactttcaatttctattgtaataggtgatactgtatttttggcaaccaagaaaaaataggtggataacaatgaattctaaactttaaaaaagattatttccatagttttgaagtttccctacaaaatagctacatttaatcattttttatagtcatcaaaaataatgactaatcttgtatcttttgtatcatcattatatcttttcaaaatttaataatagattgatatttaatcctcaccaacaacgttgtaaggaaggcaagacaggtactaacattttccttttataggtaaagaaatagaggctcagtaaattaaatgactgtccaaagaaaggtaagttataatggcagagttggagcaagactctctgaacaattgttctgttgttagttacattctaaatatgatatcctaatatattcagattaatttgtttagtgaaataaattgaacttaaatacttaaattgacacttttaaattttatcttataagtctttaattactcaactttttttatgatctagtatctactgtggattatgaagactatcagagtgtaacccgttttctagacctcataccccaggatactctggcagtagcttcctttcgctccaaagcatacacacgagctgtaatgcactttgaatcatttattacagaaaagaagcaaaatattcaggaacatcttggatttttacaggtctgaagttaatatagtgaatttaataatgaaaattaatgtggccagtcttttatgtttatgttgttcattttattgaatgttttatatgctatgcttagaagcttatagattagtggggagagataaacatcaatttggtataatattttaagtacagtaacacacatgtaccctgaggaaggacacttaactcatccatgtggaatagggtgggagatggaagcggatgagccagaggtcaggaatggcttcttggagatggtgtcttaaaaaatgagcagtatagggaggcaagacattataatcagaggcatctctgtggagtgtttgaaaagagcatggtatatgccaaagagtaaagtgtcggttttggaatggtagaggaaagatcacaaataatagaagactttttaagttgcccaaacttcttggagggtgcgaactagggaagtgttatggtcacaatggaattttagctaaatgcctgtggcagttgtggaggaggagtttggaagggctatgattcaaggaattactcttctccttgtgagagttgtggtcctgaatttgggagtgagttagtgggggcaagtgccggttatgtcaggtatcaagcatgaaaatgctggtgaaataatgatttaggcgatgttatgattgtgtagggaagaaaagaaagtaagagcaggtgaggcgaatacagtggaattaaataagagctcaagattggtgggcttttcaaatcaaaaagcaaagtgtgataaaataactagaaaattagtaacttgcagtcttaagatgaatattagccccttcctatctttgtgttcctccttgtccagctttaagtctatggttcatggttaaaatcgttcccttagagtgatgctcaacttcttgtctttttcccactgtgttgtactccgtttgtcaaactccaaccatgtaagcagctggagaaaaattacacagtgggtgttataactggtttcagtttaagttcatgatctcaaacatctttaaaactgcaggactctaacattaccttcaggctggctgtgtttctctagtaaggctactttcccctttgtcaagatgactgtctcttaccttcactttgtttccctgcttccagctgacaatcttgcttcatgattcattaggaaaaatctgcaaatgaaacagcatctgcaccatattctttttcttcccttctgttattttatttatttatttattttgagatagggtcttgctctatcacctaggctggagtacagtggcacgagctcggctcactgcaacctccacctcccaggctcaagggatcctcacacctcagcctcccgagcagctgggaccacaggcgctgctaccacacytggctaattttttgtattttttgtagagacggggttttccatgttgcctgggctggcctcctgacctcaagtgatctgcctgccttggcctctcaaagtgctgggattacaggcatgagccactgtgcctggcttcttctgttatttttaaggaaggatttcttcctgtcaaaattcaatctttctacttgtgttctcaatttcaagatgtaacttcttcatatattccttctttctctagtgtaattaatttctctttgggaaccagagtatatggagcatatagacatgctctggtaaatcctaccttctcctttagatacatcccatctctctgtttccggaacttcacaaccagtttttgaaggaattgtctagtttctttatactgcagtcacttctttgtttctcattcactctgcccatttcaacaagacttctctttttcttttctgttgacactattcttgctaagaaaattggtggccacatgttaccaaatccagtaaatttttcccagccctcattttcttaacctcagtatcattgaccatgcctttctcattaagacatcatttgcttttctcccatggcttctgggatattttattctccagttttcttccaagttatctcacttctcctgtttcatttgccagctcttccttcttgataaatgtagaaactctaatctctatcgtcagtctgcttttcttctttatccatttcctagatcatcccattctttctcatgttgtgagagactgtctttgtgctaactgattcctaaatttttatctttagcttgaatatctcctttgagcccagattgctgtcttggttttcttgaagtcatctcaataacaatatattaaaatggttatttacatttttaaaaatttaaaaattcaataaaactcttataagctatactcaacagaatatgttatcatttggatctagacagttttaggatcctgaggttctttataaaccttatgatcaataacagctattgatatagatttgtatttaaaaggagtaagaatgttgagggaatagaatgcctggaaataagtttataattttactgtgactttgccatgaaacaaatgcttactattactttgaggaaaaatttctcaaaaaattgctgtttcaatataaacaggtggttttatagttttatttccagttgtgtttttttcttgtttttgattgttttttaatcattgaacaaagaaattgtatgctgctatgcatgaacctgatggagtggccggagtcagtgcaattagaaaggcagaaccatctctaaaagaacagatccttgaacatgaaagccttggcttgctgagggatgccactgcttgttatgacagggctattcagctagaaccagaccaggtaagataataattgaaaggcaactgtaatgaaaatagccctgaataggaactctggaaaccttagttttttttgttttgttttgttttgtttttgagacagagtctcgctctgttggccaggctggagtgcagtggcatgatcttggctcactgcaacctctgtctcccgggctcaagcaattctgcctcagcctcccgagtagctgggattacaggcgtgtgccaccacaccacatccagccgaaaccttagttttaatactgtttctgtcagtgtcactgagtgtctggaaaatatttaaccctctctaagcttgagtttcctaacagataaaattagagactttactagatgattttaaaaattccttccaggccggatgcggcggctcatgcctgtaatcccagcactttgggagaccaagacgggtggattccccgaggtcaggagttcgagactagcctggccaacatagtgaaaccctgtctctaccaaaaatacaaaaaattagctgggtgtggtggcgagcgcctgtaatcccagctacttgggaggctgaggcaagagaattgcttgaacccgggaggtggaggttgcagtgagccaagatcataccattgcactccagcctgggcaacatgagtgaaactctatctcaaaaaaaaaaaaggtcccttccaatactatatttatatgactttagaaatcccctaaatgaataagatttattatggagtatatctgtattaaaatgttcatttaataactctaaaatgtatataattttagtttgctattaaaagtgtaagccatggatcagtttgtagaactagggattctccatagcctgagaaacattttcatattttatacacctactcacccacctgcacgtctctaaaatggtcctgtagaatcacagagttacagttagtaatgggaataagctgtgtgtctattggaatgggaaaggggtttagaatcattaatttacaatcttgcctttagattctttctaattttgggatattgctttttgtcatatttgacatgtttctcagaagcacaatatataaattctttatttttcacaatcttcttttcattttaaaggatagtacataatcctctttaactttttagtgctaaagcccgaaatccatatttaaaacatcaggacctttgagcttgaatgtttatgtgagaaatatgacaatctttaaacagaatatcaaagatattagatactttttatattggatgtgaaccaaaaagtagtccaaattgaaaaatataataacttcaatctgagattttctatgttgtctacatttatttatgttactttaaatgtgttaggacattgatgggggtcctgccatgtaagtaagcaaatcaattgttaaattaagaaaggtgtgactgggcatggtggctcatgcctgtaatcccagcactttgggaggctgaggcaggaggatcacttgagcccaggagtttgagaccagcctgggcaacatggcaagaccctgtctctacaaaaaattaaaataataataataataaaaaaataagggcaataaggtaaatagtaatttttaaagaatatcagttaaactgtttttggtccccaagctattattgaagtgataattgctattttaaatatttttaaatttctagatcattcattaccatggtgtagtaaagtccatgttaggtcttggtcagctgtctactgttatcactcaggtgaatggagtgcatgctaacaggtaatattttataaaatgattttcttttgttattgcatctgaatggagaatttttagttagtgaattgggtaatttaatgtttagtagagtaataaatgttttatgtgttttcatggtattggagataaacaccaacatttttttttcctcaagtttttcatagtcagtctaccacttaacagcttctgtctaaagagccatccttgaattagatttgctttaacacaaggaacttctagaacccaccggctattggtgaggctcagatgggacttcctgggcctcaaagggcatctatgctctgcttacagtatcagtaccacttattttccgtgctagaggttgtgactgatttacggaataccactgtagactgtgtgcattgattttaccctaaatgattgatgaatgtgaaagcagccttcctttcctaaagaaggtgggtttattgtagaaaatcaaattaaacaaaaaataatacatgtatgtggcaaaacattaaggctgagtagttcttccagtttggagattaaatgtggagattagcactgctcttgaagctgctttgctgtgagagctgacagctgtattccttgatttattcaccagactctaaatggctattctgggcagtaaaatctggtcaaaagggaatgggatctcagttaaacaaagattatacaggccactgtttttggactactctgaagccaagtttttctttctcttttttttcaacttttattttagattctgagggtacatgtgcaagttagtgacaagggcatattacgtgatactgaggtttaggatacaattgaacccatcacccaggtagtgagcatagtacccaaaagatagtttttcaactcttgcctccctccctcccccaccccttgtagtctgcagtgtctattgttcccatttttgtgtccatgtgtacccaatgtttagctcccattttattcttttttatagctgcatagtattccattgtgtatatgtgccacattttctttatcccatctaccattgatgggcacttaggttgatttcatgtctttgctattatgaatagtgctgcaatgaacatacgagtgtatgtatctttttggtagaatggattattttcctttgggaatatacccagtaatgggattgctgtgtgttctattttcagttctttgggaaatctctaaaccgccttccacagtggctgaactaatttatattcccaccaacagtgtataagtattctcttttctctgcagccccttctacatcttttttgactttttaataatagccattctgggctgggtgtggtggctcatgcctgtaattgcagcactctgggaggccaaggcgggtgtatcatttgaggccagtagttcaagaccagcctggccaacatggtaaaaccccatctctactaaaataatacaaaaattagctgggcgtgatggtgcacatctgtaatcccagctactcgggagactgaggcaggagaattgcttgaacctgggagatggaggttgcagtgagctgagattgcaccactgcactccagcctgggcagcagagggagactttgtctcaaaataataataataatagtagccattctgattagtgtgaggtggtatctcattgtggctttgattttcatttctcaaataattgtgacgacgagcatgttttcatatgcttgttggctgcttgtatgtcttcttttgagaagtgtctgctcatgtcctttgcctactttttaatggggttgtttgtttttttgcttgttgatttatttgagctttttatagattctgaagccagccttttctaagtactgtttgtataggttccaaaactgtgattcataaagactatcattttacaatgtctaagggcagagaagttcactgttggtcagatggtatcacagtagtggaatttatgaaatcacaagggaagttttacagaagtaaagaaggaatgcttatatgttgtggatatgtttctccagattagttgagagactttatgaataaatagattacagggatttgggaaagagtcatggctcaaattggggtgtcaaatttctttttgacatagactacacattcagactcctcttttcttctctttgggtctgggatacatagagcctcctgatttgggttgtgaaaaaggcatgcgtcaatattcaatgaaggggtgctgtgtcatggtgaagcaaatgattatggatggggcatgtttttcttggggtaatttctgtttgcattaaacaaatatttttcctaaaatattgactgtgcctgccctatttatcattctttttaatgtacccatttatgtggatacattctcacagcctgatcctgattgccatttgtactttttgctataagtcttcgtgtgacacatcccctttgttatctgatatcccatagataatctgttatcccacagttggataacaaatactgcctaattctactgagatttttatcctgaaatttttatattttggtgtctgatggtaagcttgtaaagtccttcaaaattggacttttgaaaattacatttcagttgtatttctttagccttattctaaactgtttttggtggtggtcataaatttagaaattggaatcctytagcttctatttttagaatttttaaaaatgaaacttgttagatcacttgttgtcttttctttatgtgtttttactacaataaaaagagcaaggaaaacttttgaggatattgattccagcctctctgttactttatttataatatggatatatatgtgctgtatgcagtgttattagattattaaatggaaaattgtacctagcctaggatctaaacatatggcagaaattcagaaagtatgattaataaaaaagaaacatgaggaaagcctagcggtttctgtgtagtcatgatctcaaatatcactggtcatcctaatgtcacctaagtagaatgcttagaacaaaataattagcctatatcatactggttttgcaaactcaaattttaaactaactgaaagtagtttaaaaataggtatatattttacgtagctagttttatatactttgttatgccattgacaaatcattgtaactttcttttgctcttggtattgttctagatacctcccaactgtccgtaagttataccactggcccccctgtatttttgtcttaaatttaattcagaattctgagttattggaattgcttacctctgaatttatgtgtgttcagttggctctttttcttccttgctctttgttcaaattaagcatgcagctatttttacaatgggcttagttattattcaggaattaactctgctctaatatatggcacactttaatttgttgaagaatgtcattttaaatggtgtatcagaagtaattagtgaaaaaatatttttgaaggatggaaagattaaaattttctggatagtttctggatagagataattattttatatctaagaacaaaatacaatataatgcaaattcaataaatataataaatagagtatgtaaaccaatgaaaaatctctgaatgtcaccttaaataaattaaagtttagttgatatgggtttcttttaataggtccgagtggacagatgaattaaacacgtacagagtggaagcagcttggaaattgtcacagtgggatttggtggaaaactatttggcagcaggtaaaattacttcttaaaatataagcagttttaggatgggtgcggtggctcacgcctgtaatcccagcactttgggcggctgaggcgggcggatcatgaggtcaggagatcgagaccatcmtggctaacacagtgaaaccccgtctctactaaaaatacaaaaaattagctgggcgtggtggcacgcgcctgtagtcccaactactcgggaggctgaggcaggagaattgcttgaacctgggagttggaggttgcagtgagctgagatcgcgccactgcactccagcctgggtgacagagtgagactccatctcaaagaaaaaaaaaaaaagcggttttaatatgacataaatattcagacttaagtaacttagcaacattcatacttaatatcttagcctgttttatgattgccttgtttagttgttcaaagtagaatgaaaccaggctgggcatggtggctcacacctgtaatctcagtgttttgggaggccaaggtgggaggattgcttgaagccaagagctctagaccagtctgggcaaaatactgagactgtctctgcaaaaatgttttttaaaaaacttagctgggcatggtggctcatgcctgttcacctactcaggagactgaggtgggaggatcactggagcccagaagttcaaggctgcagtgagctataatcatgccatagccctctatcctggaccacagagtgagactctgtctcaaaaaaaaaaaaaggaatgaagccacctgtttgatatttcagctgaccattttatctaatgaaataaagctgactcttggacccagctaccgtgacatttcttgactcttcatttgtttttcagatggaaaatctacaacatggagtgtcagactgggacagctattattatcagccaaaaaaagagatatcacagctttttatgactcactgaaactagtgagagcagaacaaattgtacctctttcagctgcaagctttgaaagaggctcctaccaacgaggatatgaatatattgtgaggtattttggaatttccatttttatatttctggcctataaatgtcacctgacaggattggaaaatttttttgagtaaataattgatagtgagtttggtttcatgcatagctacactagacagctctttcattctttttacctcacaatcaccctacagttaaaattctaacatacatccttttaaggaaaggcaactatgagactaatgaaaaacataataaaaatatcttatgtttgtcctcttgtaatgtcatagtttgctttctatataaccaaatataatatagacatctatagcacctggcacattggtgcttggtatttgttgtttccctttccttttcatttagaaatgtgtttgatatttccycccaaaaatataggcatcacattactagaaagaatattaacttttataggtgaagaagaaaatgttggaaaacattttaggtctatgaattctacctgaggaaaaatgataaactaaatattgtaattaaggtataagaaatttactacatagcactgtttttttaagttagaagaattcattatatttagtatcaacccgtttggtgatatcttaatgaaactagagattggaccactgagtttaattctgttctgtagctactcagctatatccttgtaccttgaacactgaatcatagacactgactatcatacaagggggaaaaagctagtgtgaatgtatcaaagtttccatcactcttagaaaaaaactacattaatttcataattttttactatcatctgctatgccaggccctcttatagtagcaccagcaatatatgcaaatacctcatgttggtttataatggatccatattttcttttatcttcatttaggtggtaaattttggtttcatacatttgaatttagttttatccatcattctccagtttaattaggaatttgggattcactgcaaatccctaaatatttattttaaaagtttaatgtaattaattttatttatttatttatttatttatttatttattattttaagggacggggtcttgctatgtcacctgagctggagtgcagtggctattcacaggcataatcatagctcactgcaaccttgaactcctgagttcaagtgatccacctgcctcagtctcctgagtagctggagtacaggtgcacgctaccatgcctggctaaagcaccaaatgtataaaccagcataaattggtgtttacattcagtttgaaaagatataaatgtaattatttacttagcaaggatatattaaagttctaccaaagacaactgtgtattttaaattctttatttctgatttaaagtacttgctttatatatgagattaataaggctgaatatgataacattttaacataggctctatctatcttcagattgcacatgttatgtgagttggagcatagcatcaaaccacttttccagcattctccaggtgacagttctcaagaagattctctaaactgggtagctcgactagaaatgacccagaattcctacagagccaaggagcctatcctggctctccggagggctttactaagcctcaacaaaaggtttctcacactactttttttaaaaatgtcacttatcttgaatttggtatttggatattatttgggggtgtttgtatttcttaattttctgtctgaatctacatttttctatttttaatgatcagggctacactatctggttgaaaggaacctagaacttaagaatcacttttagacaccatttctttctcttttttaagatgttaaaaacatatctgggggatatgttttttactgataaaaatcaagaataaggttcataataggtaaaacagaacactgtaagaaaagttaagtcaaggctttttaaacaaattaataattaattcctttgaaatagtatatgaagaaggttctgtattgggaacagaggctttcaaaacattggaactacttgcaaagtttatgacctagatttaaattgttttaagttaagttgttgtgtacacttaccaatggtctctctcaccaatgtgttgttacttcctttagaccagattacaatgaaatggttggagaatgctggctgcagagtgccagggtagctagaaaggctggtcaccaccagacagcctacaatgctctccttaatgcaggggaatcacgactcgctgaactgtacgtggaaagggcaaagtggctctggtccaaggtaatggccagggaaatgtcatcagatatatatatatatatatakatatatatrkatatatatataatgtcgggaattatgtacttccttaaaaggccaactgagagaacataactaatccaaattaagaaccttccttttctatcacttttcttcattagttatctaccatagcctggaagtaattgttctttttactctacagtccccagataccttcccatttcaaggctgaatgtggagttttttcagttttcatctatcttacattttccttgaggaaaacgacctcttaatttttcaccttatgtatgtatacagggtgtatatagtagtgacccagtaaatgttggttaaatgaatgtaactctgtcacttagttgctggcagataattagctctctgtagacttgccagtgttactgtaaatattcagctctgatctagccagaaagggcctagcatctgaacagaagttcacggcagacctcagattaaagccaaagtaataagaagggggttttttaaacattggaactacttgcaaggtttatgacccagatttattttttatttttatttatttatttatttatttattttgaaccggagtctcactctgttgcccaggctggagtgcagtggcacgatctccgctcactacaacctctgcctcccgagttcaagtgattctcctgcctcagcctcctgagtagctgggactacgggtgtgtgccaccacacctggctaattttttgtatttttagtagagatggggtttcaccgtgttagccagggtggtctcgatctcctgacctcatgatccacctgcctcagccacccaaagtgctgggattacaggcgtgagccaccgcgcctggccaataacccagatttaatggctattacttaaatttctcctcaggctagtcaccagtttagaattagtaataggcattactaataataatagcatgttctggaattgatacttagcaactattgttggtgccatttgtggttacaccaacttgtggtggctgagaaaggacaggagaggtttcctggatgagaggggaaagcaatttattcagtgtgcattagtcagtacctggtcattttattgagctagtggtagtctatgtattataataccttaaactcaaaatgttcaaaatgcaatttattacctaatactcaatatctgtttctcctctcatgtttcctacttctctgaacaagactttattccatcctyccatcaaaaacagaaatctggacatcatcttaaattccttctgcaacctcacttttcacatccagctggagactaaatctttgttcttcaaccttagaaatatctyttgaatcctctccctcttatttatttccactgctttaacttatgactttattatttacttcctctaacaatattaacaaccattttaggatctcaccatttccctgtatacgttattgcagtttgtgatctttctaaaatccacatcgaatcatgttgctccttcaaaaagattaaatcttacaaagtattcttcatacctttaggattaagcctaactctaggaactacacaaatccctttctgatcaagtcctggcctacttcctcagtgtcattcatcaccatctcaaaaaccctttaaacttcagctaaaatcagactatgtgcttttcttccaattaaaattattattccatctacctagaatgcctttcactaaattctctgccaagaagatttctactcattcttgaaaacctaattcaaattttcttcgttgataacttttcctgactgtagttctcctccattttcctatattcttcaggtaggtttaagggactctcttctctatcctgtataatgctgatgtatattcctctgttgtaacacttagcaaatatgcttttatttcacatagtttcttttctcatgtgactatgaactttttttatgtcagggattttaatttgtttgtgattgtcttcaattccctgaactttgattatagtcctttcttgatatccatggagggattggtcccaggattctctatggataacaaaatctgtggatactcaagtcctttatataaagtggcatacacagtatttgcatataacctgcggacatcctcttgtatacttctctaggctacttataatacctaatacagtgcaaatgctttgtaaacagttgttatacttgtattgcttattcatattatttttaattttttctttgtaatatttctttttttttttaatttaaatttttatgttttgagagagacagagtcttgctctgttgcccaggctggagtgcagtggcatgatcatagctcactgatgccttggactcctgctctcaagcaatcctcccacctcaccctgaactttgtatcaaaggctataagcataagccatcatgcctagctttctttttttttttttaagagagaggatcttgctctgtcacccaggctggagagcagtggtgtgtcatagctcactgtaactgcgaattcctgggctcaagcgatccttccccctcagcctcccgagtagctggaattataggcatgagccactacacctgggtaatttttaaattttttgtagagacaggatcttgctatgttgcccaggctagtatcaaactcctggccccaagcagtccccctgccttggcatccaaaagcactggaattgcagagatgagccactgtgcccagccattcctaatattttctatccactgttggttgaatccattgatgtggaacctgtggctacagagagccaactgcagttataaaattaattagtaaatgaatgaatgagatgaagcaatgtttcagttttagaattttactttaataagaggcaagtaaaagataaacatgaaattacaaatggatttgtacaaaaacataatgaactaatacttttgcagaaaatagaagtatgtttttaaattaaaaggcttattgttgccttttttcttttagggtgatgttcaccaggcactaattgttcttcaaaaaggtgttgaattatgttttcctgaaaatgaaaccccacctgagggtaagaacatgttaatccatggtcgagctatgctactagtgggccgatttatggaagaaacagctaactttgaaagcaatgcaattatgaaaaaatataaggcaagtatatgtataatgcagtttcagttaactctgttgactacgtaaaatgacttaagtctatatggcaaagcacatgtataaaaataaccaggaaatttttttgacttttcagtgagtatataagtatatggattatcacaaaataaatatactcatgaaactgccaccacatcaagaaatagaatattatttgagctctataaccccactacccttcatcccagtaatcactattctcaccctctgtctcaaagttaactacatcctagcctgaaaatttttcagcaaaaccaatttataacttctttactaggtattaaactttatatagatggtgttgtaagagatatacctctcaataatccatgggtcaatgaaaactttcaatggaaattgaaaagtactttgaactgaatgataataaaaatggcatatcatatcctgtgcagctaaagccattcttaaaagggatttaaatttttatttgcatatattcgaagaaaataaaggttcaaaattaacgagttaagtatctatcccaaagagttagaaaaggaactaaaaaagtagggagagaaataaaaaagtagaagaaaggaaataataaagcaaagagcaggtggctagaatttgtgggacagattaactgagagaaaaaagttaaacagagtagttcctatctgcataggaattgtgttcgctgaataccagcctgcacatgaataattcagaattctatgaggccaagctaggaataactgctggggaaagaataaacatgcagaggctataagaacaatttccagagctcacacgggattgagattcattcagattacaggattgagagttattcagtccaccagccagattaagaggcctcattgcataatatggagcattcagtaaagaccttaaaagggccacaccttagaagtaggactaaattagtcctaggctaaaaactactctatatccatactagaagggcagtaaaacaagctttaagatgattacactgatcttcaagtaaccttactgcctgccagatcaaagcctaacactctttaaagcaagacaacaaaatctaaaacttgacaatgtaaaaatatatccagcatccattaaaaaattactctgtgaatgaagaagcaggaatatttgagccatagataggraaaaaaataaatcagtagaaatagttctagaaatgacaggatttaaaaacagctattgtatataggctccataagtttaagaacataaacaaaaataagagcatgatgagaagagagagaaatcaaagatacaagaaagacctaaatgggaccaacagccaaagcaaatggcacagacagtgctaatctttagatccaggaagtgttgcattctgatgaagataaataggagtccagctcctgttccttggttacaagaagatgtcatgccacctaagaaactaaccttgatttgcattaaaaactatattatcctaaagggcagtgataatgaggcaagttctgaaaccatacttgtaagtttcaccttcccagttagagagatcttctgaatttattctagtatgtaagacacaacaacttatgaggcacacaaaaactcaccagtacttaacagcagaatttgatagcaaatattccagttctcccatctctgcctgggtactaaagccagggttagggaagagagatgttgtcagactaccaacttttcaggttctgtttcttctgcatacacccctaatttcctgtcataaaggcctcagtagctgcttctcttgttctggttgcctatacatgatgtagacagaaatgagtagagaaaagaatagaggctgactactgtagaatgacatgcagatccaaggggccacatattgcatgattccacttacatgaaatggccagaataagcaaatccatagagacagaaggtagattaatgggtactagagactgaggttggggctgggaagtgactgctaattggtacaattttttttttggagtgatgaaaatgttctggaattaaatagtggtgatggttacacaactctgtaaatatactaacaacaactttaaaagtgtgaactttataatatattaattatatcccaatagagctgtcattttaaaatattacccaaatggcaatctttaaataaaaaaagaagtaaaagatacaaggactaggaaaaaaatataggaaagttattaattgcagatgatatgaatacatatgtagaaaattcaaaagattataaactattcaaaatattgagtgaattaaacaagattgcctgatgattttatttctatatgacaacaagaaaggaatttaaaacataccatttacaagcagaaagtacttgaacagttggatatctgtatgaggaaaaaaatgatcttcaacctctgcctcatatgatagacaaaattgcttcaaaaaagtagattatagatctaaactgaaaagctaaaattatgaatttttagatgaaaaaatagaagaaaatctttacaaccttagggtaggcaaaggttttcttaggtcacacaaagcattaagcatttaaaaaatcctgataaattagatgttcatcaaagttaaaaccttttctaagaaagacagttaagaaaatgaaaaggtaagccatagacttggagaaaatacttgtaatacatatatgacagaggatttgtagctaaattatagagaaccctacaacttagtaagacaatttaaagatctgtgaggctaggcacagtggctcaggcctgtaatcccggtgctttgggaggccgaggcctgaggatcacttgaagctaggagttcaaaaccagcctgggcaatatagtgagaacctgtctctgcaaaaataaaaattagccaggtatggtgacgaatgcctatagttttagctattcgggaggctaaagcaggaggatcacttgagcctaggagttcaaggttacagttagctatgattgcaccactgcattccagcctgagttacagagtgaaactttgtctattaaaagaaaaaaaatacagatctgcaaaagtcttggatagacacttcataaagaatacacgcaaatggccaaaaagcaaatgaaaagatgcttaacatcattagtcattaggaagatgcaaattaaaaccacaatgaaataacacattacacactaaaatggctaaagtctgaaagactagcaatacctattaatgcaataaatgcacctggtggggactataaaaagttaaatctaccatattccattccattcttaggtgtttatccaacagaaacaattacatatgtcaataaaaagacttgtacacaaatgtttatagtaggtttagtcacaaaaactggaaataggccagctggccatccagagaagaatgggtaaacaaactggtacagttgtataatggaatactaccctacagtaagaagaaatgaactactgatacacgcaacaaggtagattaatgtcatagatatgctgaatgaaagaagagggacataaaagactatatgcttatatgatttcatttatgtgacattttagaacaggtataattaatgtatatgcatagaaattatatcagtatttgcctgggtagttggcaggagagtgacggcaagggtgggcgcccataagaactttcgagagttaggaatgttcatcttcttgactggaatgatggttccatgggtgtatatgtcttaagaaagttgatttaaaattttactttattttatttttgagacagggtcttggtctgtcaacccaggctggagtatagtggcatgattacagctcactgcagcctcaacctcctgggctcaagtgatcctcccacctcagcctctcaagtagctgggactacaggcacatgccaccacacccagctaattttttattttgtggagatagggtcttgctgttctgccaaggctggtctcaaactccctggcctctactgatcctcccacctctgcctcccaaagtgctgggattatagttgtgagccaccatgtatgcccagcctaaaatttttaaagatatcatttaggatagcaataaaaatgatgaaatgcctaggattaaattgcacacaagacctctccacaaaataaaaattaaaacattaaaattgagtgaagtaaaaaagaactaaataaattggtagctagaatacatgtatgaatgggaagactcaataatataattatttctctacaaactgacctagaggtttaatgcattactcatcaaatgctaacaggtaattgacaattagaatttaaaacttatgtggaaacataaaggccaagaataaccaagaagcttctctgtcacctttcattttttcagttttaatttgaaataatctttgacttctaaaaagttagtagtagtatagggaatttccatatctaccctttaccgtgtttccactaattttaatatcttacactaccagagtatcagaagtgggaaattaatattgataaacaatactgttaactatctgtagaccacatttcaccagttttcccaatagtgttcttcttctgtctagaattaaggattccatatagcattagttgtcatatctccttagtgacctccaatctatctgagatgctctttactgtatcgtgtgaggtcaggtgcagggagaaaatagttggcccaatcaaaagaggtaattggggagagtttaatgaaaaactagattaagggaaattaacaaaggatggtgaaagtaccccatggctagcaacaacagagagtcgttgctaactctagacctgaaggagcaaaaggatagggcatttactggaacctgtacagggagctaaatttgtaggaaaggaccattggaccagaacttaaccttagggaaagaaacaccaccactgtcaactgcagcccagcaggaaggaaacgagcaggtataaagaccttaacctcactctccccctcaccctctaatctattgctaccttccattgattgaacttcacaggaagccagagggcaaacaggcccattgatataaatcatcaatttcagtttgctggggcactgagcagagtggaaaaggctaaagttggcaagtgtatctatctggaggggcaaactgtgaataaccaaaatagtcttttcaataaatgttgttgtatcacttgggtatcttataggaaaacaaaaaatcaaacttgatcccttcttcccaccataaacaaaagtaaacttgaggtagattgttaatctaggtcaggacttcttaaacataacaaaaacactaaccctaaaataaacaataacttctgtttatcagaagataccattgtgagttagaggcaacctacagattagaagatatttgcaatacattagaggctcatatctggaatatgacccagcatgtccccagaggataaacacaagaatgtttataacattattatttgtagattttatattggaagtaatccaaatggcaatcagttatagaatggataaatatgttgtagcatattcttataatggaatactatatagtaaaccaaatttatatgcaataacttggattgatatcacaaatgtaatgttgaatgaaataagccagataaaaaatataatnnnnnnnnnnnnnnnnnnnnnnnnnnnnnnnnnnnnnnnnnnnnnnnnnnnnnnnnnnnnnnnnnnnnnnnnnnnnnnnnnnnnnnnnnnnnnnnnnnnnnnnnnnnnnnnnnnnnnnnnnnnnnnnnnnnnnnnnnnnnnnnnnnnnnnnnnnnnnnnnnnnnnnnnnnnnnnnnnnnnnnnnnnnnnnnnnnnnnnnnnnnnnnnnnnnnnnnnnnnnnnnnnnnnnnnnnnnnnnnnnnnnnnnnnnnnnnnnnnnnnnncatgagcatgccactgcacaccagccaggacaacagggcaaaaccttgtctctaataataatatgtatttttttggagatggtgtctcgctctgtcgctcaggctggagtgcagttgcgcgatcttggctcattgcaagctccgcctcccaggttcaggccartctcctgcctccgcctcccgagtagctgggactacaggcgcctgccaccgcccggctaattgttttttttttttttttttttttgtatttttagtagagaccaggtttcaccgtgttagccaggatggtctcaatctcctgacctcgtgatccgcccacctgggcctcccaaagtgctgggattacaagcataagccatcttgcccagccaataataataattattatagtatgattctatttatataaaagttcaaaaacagacaaaaaactcctggagttcttgtatgaggatgataaatttgtaataattgatcaagttgtatacataagattcatatatgtttctgtatataaactttatttttcaaaataaaacttaaaaatcttaactaaaaagggagcgagagagaagagagggaggaaggagattttatataaaggtaattactttgtgataattgatcaagctgtaaatgtaatattagtgtatttttcagtatgtgaattttacttttcaaaataaatatttaaaatctaagctgaaatgagagagggaggaggaaggaagttagggaaggaggaagaaaggaaggcaggaagacaggcaggaaagaagaaaggaaggaaagactagattgactaatatgtttttctggcagcccttaccctgtgtggctgattaggtacatgaacctagcatgtgccacacgtctaatcatatcattctgtcctctattcccaggcaggtttgtgtctgtagagtctcaagattagagtcagtagaaactcaagatctcacttaaggtttctggtctaaactgttctcaaacttctttagatgaaaagtggaacttcaattaaaaaaaaaattgtcagtgatcctgtgtatttcccatcacatttcatgtaatattaaaaattaataaaccacacaaatatttaaggcaggaacagcaaaaagaaatgacaaaggagactaagtgagagtggccagaaagagaggagaaaacttggaagatggtggcctcacagaagtcaagggatgaaagcatttgaaataagtgacttggacaacagaaacatattgaagagagttcaaatgagatcagagttgtaaaatatctcttggatttaaggagctccttagtggagtggtgaagactgaagctgaaaagacatagttttaggaatcaatgtgaggtagagaatcctttttagaagcctgcttctgaaggaattgagagaaagggcaataacttgtgagagatcttggagaaaaacaaaatatgtgatttttattttaccaaaatttttatgctttttaaagtcctacactctttagagacttgatattacttctgctttgaagatttttaaaaatgcctttcatgatatatgtgtatatacacacacacacatatcatatatatgtataaaaaaatttaacccatccagacactactttgatgtatcttttaaagtggtgacataaatggagttttctcctaagttgcgaattcttccagcactatttcatgttgggcagtgggcaacccaccagaacaaatcagccctcctgagaaaacctttacaagaagttagctattccttttccacatcaaagattgagtctgcttttgactttgctctgcctagataaaggtcacatacttttgatccctaatcatctattcatattttacttcccagcatagcgtgggatttccttaggtaggtatcctatgttcttttttataggatgtgaccgcgtgcctgccagaatgggaggatgggcatttttaccttgccaagtactatgacaaattgatgcccatggtcacagacaacaaaatggaaaagcaaggtgatctcatccggtatatagttcttcattttggcaggtgagtatgagaactgcatgtttgcagattaaatatgtaaggatgactattaatattgaaactgttatcacatgtcttagcatattctaggtattttctggcttatgactgattcagtgtatcaccttagataagatgtaaatttttcctttatgcaacttttttcttcactttaaaaactttttaaatgaaaaaagtgatatagacatgtgttttggaaactctctctaactatgttattcctctgctctcacaccaacacagcaatcatcaacacagtagaagacttacatgaccaaagatgtgggtttttttccccatacaccaagcagtggacaccagcttggtgtcctccaattctgttctgacactctctacctggagacggtgtcatacctcagaggttgagggcttggtgacacaagaccatctcctccttcccttagttgcaagtctgggcctctggaacttctgaccaactggcttcaagttggggttctcacaacctcctcttgggttcaataaatttgctagagtggctcacagaactcagggaaacatttttactagtttattaagaaagatattttaaaggatgcaaataaacagtctgatgaagagataggtagggtgaggtctggaggggtccggcacaggagcttctgtctccatggagatgggctgtgccatcctcatggcacgtggatgaggtcttcttcaccctcctgtcagcctccacgtgttcaactctctggaagctctccaaactctgtcctgtggggtttttaatggagtctttattacatgggcatgattgacaaccatgtagaaatgtgagtggacaaatagctcataatgtaaacccagcaaggtctgtctgttcagacttttcttggccttttctatgtagcattccttcctctaggatatggggcaggatcctctctgggatgaggatcttttgactcacagtcagattagaatcctcccttaggcagatgagtgaaggacaggagaagctcatagagagagattctgtttcctgaggcctaaagtgccctgacattaaaacgaggagttaggagccagtaactgtgaactaaaaccaatatatgtattataatwccacagcctggatttttaaaaaaattcaacagcaccaaattaagtatccttctcattccagaccctcatcccctgagtccccaaccatagaattccagaagacccttaatgtcatatttcgtggttwtatatatatatattttattttattttatttcattttattttattttatttattttaagacagagtcttgctctgtcgcccaggctggagtgcartggcacgatctcagctcactgcaacctctgcttccaggttcaagcgactctggctcacccttctgagtagctggtattacaggcgtgtgccaccacacccagttaatttttgtatttttagtatagacggggtttcaccatgttggtcaggctggtctcgaactcctgacctcgtgatccacccaccacggcctcccaaagtgctgggattatagatgtgagccactccactcagcctttgtggttatattttattgcaatggagtacttccttctagcccattccaataagaagtggtataatatatatacatgaaaatgattttgacattagacttgtagaaagtacttattcttaaactagttaataggtgaaatataacttttaatttcatatatcggtgtattatagtcaagtataatctcaggcctactgtttatgtttttataaattattaattgctaagaaacaatatcattccatacattctccttatcatactcatgtaccattgctttacatggaaggatatcttcagatcaatatatctgttaaaattgcctattatgaggtactatgacttctcagttaaatattttcagaaattaaagcaatatctgtaagccacgggtggtggtgtgtgcctgtagtcctagctactttggaggttgaggtgggaggattacctgaacctgggacgtcaaggcagtggtgagctgtgattgcaccactgcacagcagcctggataacagagcaagaccctgtctcaaaaaaaaaaaaagaaagaaagaaaaaaaaaaaagaaagaaagggggcatatgttctcaggatctcctgagggctgtgtcacacgagaaaaaaaatggaaaaaaaaagcaatatttgttcatcatcaatggtattagggtagcaaaatgagtaaaggtactaaaggcagttcttctttttttttttttttaattgacaaagtatcactctgtcactgaggcaggagtgcagtacaatcatagctaactatgaccttgaactctgggctcaagtgatcctcctgcctcagcctccttagtagttaggactataggcacatgccaccatgcccaactatgtttttaaataattttttgtagagacagggtctcactatgttgctcaggctgatcttgagctcctggcctcaagcaatcttcccacctcagcctcccaacgctctgagattacaggtgtgagccatcactcttggcccagttcttttgaaaaatgagtaatagcttcttttgtttgctctttagtcttagtatatatcatgtgccttgggatatagaatttacttaacacatttcttttaaaacaagtggctatataaagtcctctatatgcataaaactgttatgtatagtgagtatttttaaagtacccttcaggaatgtaagtacattttaaaacctgtttctatccatagtagttaaaataaaatatttgtatgcttaagggagtaaacttagctattgagacatatttatcccctgactgaataattgtgttattactrattaaatatcaatgtttgcccttaagaatctaggatccaattagggttagaaaccttaagtacataaaacatttaaataatggtacataatagaatgtgtgattagatatcaaaataggctgggctcagtggctcatgtctgtaacctcagaattttgggaggctgaggcaggcagattgcttgagcccatgagttcaaaaccagccagagcaacatggtaagaacccatctctaccaaaaaaaatacaaaaattatccaggcatggtggtgcacrcctgtggtcccagctacaagggaagctaagccaagaggattgctygagcccaggaggtggagattgcggagagctatgatcatgccactgcactcctgcctgggtgacagagaaagactctatctcaaaaaaaaaataaataaataaatcaaaataaatgtagtaaatatcagatatggctgggcacggtgattaatgcctgtaatcccagaattttgggatgctgaaatggaaggattgcttgagcccaggagttcaagaaaagcctagggaacatggcaagacctcatctctacaaaaaataaataaatcagccaggcatagggtgtacaaccatggtcccagctatgtgggaggctatattagccagataccaaaagtgaaccaaacaagtccagaagtcatggaggtcaaaagtcaagccacaagccactggctttatgatttcaaaagtgtacttctttgcattgaattgctacaaaagtctggtaaacctcatgaagaaggtatactagtaatccaaattcaacagcacattaaaaggatcattcaccatgaccaagtggaatttactccagaatgcaaggatggttcaacatatccaaatacatatatttgatataccacattaatagaatgaaggacaaaaaccatatgatcatctcatctcaatagatgcagagaaagcacttgacaaaattcaacatccttttatgactaaaaagtttcagaggggcggttccaagatggccgaataggaacagctccagtctacagctcccagcatgagcagcgcagaagatgggtgatttctgcatttccaactgaggtaccgggttcatctcactggggcttgtcagacagtgggtgcaggacagtgggtgcagcgcaccgagcatgagccgaagcagggcaaggcattgcctcacctgggaagtgcaaggggtcagggaattccttttcatagccaagcaaagctgtgacagayggcacctggaaaatcaggtcactcccaccctaatactgcgcttttccaatggtcttagcaaacagcacaccaggagattatatcccgtgcatggctctgaaggtcccatgcccacggagcctctctcattgctagcatagcagtctgagatcgaactgcaaggcggcagcaaggctgggggaggagtgcccgccattgctgaggcttgagtaggtaaacaaagtggctggaaagctggaactgggtggagcccactgcagctcaaggaggcctgcctgcctctgtagactccacctctgggggcagggcatagctgaacaaaaggcagcagaaacctctgcagacttaaatgtccctgtctgacagctttgaagagagtagtgcttctcccagcacggagtttgagatctgagcactgacagactgcctcctcaagtgggaccctgacacctgagtagcctaactgggaggcatcccccagtaggggcagactgacacctcacacggccgggtacccctttgagacgaaacctccagaggaacaatcagacagcaacatttgctgtgcagcaatatttgctgttctgcagcctccgctgctgatacccaggcaaacagagtctggagtggatctccagcaaactccaacagacctgtagctgagggtcctgactgttaaaaggaaaactaacaaacagaaagggcatccacaccaaaaccgcatctgtacgtcactatcatcaaagaccaaaggtagataaaaccacaaagatggggaaaaaacagaacagaaaaactgaaaattctaaaaatcagagggcctctcctcctccaaaggaacgcagctcctcaccagcaacggaacaaagctggacagagaatgactttgacgagttgagagaagaaggcttcagatgatcaaacttctccgagctaaaggaggaagttggaacccatggcaaagaagttaaaaaccttgaaaaaagattagacgaatggctgactagaataaccaatgcagagaaatccttaaaggacctgatggagctgaaatccacggcacaggaactacgtgacgaatgcacaagcttcagtagccgattcgatcaactggaagaaagggtatcagtgattgaagatcaaatgaatgaaatgaagcgagaagagaagtttagagaaaaaagaataaaaagaaacgaacaaagcctccaagaaatatgggactatgtgaaaagaccaaatctatgtctgattggtgtacctgaaagtgatggggaaatggaaacaagttggaaaacactctgcaggatataatccaggagaacttccccaacctagcaaggcaggccaacattcaaattcaggaaatacagagaacgccacaaagatactcctcgagaagagcaactccaagacacataattgtcagattcaccaaagttgaaatgaaggaacgaacgttaagggcagccagagagaaaggtcgggttacccacaaagggaaccccatcagactaacagctgatctctcggcagaaattctacaagccagaagagagtgggggccaatattcaaaattcttaaggaaaagaattttcaacccagaatttcatatccagccaaactaagcttcaaaagtgaaggagaaataaaatcctttacagacaagcaaatgctgagagattttgtcaccaccaggcctgtcctaaaagagctcctgaaggaagcactaaacatggaaaggaacaatcggtaccagccactgcagaaacatgccaaattgtaaagaccatcgatgctaggaagaaactgcatcaactaacgagcaaaataaccagctaacatcatactgagaggatcaaattcacacataacaatattaaccttaaatgtaaatgggctaaatgctccagttaaaagacacagactggcaaattggatagagtcaagacccatcagtgtgctgtattcaggagacccatctcacgtgcagagacacacataggctcaaaataaaaggatggaggaagatctaccaagcaaatggaaaacaaaaaaaggcaggggttgaaatcctagtctctgataaaacagactttaaaccaacaaagatcaaaagagacaaagaaggccattacataatggtaaagggatcaattcaacaagaagagctaactatcctaaatatatatgcacccaatacaggagcacccagattcataaagcaagtccaagagacccacaaagagacttagactcgcacacaataataatgggagactttaacaccccactgtcaacattagacagatcaacgagacagaaggttaacaagaatatccaggaattgaattcagctctgccccaagcagacctaatagacatctacagaactctccaccccaaatcaacagaatatacattcttctcagcaccacaccacacctattccaaaactgaccacatagttggaagtaaagcactcctcagcaaatgtaaaagaacagaaattataacaaactatctctcagaccacagtgcaatcaaactagaacccaggattaagaaactcaatcaaaactgctcaactgcatgggaactgaacaacctgctcctgaatgactactgggtacataacgaaatgaaggcagaaataaagatattctttgaaaccaacgagaacaaagacgcaacataccagaatctctgggacacatttaaagcagtgtgtagagggaaatttatagcactaaatgcccacaagagaaagcaggaaagatttaaaattgacaccctaacatcacaattaaaagaactagaaaagcaagagcaaacacattcaaaagctggcagaaggcaagaaataacttaggtcagagcagagctgaaggagatggagacacaaaaaacccttcacaaaatcaatgaatccaggagctggtttttggaaaagatcaacaaaattgatagactgctagctagactaataaagaagaaaagagagaagaatcaaatagatgcaataaaaaatgttaaaggggatatcaccgatcccacagaaatacaaactaccatcagagaatactataaacacctctatgcaaataagctagaaaatctagaagaaatggataaattcctggacacatacaccctcccaagactaaaccaggaagaagttgaatctcttaatggaccaataacaggctctgaaattgaggcaataattaatagcttaccaaccaaaaaaagtccaggaccagatggattcacagccgaattctaccagaggtacaaggaggaactggtaccattcattctgaaactatttcaatcaatagagaaagagggagtcctccctaactcattttatgaggccagcatcatcctgataccaaagcctggcagagacacaacaaaaaaagagaattttaaaccaatatccctgatgaacattgatgcaaaaatcctcaataaaatactggcaaaccgaatccagcagcacatcaaaaagcttatccaccatgatgaagtgggcttcatccctgggatgtaaggctggttcaacatacacaaatcaacaaatgtaatccatcctataaacagaagcaaagacaaaaaccacatgattatgtcaatagatgcagaaaaggcctttgacaaaattcaacagcccttcatgctaaaaactctcaataaattaggtattgatgggacatatctaaaaataataagagctatttatgacagactcacagccaatatactgaatgggcaaaaactggaagcattccttttgaaaactggcataagacagggatgccctctctcaccactcctattcaacatagtgttggaagttctggccagggcaatcaggcaggagaaagaaataaagggcattcaactaggaaaagaggaagtcaaattgtccctgtttgcagacgacatgattgtatatctagaaaaccccatcatctcagccccaaatttctttaagctgataagcaacttcaccaaagtctcaggatacaaaatcaatgtgcaaaaatcacaagcatacttatacaccaataacagacaaacagagacccaaatcatgagtgaactcctattcacaattgcttcaaagagaataaaatacccaggaatccaacttacaagggatgtgaaggacctcttcaaggagaactacaaaccattgctcaaggaaataaaagaggacacaaacaaatggaagaacattccatgctcatggataggaagaatcaatatcgtgaaaatggccatactgcccaaggtaatttatagattcaatgccatccccatcaagctaccaatgactttcttcacagaattggaaaaaactactttaaagttcatatgaaaccaaaaaagagcctgcattgccaagtcaatcctaagccaaaagaacaaagctggaggcatcacgctacctgacttcaagctatactacaaggctacagtaaccaaaacagcatggtactggtaccaaaacagagatatagaccaatggaacagaacagagccctcagaaataatgccacacatctacaactatctgatcttcgaccaccctgacaaaaacaagaaatggggaaaggattccctatttaacaaatgatgctgggaaaactggctagctgtatgtagaaagctgaaactggatccttccttacaccttatacgaaaattaattcaagatggattaaagacttaaatgtcagacctaaaaccgtaaaaaccctagaagaaaacctaggcaataccatttgggacataggcatgggcaaggacttcatgtctaaaacaccaaaagcaatggcaacaaaagccaaaattgacaaatggggtctaattaaactaaagagcttctgcacagcaaaagaaactaccatcagagtgaacaggcaacttacagaatgggagaaaatttttgcaatctactcatctgacgaagggctaatatccagaatctacaaagaactcaaacaaatttacaagaaaaaaacaaccccatcaaaaagtgggcgaaggatataacagacacttctcaaaagaagacatttatgcagccaacagacacatgaaaaaaatgctcatcatcactggccatcagagaaatgcaaatcaaaaccacaatgagataccatctcacaccagttagaatggcgatcattaaaaagtcaggaaacaacaggtgctggagaggatgtggagaaataggaacacgtttacactgttgttgggactgtaaactagttcaaccattgtggaagtcattgtggcggttcctcggggatctagaactagaaataccatttgacctagccatcccattactgggtatatacccaaaggaatataaatcatgctgctataaagacacatgcacatgtatgtttattgcggcactattcacaatagcaaagacttggaaccaacccaaatgtccaacaatgatagactggattaagaaaatgtggcacatataccccatggaatactatgcagccataaaaaaggatgagttcatgtcctttgtagggacatggatgaagctggaaaccatcattctcagcaaactatcgaaggacaaaaaaccaaacaccgcatgttctcattcatagctgggaattgaacaatgagaacacttggacacaggaaggggaacatcacacactggggcctgttgtggggtgaggggctgggggagggatagcattaggagatatacctaatgttaaatgacgagttaatggatgcagcacaccaacatggcacatgtatacatatctaaaaacctgcacgttgtgcacatgtactctataacttaaagtataattaaaaacatatatatataaaacataacatgtatataagttgtaaagcataataatagaatgaacatccattaatctagtctaacctttatgtcacccctctatccctggaggcaaccactattcccaattttgtgtttttcattcctttgttttttaaaataaaagaggctttttaaaaaaaaacaaacttttttttaaaaaaaaatatgtatagaaggaatgtacctcaacacagtaaagaccatgtatgataaccccaaagataacatcatactcagtggtgaaaagttcaaagcttttcctctaagattaagacaaagatgcccactcttgccacttatattcaatatagtaccaggaatcctagccatagcaattcgagaagagagataaataaaaggcatccatattggaaaagaagtcatcaatttttttctatttgcagacgacatgattttatatactgaaaccctaagactccaataaaagactattagaacaaataaatgaattcaataaagttgcaggatataaaggcaacatacaaaagtaagtagcatttctatacactaataacagagtacttgcagataaattaagaagacaatctcatttacagtagctacaaaaataaaatataatacttgggaataaatacaaggcaaaagacctatacaatgaaaactataaaacattgatgaaaagaaattgaagaagacatgaacaaatggaaagatatcctgtttatgtattggaagaattaatattattaaaatgttcatagtgcccaaagtgatctacagattcaatgtagtttctatcagaattccaatagcttattctttctttccttttttttttgttttgttttgtttaaaaattctggctgggcacagtggctcacacccataatcccagcactttgggaaactgaggcaggtggatcacttgaggtcaggagtttgagaccagcctggccaacatagtgaaacctagtctctactgaaaatacaaaaattagccaggcatggtggcacacatctgtaatcccagctactagggaggctgaggcaggaaaattgcttgaacccaggaggcggaggttacagtgaaccaagatcgtgcctctgcactccagactgggagtctcaaaaaaaaaaaaaaaaaatccaataacttttttcacagaagtagaaaaaaaaatcctaaaatttgtatggacctagaaaagacctcagataaccaaagaaatcttgagcaagaacaaagctggccgggcgtggtggctcacacctgtaatcatagcgaggctgaggtgggtggattgcctgagctcaggagttcaagatcagccagggcaacacggtgaaaccccatctctactaaaatacagaaaattagctgggcatggtggcatgcacctgtaatcctagctactcaggaggttgaggcaggagagttgctggaacccgggaggtggaggttacagtgagccgagattgtgccattgcactccagcctgggtgacagactgagactatgtctctaaaaaaaaaaaaaaagaataaagctgaaggcatcacactacctgacttcaaaattataccacaaagctataataatcaaaacagtatgacattagtattaaaatggctacatagaccagtggaacagagaccctagaaatgaatccacgcatttacagtcaattgatctttgacaaaggtgccaagaacccacaatgcagaaaggacagtctcttcaataaatggtgttgggacaactggatgtccacatgcaatagaatggaattacactcttaccttacaccatatacaaaaatcaactcaaaatggcttaaaaacttaaatgtaagacctgaagctgtaaaactactagaagaaaacatagaggaaaaggttcatggcattggtttgggcaataatttttttggatatgaaccaaaaagcacagccaacaaaagcaaatatagacaaatgatattatacaaaccaaaagacttctgcatagccaaggaaacaatcaacagagtgaaaagacaacctatagaatgggagaatgtatttgcaaaccacacatctgatagggggttaatagccaaaataggtaaggaactcaaacaacttaatagtaagaaagcaaatcacctggccaggcatggtggctcatgcatgtaatcccagcactttgagaggctcaggcagatggatcgtttgagcccaggagttcaagaccagcctgggcaacatggtgaaacccccatctctacaagaaaatacaaaaattattcgggcgtggtggtatgcacctgcagtcccagctgctcaggaggctgaggcaggggcatcactttagcctaggaggtggaggttgcagtgagccaggatcatatcactgcactccagcccaggcaacagagccagatcctgtctgaaaaaataaaaataaaaatagaaaaaaggaaacaaattacccaattaaaaaaaatgggaaaagggtctgagcagacatatttcaaaagaagacataaaaatgaccaacagaggtatataaaaaaagttcggcatcgttaatcatcagataaatgcaaattaaaaccacaatgagatgtcacctcacacttgtttgaatggctatcatataaaagacaaaagataacaagcattggagaggatatggggaaaagggaacccttatacactgttggtgggaaggtaaattagtagagccattatggaaaacagtatggagattccttaaaaattaaaaatagaaatatcatatgatctagcaatcccattatggggtatatatctaaaggaaattaaatcaatatgttgaagagatatctgcactcccatgttcattgcagcatcttcacaacagccaagctatggaatcaaactaagtgtccatcaacatgggaatgaataaagaaaatgtggcatatgtatgtatacttatmacacacacacacacacacacacacacacacacacaatggaatactattcaggcttaaaaaagaaggaatcctgttatttgtgcgaagatggatgaacctggagattattctaagtgaagtaagcctggcacagaaagattaatactgaattatcttacttatatgtagaatctaaaaatgttgaactcatagaactagagagtagaatggtgattaccaggggttggagtagtgaggagttggggagatgttggtcaaaggacataaaannnnnnnnnnnnnnnnnnnnttaaagagatctactctacaacatggtcactatagttaacaaatgttttgtattgaaaattgctgagaatagattttattccacaacaaaataaatatgtgaaataattagcatgcgtgagttagcttggtttagctcttccacaatgtatacatgtttcaaaacatgtgcacaataaatatacacaatttttatttgttgatttaaataaataaatgaaatgtttaaaaacaaaaacattatgttgtgcacctttaaaaaaacctgctagctctcctaatttctggttaaattaatcttgacaaaataagaaggggaaaagaaagtccccacttcttctatagttgtagaatggtaaatgcaattctatgtcattaaactgtctctatgggtctcaaaaagatatctgtacattcgtgttcatagcaacattattcataatagctaaaacatgaaagcagtgcaagagttcattgggagattaattgatcagcaaaatgtgatgtagacacaatggaatattattctgctttaaaaaggaaggaaattctgacatatggtacaacatggatgaacctcgaggacattatgctaagtgaaataagccagtcacaaaaaggacaaatactgtatgtttccacttatatgaggtaccttcaatggtcaaattcatgaagacagaaagtacaatggtggttgccagagactgggtggggaaggagacgggaagttactgtttaataggtacgaggttccaatttgggaagatgaaaaaagttctggagggggaatggtggtgatgattacgcaacaatgtgaatgtacaaccatattaatataacactgaactgtacacttaaaaatggttgtgatggcaaattttatgttatgtatgttttaccacaataaaatttcttttgaaaataaactgatgtccaggcccctaaaaaattcaagaaggagagaactttaacttttcacaaattttaccagaaacagcgttgagtggttggtttgtaggatggtgcagaaactagacctgatggaagatgtatactggtgagtggcaagatgctaagattggaaaattatggagataaaagattctgaatgtttgaatcccaggcagaatcatttatatagttttaatatgtaggtattgattcctgttttttaataaggggagagcatgataaagccagaatttcaggaatgttagtctggaatttactgaagggtagaaatatggatttagggtgaccaagttattataatttcccagaaatagaatgattggacctaacctaggcttatggccaaagaatgcaaatgaaggcacagagatcctaaggaaaaattgaaagaagtattgatagactttgattagagcagaatttgtataatgtacaaattctgtatactgtaagtggaaacatacagtatgtacatgtttttggtacagggaatgtagaactaagtgagctaaaaaggagacagaggagtcaaaaataacttctaggaagaaatattgataccataatttttgtgaaaacggtatgtggtagtttgaatctttaaattttaattcgtataatataaaaatgacagctatgctaatagtgtttcttgtctatataattgcagatctctacaatatggaaatcagttcatatatcagtcaatgccacgaatgttaactctatggcttgattatggtacaaaggcatatgaatgggaaaaaggtataactcttcacgtaaaagttttaaaggactaggaattataactttggtataaagtcagatttggctggacagtctaatttcctagaagcttggaatgaatttgataattaagatattatgtaagtgtgagtaagatactaaatgttaaaaaggaaagacaaatcatagacttttaaagtagttttaattcagggccacaaatacaaatctgattatttcttaatgaatctaacacatattaaaatgtgttagttttagccaaataatttaccctaaaaattaaaatggatagtgaaaattaatgtcccttgggtttttgaatggctctaaatattttttctggttggacagagacaactatcttttcacaaattggcaagtgacctaaccttgggcatgggaataacatactttaaagctatttttaaagcaaaatttttcttctgtgaaatgaactgatatactgatttttctctttcctttattgttttttaaacttatttcttcccccagctggccgctccgatcgtgtacaaatgaggaatgatttgggtaaaataaacaaggttatcacagagcatacaaactatttagctccatatcaatttttgactgctttttcacaattgatctctcgaatttgtcattctcacgatgaagtttttgttgtcttgatggaaataatagccaaagtatttctagcctatcctcaacaagcaatgtggatgatgacagctgtgtcaaaggtaaaagggtcttttacctttttatatgaaaagatcttttaccattttatatgaacttgattatgtaatactaatatgtagatacaagttccagggcgtctctcctgtattagattagtaattttaaatatttttttaaagagagaaatttatagcattatatcttaatatttggatatatttaccatatgaaatgaagtaactagtatgtttaagatcaaataattcagcatgtgttttctttatgaagtctagtaaacagttaatgcttgatgcaaaatggttacctatgttttcacaaatattttaatccaaactacctgaatttttattttttttcccttaagaaacaggatctttctctgttgcccaggctggaatgcagtggtgggatcatagctcagtgcagcctcaaagtcctgggttcaagtgatcctcttgcctcagcttcccagtagctaggatgatagcggtgtgtcaccatgtacagttaatttttaaattctttttgtagagatgggatcttgctgtgttgctcaggctgggctcaaactcttgggctcaagtgatctttctgctttggcctcccaaagtgctggaattacaggcatgagctatcgtgccccgccagtacctgaattattaatactaaaaaaccgttattgcatcattaatgggaattcatatgttggtcaatatatgtaataagtaaatgtttagagaatttagacaatacagagacataaaacaaaaattaaaattcacaccttgggccattcattaatgttttgatgtaattttatttgtatattttctagcatattttaacactaaatttaattatgttgccgtacaatttcatatttttcactttattgtttccatgttattaaatataatttgaagatataattttaatatataaaattctaaaaaatagccttcaataacttatttaactgtttagttaatcattaaggttatttctatttttcttgcaattgtaacacatctagatatgtctatgtttattctcacttgtaattatttctccagggcagatccctataactttataattcacaaagttatagggtggcaatatttgtatggctcttgatagcattgccaaataaattttcagaaaatttgtatcatataaactctcatcatgaatactttttaagttttttgtcaagcaaaaaatttatcttttaaaaatcctgtataaactcttttttatgacatttaactcttttttatgacagtcatcttatcccatgcgtgtgaacagatgcaaggaaatcctcaataaagctattcatatgaaaaaatccttagagaagtttgttggagatgcaactcgcctaacagataagcttctagaattgtgcaataaaccggtactatcataatcttagtgcttataaactgatgttgggtaattatgtatataatttgagcagattttttcatttgattaattaaattaaaattctaactataggtgtacacatatatcaaaatgtatattttaattatgtatgatttgtcttaataaagcagtttttaatatttctaatacatcttacttccaaataccctctaatatttctaaaagttcttcttagtgtgaattaagaattttccgagagtagatatccatgtttctcagcaatttttagtagagaatatgaaataagccataaaaatataagtatgtaaaatattctaagttacttatggtagtctatgattatatcatatctttaaactttcaaaattcatatacattattaaactacacttacgatagggaagagggttggggttttgcttttcattcttttagtacacatttcagtgcctatgaggggacaagcactatgctaagggaaacaagatgaataaaatctattctcatgcctgaggtgcttacagtcttttagggaactaagcagatggttatctagagtaataagtacttttttcggtagatttgtgactaaagtaggaacatggttacaggagtaaccccataattctacctaagtattagagaaaaacccccaaggatgtataggaaagataaaagtgggaggtgggggtggttataaggagggagagagaagttctttaataaggtacatagctagacttcacttgacaaatattcagagtgcatcagtgtttatagatgaaaagatacagactatttctcacctttcctttatcaataaacatctcaaaagggtaatctgcatttattatctccattaatcccatttgacctctgatgcacttgacattatcaaaaacagtgttatggtggccaacatttattaaaacactaacactgttgtaagtgctttacatgtacaggtttccagttctttatctgaaacctttgtggcaagctacacttagaaatttaggatttttaagattttagtgcatatttaatatttgatatttccactgagggtaacctgttggagtatcccataatcaaacacataactgtttcttcagtgagagtttaatttacagagctctttggattttctaatatttgataatagattataggcctctactctctcctttaatcattaaacaatcctatgatgtaggtactattattaatgaggtaaatgacagaggttaaaatgggatgattaggaaatacttagaaaaccacagactgctgaacctttgtaatcaaaatattgtaaaagtgaaatttttgttatagtggaatttaaggtaaaaacaaattaaaatgcactatttattttttcaggttgatggaagtagttccacattaagcatgagcactcattttaaaatgcttaaaaagctggtagaagaagcaacatttagtgaaatcctcattcctctacaatcagtcatgatacctacacttccatcaattctgggtacccatgctaaccatgctagccatgaaccatttcctggacattgggcctatattgcagggtttgatgatatggtaaacttcagttttatatgactatgattttaaaatttagttgttaaaaacttcaaattaagataaaaagtgtatttcacaaaatctacgtgaatcttatttgtgaagaaaaataattggaaatacagaagagtaaaactaaactcatttgtactgatggcaaaaaaattcagtgattaaaaaaagttctgattcatgattcacattcaccgtaacgttttgatttttcaaatgctcctgttgttttagtatgactataatctttattttttcacaatttgatttttcttttcttttctttttttttttttttggaaacagggtctcattctgttgcccgggttgggtggaatacagtggtgcgatctcagctcactgcaacctctgcctcttaggctcaagcaatttgctcacctcagcctcctgagtagctgggactacaggtgcatgtcaccatgcccagctaattttttaaattttttgtagatacggggtttcgtcatgttgcccaggctagtcttgaactcctaggctcaagccattctcctgctcagccttcccaagtgttagtgtaacaaacatgagccactgtacccagtctatgctttgtttttaatttaagcagtattattcatcttatttactcacttcattaggtacacttaattttgaaggagtttgttttttcaaaaatcaaactacttttaattgataaagcttgaaaaacagagtctcaggctccgcagaaagatcctgaaaagatgtttcaaaaatcttttaaacattttgactgctttgaaggggggtgtctaaatttgaatatgtaagtacttgtattggcgatgaagtaatctttttatgtcatagctatttttaatgggtgaaaatgtttctgttcatagacagtcattcttttcataggtcatagataattaaaataaaagatttttaaaatacaaattcactacataatatagctggtaatattctttttttttttttacataactcaaggtttataatatatagacatttacacagaaatttttggccctaattcatatataactcatcatcttttaggtggaaattcttgcttctcttcagaaaccaaagaagatttctttaaaaggctcagatggaaagttctacatcatgatgtgtaagccaaaagatgacctgagaaaggattgtagactaatggaattcaattccttgattaataaggttgggagatagtttgcttttattttatttatttattttttattttaaaaaaatttttgactattataaaaccagattgcttttatttcagagttgctataattactatcaatctgatataggcattttagtatacaaacagatcactcttaaaaagcaggaatgaaatataaagtctttttcattttcacttaatttttttattgagataaaatgtacatacataaaacttaacatttgacagtttttgaagtatattgttcagtggcattaagtacattcacattgttgtacaaccatcaccaccatccctctccaaaacttttttcatcttcccaaattggaactctgtgtctatgaaacaattaacttcctatttcccttctcctcagcctccagcagccaccatttactttgtctccattaatttaaccatttgaggtacctcatataagtgcagtatttctccttttatgactggcttaaatcacttggcattattcaaagttcattcattttacagcatgtgttagaattttctccctctttaagctgaataatagtctattgttttccatccacattttatttatctatttatccagtgatggacatttggatgcttctaccttttggctattgtgttaatatatttatcaaaagataaataggctgggtgcagtggctcatacctgtaagcctaacactttgggaggcccaggaaagaggaccacttgaggccaagagtttgagaccagcctggcctatatagtgaaaccctgtctctacaaaaaataaaaaaaattagccaggcatggtggcacatgcctgtagtcccagctactaaggaggctgaggcaggaggattgtttgagcccaggagtttgaggctacagtgagctatgatcatgccactgcactctagcccagatgacagagccaagaccctgactcttataaataaataaatagataaataaaaggtaatcattagcattttttcagttctgttggtatttgatttctatctcaaagatgatatgaggaatcttattaaagggttattataaatgtatggttttatgtattttgaattattctgtaaccaggtatttgtagatgcatagtgtatgtctttttccattggtaaaaattgatctatactgtggaaagatgaaactttattatttttctacaagctttttttcccttcttctcattgccttcccacattttaaagtcatagatctttagcatagaaaagatatagcagtagatgagtttgttttttaaaaaaagttatagtctgcttggtttaaccaaaagtaatttaaaaattaataccacattaaaaagctatttcaaaagcaatatgaaaaggaggattattttttattttaacatattatttgggctgggtgtggtggctcatgcctgtaatcccagctgaggcgggcagatcacttgaggccagtagttcgagaccagcctggccaacatggcaaaaacctttctctactaaaaatacaaaaattagccaggcatggtggtgtacgccagtattcccagctacttgggaggctgaggcatgagaattggttgagcctgggaggcggaggttgcagtgagcccagatcgtgccactgcactccagcctgggtgacagagtgagattctgtctcaacaacaacaacaaaaaagtattgtttgttaaaatggtaccttaattcactaactactgaaccattagtatgttctctccaaagctccctgagtttttctgagtatcagatttacttgagtatcaagtggcctggctttagtttataaatttacattaatcagctttgttactttaattaaagtattttgttacattttccctcataaacatggtaaaataaaatagcctgacatactaacttagttagtaacatatttactaacatagttttgtaaaaaactatgttagttttggaggccacacactgatctttatatgagattctatggccatattgttttcctggtagttatggaacctatttcctaaagtaaaatgtatttttgatcagtgattgtgcttttgaattgagcaggttacaattacagatgtgtgcttacttcatacaggtctagaattaaacataatactgtttatttccacctgatatatcaggatcaatcagatgaaatatgtaaggctttcttctgctaagggatagctttagaaataaggttgtgataaaccgcaagaggagcaatacattttgaggatgtcatagaactcatgctcttttgtttatgtattttagaaataattaaaattggccgggcacagtggctcatgcctgtaatcccagcactttgggaggccgaggcaggcggatcactaggtcaggagatcgagaccatcctggctaacacggtgaaaccctgtctctactaaaaatacaaaaaattagctgggcgtggtggcaggcacctatagtcccacctactcgggaggctgaggcaggagaatggcaagaacccgagaggcagagtttgcagtgagccgagattgagccactgcactccagcttgggcgacagagcaagactccatctcaaaaaaaaaaaagaaaaattaaatagcagtctctgtgcctaaagacttaatgtttcagtaatacctataaagcaatagaaaataaaacagcagcattttgtcattgttaaatatacaacttaaatattttaaatacaatattcttgtcacattaatagtgaataattaaaaagaaggacctacccaggacatttttaataatctgtaaatagattagagatactgtcccagtagcttccttcctaccattcagaagaattattcatgtataccacatagtaagccttcaatgacattctttggttatgaaatgaacaatctttaaatatatttgatataacatttagaaattttgagttctatcttgtttttaaatttatgtgtattttttaacagtgcttaagaaaagatgcagagtctcgtagaagagaacttcatattcgaacatatgcagttattccactaaatgatgaatgtgggattattgaatgggtgaacaacactgctggtttgagacctattctgaccaaactatataaagaaaagggtactaaaattaattcttatacatatacagtgtgggtactaagttatataatatgggtataattggtattaatatatgctagcatatgttttttgatataagctatagtgaaatttctagattttatatacagaaacacttaagtgtttccatcccttccttcctttcttccttccttccttccttccattttgattccttccctgtcttcatcccaacaggatttgaggtagcttacaaaactatatatgaatatttgtttttcacagatattggttaacaattctgaaactatgtatatacagtactagtcttcagcaagtaagtaaatatgttgtataatgagagccagttttctcactattggagaaaggaaggagagaaggctagaatgaagtctgacgttttagattggaataagaggctccaactgtccaaacctgggataatttgagtagcaaaataaataatgattgtaaactattataacccatggaataaacaaataaacatgagtccatactgatataaacagatatttgagtaaataaataaatagggaagtgggaatagttcttcnnnnnnnnnnnnnnnnnnnnnnnnnnnnnnnnnnnnnnnnnnnnnnnnnnnnnnnnnnnnnnnnnnnnnnnnnnnnnnnnnnnnnnnnnnnnnnnnnnnnnnnnnnnnnnnnnnnnnnnnnnnnnnnnnnnnnnnnnnnnnnnnnnnnnnnnnnnnnnnnnnnnnnnnnnnnnnnnnnnnnnnnnnnnnnnnnnnnnnnnnnnnnnnnnnnnnnnnnnnnnnnnnnnnnnnnnnnnnnnnnnnnnnnnnnnnnnnnnnnctaaatgtaatgtgtaatcctggattggatcctgacccctaaacaaagtgtgctagtgggacagctggtgaaatttgaataaggtcagaggtttggttaataatactgtaataataagaatttcctgatttgaataattgtactattgttacgcaagatatgaacattaaggaaagctgggtgaagaatatgtgggaactccgtatcattgatgcaactttttgtaacatctaaacttgttttaaaataagacgtttttaaagttcatatggtgtaatacattaaaaatgaatagatcaagttgtcaaagtgaagtagaaaataagtatatgttttcatacataatttgtatggtatttgccataacaaattactgcaaactargcgagtttaaacaatagaaatttatcatctcacggttctggaggctaaagatacaatatcaagttgtcattaggaccatgatctctctgaaggctaatgttccttgcctttctcttaaccttctggtgttctgtggcttctggatgtattgtaccacattgcctttattgttacatagcattctctctatgtctctgtgtctctattttctcataagaacaccagtcactggattattgaattaagggcccaccttaatgactttatcttaacaacattacatctgcaaagatcctgttactgaataagctcacattcccaggtaccaagaattaggatttcagcatatttttttgagagataaagttcaatttataacattaagtaatactgataaatcactatataatgggtattgtgccaagtatgttatgtacattattttatttattattgttaacacgcctgattatccatccctattttatggacagtgccagagaacttacgtaacttgtctaagttcacagttgcaaaactgaaactcagagacacttgagtcagagttcaaagaacttgctgttgactattttatttatgagcatgacatattgtatatgtctgagtttggatttgaaaatatattttttcttgataatttgtgtcagtgtaaaaaatatatgtatatatacatatatattgatatgtacacatatatgcaaaataagttcattcatatgggacttaattttgagtcttgtattctggaactatttgatttcacaacactggttttaactgacattaattttcatcaataagaggcttcacttgggtaagtacggtggtccctccttatctggaggattgcttccagaataccctcacataccaaaatccacacatactcaagtctcagtcagccctgcagaacctgcatgtatgaaaagtcagccttcagtatatactgattttacatcccatgtttttgatccatgtttggttgaaaaaaatcacatgtaagtggacccacacagttcaaactcatgttgttcaagggtcatctgtattaagggaagataatgtggtttattattttattatacaatcagtaactttatgtatgcttaattgaaaaatgttcctttattcttgtttttcaataacaatttgaataaaagtagatgtttcttgtccaattttaacaaaaaaaactttgccccttttttcatttggctgatgtgattaatggatatcactcttccttgcaggagtgtatatgacaggaaaagaacttcgccagtgtatgctaccaaagtcagcannnnnnnnnnnnnnnnnnnnnnnnnnnnnnnnnnnnnnnnnnnnnnnnnnnnnnnnnnnnnnnnnnnnnnnnnnnnnnnnnnnnnnnnnnnnnnnnnnnnnnnnnnnnnnnnnnnnnnnnnnnnnnnnnnnnnnnnnnnnnnnnnnnnnnnnnnnnnnnnnnnnnnnnnnnnnnnnnnnnnnttttcatgagtggtttctgagaacattccctgatcctacatcatggtaagttaccaagaatataatacgttgttatggttgaatgtttatttttaatattttagatttatattggcctcatatgtatatggatatttcataggcattgtgtttcttttaggtacagtagtagatcagcttactgccgttccactgcagtaatgtcaatggttggttatattctggggcttggagaccgtcatggtgaaaatattctctttgattctttgactggtgaatgcgtacatgtagatttcaattgtcttttcaataaggtatgtgatatgagttactcttactaattgtgttttctctcaatttccttttctcaacaactgtatcttccttgacatacctgttagtagcagttatactcacagttgagttatactgagaatttgttgactagttttcatcagtggatcatgtagtaatgcgtattaggatggagagaacttagaagagtgatactgtaaagctagtactgaatttgaagtccaagagcataggtttaggttctgactcaattagttattagttatgtgaataagggcagatcagttcattttactgagactcagttttagagagacagagtagtttaatacgatagtttccaattctagcaacatatcagaattatccaagaattaaaaaaaaatttatagatacccaggagattcagattctgtaggtccagagtgggacctgggaataaattgaggcaattggacccatctttaaggccccctacaattttccaatattataatcctgcagggcagactggtaggttagcgcactattttcttcacctccatcatctacaggttgccttgtgctgtcacaagaaaccaagaaagatcatagatccaactgagaacaaatcagagataaaatactggcatgggttaaaccatacaagagaggaatttagggtaactgattggacaagggatgaaaggtccctagaaaaggcagattagaggacagcagaaaatgaacaactggacttcattatatgacatgttttatttcctttatgaggggatgtgagcatctgacccttggctgcttctgttgttttaagatgaaagtgttaaagaaaagtagaaatatatgagaatatttgtatttcatattattcaagaaagacattaaagaagttaatatgagactaaatattgaatgcataaaatttctctgtaatactgcttattcactgtactaaactcagtgaaaggtaagtccacttatctcctagatcttatccaagatcaagtatggtttcagttctgtaaaagcaaaggcagagctacatggctccttcatgttacaaacttctaaagtaattacaacataaatattttgagggtatttttgctttttgctaaaagaatctggacatgaagttctttgagtaaagatttttaaattctaacattgttagtttgtaataaaatgtattgtttctaagggagaaacctttgaagttccagaaattgtgccatttcgcctgactcataatatggttaatggaatgggtcctatgggaacagagggtctttttcgaagagcatgtgaagttacaatgaggctgatgcgtgatcagcgagagcctttaatgaggtaatcacctatactttgtaaataatttaacagtaacctcgaatataattattggcccctacatatgtttgtttttatgtagaaaccactttgtactgactgaaatagtttttttaaataatagctttatgcagatataatttatataccataaattcacccctttaaaagtacataattcagtggtttttagtatattcacaagattgtgcatccattaccactatctaattttaaaacattttcatcagcccaaaaagaaattccgtaggcattagcagtcactcctgatcccttccccctcccacccctgctatctacttgtaaccactcatttataatattttctgtctctatggatttacctattcaggacatttcatataaatggaatcatctaatatgtggccttttgtgtttgtcttctttcacttaatgtaatattttcagtgttcatcatgtatcagtacttcattgttttttattgccaaatggtatcctgttatatggatatactacattttctttttctgttcatcagttaagagacatttggattgtttccaccttttgtgtattataaatagtgtggctgtgaacattgtgcacaagttttatgtggacatatgttttcagttctcttgtgtatacctgggagtggaattgctgggtcatatgttaaatgctgtacttaacattttgaagaactctcaaatcattttccaaagcagttgtaacactttataatcccactagtaatgtatgtgggtttcaacttctctgcatcttttctatctttagataacatctttatctatcctggttattgtctgccttttttattttagccattctagggatgtgaagttgtatctcattgtggttttaatttgcacttccctaatgaccagtgatggtgagcatcttttcatgtctttgttggccatttgtagatcatctttggacaaatgtctattgaaatcctttgcccacttttaaattgggtttttttattctttttttttttcctttgagacagggtttcgctctgtcacccagtctggagtgcagtggcgtgatcttggctcactgcaacatctgcctcctgggttcaaacgattctcgtgcctcagcttcctaagtagctgggacagcatgtgtgcatgagccactatgtctggctgattcttgcatttttagtagagattgggttttaccacgttggccaggctggtcttgaactcctgacctcaagtgatcctcccaccttggcctcccaaagtgctgggattataggcatgagccaccatgcctggcctattcttgagttgcaagagtttgtttctttgtttgagacagagtcgcccaggctggagtgcagtaacgtgatctccactcactgcaacctccgcttcgtgggttcaagcgatttccctgcctcagcctccccagcagagaaggggttttgccatgttgcccagactggtcttgaactcgtaagctcaagccatccaccttcctcagcctcccaaagtgctgggattacaggcatgagccaccccgcccagccaagttgcaagagttctttacacattttggatacaagaccttttaagatatgattttcaaatattttcttccatctgtgggttgtctcttcactttctttgatgatggcctttgaaacataaaagttttaaattttgatgcagtctaatttgtttttttcttctggttatttttggtgtttctgttgtcatatctaagaaactattccctaatccaaagtcatgaagatttacacctatgtgttcttctaagcatttttgacttttagctctgctatttaaatcttttatctgtcttcagttattttgtagatatggtgtaaggtaggggtccatattcatttttttgcatgtgcatatccattagtcacagcaccattttttgaaaagaatattttgcccctcgtttaattatcttggcttttttgttgaaatggtcaattgattttcagcaatattctrttgatctatatgcctaaccttatgctaacaacacagtgttttgattgttgtacctttgtagtaaattttgaaatcataaagtgtgagtgttccaactttgctttttttcccccaagatcatttagctattatgggtcccttgtatttccatattaattttaaaatcagcttggattttgataggaaggacattgaatttgtaaatcaattagggagtattgctgtcttaacaatttgggagtattgctgtcttaaccatgttaagtcttctgatcgatgaacatagaatgtttttccatttatttgaattttatttttttcatcaatgttttgtggtttttagggtcaagttttatatttaacttttaaaaattgtattcctaagtattttattccttttgattttattctaaatggaatttttcttaatttcatttttggattgttcattgctagtgcatagatatataattgatatttatatattgatattgtatcttacaatctgctgaattcatgtattagttctaataattatttttgtgccttccttaagattttctctccacaataacatgtcacctgcagatacagtttttcttcttcctttttaatatcaatgccttttatttctttttcttgcctacttgccctaactaaatcagtgtcgaatagacatgctaaaagtggacatccttgtcttgttcctgatcttaggggtagagcagtcagtctttgacttttaagtatgatgttagctgtgggaaacagattgtttgaaaggacttttaaagcttatttattcaccttcattatttaaaagctgtctatcgggccgggcgcggtggctcacgcctgtaatcccagcactttgggaggccgaggcgggcggatcacgaggtcaggagatcgagaccatcctggctaacacggtgaaaccctgtctctactaaaaatacaaaaaattagccgggcgaggtggcgggcgcctgtagtcccagctactcgggaggctgaggcaggagaatggcgtgaaccccagggggcggagcctgcagtgagccgagattgcgccactgcactccagcctgggcgacagcgagactccgtctcaaaaaaaaaaaaaaaaaaaaaagctgtctatcagacattatggtagaatactggttagttggacatatgcaaaagcaaattctctgaaataggaagtatatcatcatgtggaacagttaccaagagcccctgtgttagtctgggtcagtcaagaaataatttctggaggaagtagttgagaccttaaaagttaataaagttgaccatgcaagggagaagagagtgttctgagtgataaaaatatcaaggcaagtgaagtcatggcctgcctgagaaatacagtatgtattccagagggtatacttccaggaggtggtgctaagagatgacgcaggacaggtaagcaggggctagattatgaaggtctcacatggggcctgttactacattataactttgcctgcagagcaaccagaagtcattgaggattttaagaaggaataaaaagggggcaaggggtggaaagagataatctgatttgtactgtagaaaaaatagggtcctagtttgggccaacagccggaaaactagttagaggtttattgcagtaacccaggaaaggatgatggtgtactggatagtgtcacggccgtagagacggagataactgaagagattccaaagagatttaggagttgtaattgcatgttagaggaagacggggtgaggatgattcctagatttttgtctagggcaaatgggtggatgatgatttggggaatacaggagaaatagttgggaaaaggtaattaattttattttggagatactgagtttgaggtgtttggaacatatccaactgggtatttcccataggtaattggatttgatgtttagggtgcagaaaaaaggtctgggctaggtctatatggtagctatagatgttatatcgttattgaagacatggtaagggataaaattccttcattcaaaatatagtcatttaccagttcacagtatacacttagagatggcacatagaacccatcttactctattctccaaaacacctctgactcccctctatcttgccttttttcctgccttcccttctcttaccctcccctcacaccaaaacagaaatttcacataacttaatgaagacgtagtaatgtgtattataagagtattaccattagcttctcatccttcacttaaatattgatgtcagcaagatttcttcttgcaaagataacatcataccataatatttgtttcaattttagtgtcttaaagacttttctacatgatcctcttgtggaatggagtaaaccagtgaaagggcattccaaagcgccactgaatgaaactggagaagttgtcaatgaaaaggttagtagaaggtatagcttgatatgggctgtagtcctcatctctacaaatgaacttgatatgcagctatagttctcatctctatgcatgagaactgcttggaaatactgttagtgactattgattactctgaaatctagttctctagtatcacaatgccataagttttctttattgtcagtaatgttaacagtattcgcatttgtataataaaagttcatggcacacttgtttaaccatagacaattcacagttatgagatacagtaggaaaaactatagtacaaattgcctgaacttacagaacaacaggtctgagctttaatatcatgataccagtatgtcacaagctatgttaacaaatgcagcaattcayttcttacttagttgaagctgcaaagtttgcagatagttttgttgttgttgttgtggtggtggtggtggttgttgtttttgagacagagtctcgctctgtcatccaggctggagtacagtggcacgatcttggctcacggcaacctctgcctcctgggttcaagcagttctcctgccttagcctcccaagtagctgggattataagcgtgcaccaccacagctggctaattattatatttttagtagagatgggtttcaccatgttggccaggctggtcttgaacccctggcctcaagtgatccacccacctcagcatcccaaaatgcagggattataggcataagccactgtgcctagctcagatagttgtttttaataagttagaatagattgaggattcgttttttttggtggggggcactcttacatctttaataagtcttgtacaggcttactaaatacaatgaattataccaactatatgctaataaagattaaaaatttacattccagttaactacctaaagagtttaagtccactttcatcctactgatatagctcgaggaaggctagacctgtacgcccccatccttcatgtcatccttaaccctttgtcttgagaaagaaggtttagctgcttctttagttcttctaaaagaactaaaagaaaaatttctttttcttgctctattatcttcatctgtagggtgagattaatatttccagaattgtggaaaaattcactctgtagcagttgaagagcagatggtctctgggacatgttccttttcgttaagtgatagatatacttggcttgtactggataccttttactgagggattccaatatctgaccagttcttgaacctgttaaaacttctgctcgctccatttctgttctaaacagctgaaagagctctagcaggatcacactcaagctatatacatatctaactggacaaagccagccctggtctctacaaatagtttttttttttttttaattagctgggctcagtggcacactcctgtagtcccagctacttgggaggctgaggtgggaggatcacttgaccccaggagttggaggctgctgtgagctatgatgacaccactgcactccagcctgggcaacagagtgagacccttggcatcatactcagatccttccaactgctgggatgaagcatacagacaagtgcccactctggatataggtgttggtgttctctttctgtttctatgggtccagtctgtgttcttttgtaagatgtctgggcaagccagaccaaagtctcctatttttacttgctgatcagggccatgaagaaaaatatttctaggcttcagatctctgtttacaatacccatgttatgtatgtaaaacacaccttccactaaatcttgaaaattttttgttgcaacactggccataaggacaggcaaacttgcccacacactcttggccctgtttgtttctctcagctagccagtcccacagctggagcttgcacacctgcatctggatgtgcagcatcaggtggtactgcacctcgatccccaacaagttgaagttttctttggaagattcctcagtggatgtgaaattctcctctaggagggaattacacctgagcagcaggggctgtttcacaattgaccaggtagacaaaccagccaggccattttcctggagctccagggatgattcatattcactggtgtctcttaagacggaattgatggtgtagttcacagcttgttgttctgattttgagtgtcagattctgcaaagggtttttcttttctgaggtgagctccgcgaagataatgggtgagctgctattttcaccatttttaacaccgtattggtatctgtctgcttggtcggagaacacttccagaaatggcaactgaacggaagctctgtctgcttgtggttggaccacttgaacatgttctgtccacgcagtgtgataacgaatgatattagggtgctgaagacctgccagcaccttcattccccgtagttctttcatgtaatgtgtttttgttgcacccttaatcaggattttttaaattgcataatactgaccatctaatttattcctgaccttgtatactcttccatatccaccttttcctaagatggcaagttcttcaaattcatttaagtaacgtgaagtttgtgcttcaaagggtacttcccttgatctgattttctggatatgagaaatagcctcacaaggatcctgatgaactctctctttagtggacctcattaagtgagtaatagctctgtggtgatgtagtctcaatgagctaaacttgtcacaagtgaaagaagacagcagccccattttgataaaggtctggcaaagtaacttaaacactgtcttgaatgaactgggtttggttcacgcacatggctcaagtgcttcaccaaagaaataagcggcagctggtttgcaactgcaaaagggaaagttggctgttgtaggggttattttaatacctggagttctgctggaacataagtcatatttggagtccaggctcttggcggaaaagtcgatggcagatggcacagcaacagtctccaccccgtggccctcctctttgtgctcgtgggctgcagcgcagcccaccagcccacccagcaccacctctgagaattattcttctaataacgttattcttccttttgcattcagatatgcttaagaaattgtacagttccaagtagctcacttagaacacccatttgcatgtactaacataatgtaaatattaggcagtacagcattgttatttgaatattcattgaaatgtttaagtcctaaacacttccaaagcagatttaaaaaattatttttctagaattgtaatgtgtaaataattccctggtatttcacgtagtccagaaacatgtccaagcagttgatgttgaatcaatcttgcgagcctccaaatcagtatcacaagctaactgtatttgtttaatttcttcttttcctgtatttgctcttacaaaaggggtattggtcagtaaaatggtattaacatttattaaatgtcaaaatataaagaaaggtagtaattccaaattattaacatctgtttttggttttatgtttcttctttttaggccaagacccatgttcttgacattgagcagcgactacaaggtgtaatcaagactcgaaatagagtgacaggactgccgttatctattgaaggacatgtgcattaccttatacaagaagctactgatgaaaacttactatgccagatgtatcttggttggactccatatatgtgaaatgaaattatgtaaaagaatatgttaataatctaaaagtaatgcatttggtatgaatctgtggttgtatctgttcaannnnnnnnnnnnnnnnnnnnaaactgctttcttatacatactgtgcattataattggagaaatagaatatcatgtgttcttatggtcaaaaactatatttgcaagaaacaagcaagtctaatttcattttacaacttctattgatttccttttaaaagtcctagctattgtaaggattcacttgaagaacaaaattatatggaataaatactgtgggcaaggcgttgtgccagacttgtgcatagagctaccctctcctgccctccaggaagtgacagtctagtaagagagatatataaatataaatagcatatcattaagttcacttaataaaactttgttttaaagtgtgatagggaaaaaatataagccaagaagcgtgaatgtgaaaacgaaataaacattctgtaatttgtgtgatgctgccatactgcagtcccagaatgcagaatccagtggtcatgaaagacagcgatacttaacatttcctgagatcttaaaatccaaaaagtattaaatgtttaaggtttttctgtaagttttcatccagaagacttaaatacaaagtaacgggttaatacattcaaataagtggaaaactcttacatttaaaactgataatttcacttaagttgatagaactctcctttgctgtgcggttgaaagtgtgatggggaaaaatatgataaacccggatgcaagaatgtcaaaactaaacattaaatgatttcgtatccaaggtcttatgttaacagttgcggggggcgggtacatgggaaatttttttgaacaatttggaaaagaacgtttttaaacgtatgtattaagaaacgtaagtttaaattcctcagagaaaaaaaattattgacaaaacaacaaactaagccaagtaaatcaccagatctttcgaaatctgaatgaaaaatactgagattagcaaccctaggagacaagcggaacaaaaatcagtgttcgatacccttcccacaccttcgtacggttttcatgccacttccaaatccacttagaaagcacaactctatcatggggcattttcgcccctaagttgcaatacaccagcaaacctccgcagattccctgaccgccactggacagtaccgcggccccggccgcgcgaggcccggagggctaagccccgcccctcggacggctcggatcctgccgctctagnnnnnnnnnnnnnnnnnnnnnnnnnnnnnnnnnnnnnnnnnnnnnnnnnnnnnnnnnnnnnnnnnnnnnnnnnnnnnnnnnnnnnnnnnnnnnnnnnnnnnnnnnnnnnnnnnnnnnnnnnnnnnnnnnnnnnnnnnnnnnnncgggcgctctctatggtcggccgggcggtgtgttgtcatccgcggagcgacgaccggaggctgcggcggagccccggcggggcgtttggtttcggtttggccctgactgggattagtgttgacgatcgaaatgggagtccccaagttttacagatggatctcagagcggtatccctgtctcagcgaagtggtgaaagagcatcaggtgggtgagcgaggggcaacggctcagaaagccgaggacccggggctccgcggccctctccaccttagagctggggctttcgagccacctctttcccctcgtcgtctggacgattagtggcattagggagggggacggaaggtttgaggacgcccggatgagccgaaaggggctaaggacgcaggttgcctgtgtgtggacagagccgctgggttcacggcttctctgacagctcttgcttctgctggtccttccgcgactccgaaatgaagtcctgggaaagaacgcttttactgttctccggtttcctcccggggagctgcaagttgcctttttccttacagaggctgcgaagctggagtgggtgtcctcgtaggttcccccatcccacccagagcggcagacccacttacagacgataacagccgcttccgcacgcagtcaccttgtttactttccctgatctagagcgcggcccacccggcccccggagcctagactttccgacgtggctgatggtcatattggtgatgccttttgttactttctgttatttcaaaagcagcaccaatcccctgttgccaaaacaaaaaactcttgggccagctggggagtggggcgtaggaccttttatttggaggcctcactgtgtgacagagggggttgggaaacgaattgatagaacattaatactactaataatatttggcatgtactgaccccaggacaacgttaatgtgtagattccgaaaacgtagtttatatattggaactgtggaaagagaggagaaagcagtcgtctattaggtaaactagactttgggtgatactttggtgtttgtcacatttaatgaatttgatctcttttctgatgctttacagaaaaaaagcttgaaatttgtgtagctgattgaatcagttgtgatgggtagtattgtaaatagcctattaaattatggtttaatcggcatttacgaacatgaaggtagtttacttctggaaaggagtttttgttgctggattccaatcagatttggtagatgagaaatagactacaaaaagtttccaaggttagcttatcttgaatttatttgaaacatagattgagttaggtttagagaggtatttttttcccccggggagggctaaaaaggaaaccagtacattgcagaaatggagacaaccaactttggcttttcttgcatccttcagtcagtacctgctatatatcagtcactttatctctaaagtgcaaaaataatgcgattgttattcgtgatgatttaatacataatttgttcagtaatatttttattctgtagtctgtggcacagaatttggtttggtgaaaatatcttagattctctccatcctgaggaattttgttactgaagaatgaaaatctctttaatgcagttttatgacatggacactaaggataggttttgtgaaagctttatatagaaactgggaggagaattatttttaaatttcactgtaaataaattttaaaatttggttcattgttgtgatacctttcaaaaatgtttgattaaaaagagaccaaaggttatcagcttctctgttaagtagaacttaaagatggtaatgcctaaataagtcacaggcattcaaaagctagtcctgggcgggaaggatagggagaagaagtaagttacgggaagtcagtggtgtggcctcagtagcataggttttcagtttctctgaatcatcttgtaaaaacagaaagagaaactagaaaccaaagtttaaaatccataaaacaattacaacaaaccatgtgacatgctatccccatgaaactcaaaacataactaggtgaggcaaactatcaatagtctctagacaccgttgatattgccatctgtgcaaaagcgagaaggaagcaatggggcaacatctgatgaaccttagaacagaattccagaatagccagcggtatccactaaaagactatgctggccaattagatagcggtagctgaaacagaggagttttattcactccattattgactgggtgaaggtctaccataagaaagaccaaacaggcaggagtagtctacctcctgtgaacactcaaaactgacttgccaaggtgccattctagaccagagccctaaggaaaagggagtggaataaagtcttacggaaatgttatgctggaagtggaataaaattttatgaaagggacaatagagacaagaagagaaggagatagaccatataaaagtgaggcaaagtcatagaatcaagaaatcttagaaaacaaaccacaaagcaaaccactgtattttttaacactacccagaaacagctttgtgaacttatattccctgaacctctactcattctaaaagttcaagaaaattaaattcacataaaaatgagctacagaaaggtattgagatcaaattacatacaaagttattatacgagaaaaagggacagagtatctctccagacataaaaacttgcaatgaaaaaaatgcacacaaaatagaccaaaattataaccaaaactattatctatttcacaatgagttaaaaggcattaagaaaatgaggtaagacatgaaagaacaacgtgtatcaattatgaaaatgtgagaatgagatgacagagaaagttagaagtaaatgaaaaaaaaatgcagagctgagcctcaaatagaagcaagacgagcaaatgataccatttgagaaaacaatcggcagtggaaagatgaaattttaaaaaataaaatagatttaaaagattcaagaaaaagtaacgataagaaagataggcaaagaagacaaatagtagaggtgcctgaaaaagaaaaaaccaaagcagcataacagaatgggtactcagtaaatattttttgagtgaattaatttattagctatagcatatagcatatagaaatgcatattaaaatagacatggtatattagtatgttgtaaaacagtattttttaaaaaagtgaaatgaagcctgggattattatgattattttttttatgaaacatagtgtatatacttatggggttcatgagatgttttcgtacaggcatgcagtgtgtaataatcatatcatggagaatggagtatccatccactcaagtatttatcctttgtgttaaaatctaattacactcttttagttgtttttaaattattgcctatcgtcaccctgttgtgctatcacatagtaggtcttattcattctttttttttattttttattttggatacaaggtcgcgctctgtcaccccggctggagtacagtgacgcaatctcggctcactgcaacccctgcctccccggttcaagcaagtcttgtgccttagccacccaagtagctgggattaggcgtgtgccactacgcctagctaatttttgtgttcttagtagacatggagttttgccgtgttggccaggctcttctccaactcctggtggcctcaagtgatccgcccacctcagcctcccaaagtccttggattataggcatgagccaccgtgcctggcctgtgtttttttgttctgtttgttttaatttaaatctttttaaaaatagagatgggtttttgccatgttgcccactctgatcttgaactactgggctcaagtgatctgcccgcctcggcctcccaaagtgctgggattacaggcgtgagcccccgtgcccagactaggtcttattcgttctttcagtttttcttttatacccattaacctttcccacctctcccctgactccccgactacccttcccagcctctaggaaccatctttctattttctatgtccatgagttctattgttttgatttttagattccataaataagtgagaacatgcaatgtttgtctttctgtgctggacttattttacttgacataatgaactgcatttccacccatgtggttgcagatggcaggatctcattccttcttgtggctgaatagtactccattgtgtatataccacattttctttatccattcatttgttgatggacgcttaggttgcttccaaatcttggctattgtgaacagtacagcaacaaacaaaggagtgcagatatctgcgatatactgatttcctctctttgggttatattaacacagatagcagtggggttgctgggatcatatggtagctctatttttagtttgtttttgtttgtttgtttgtttttgcagttgcaagatttaatagagtgacatagagtgaaaacagagctcccatacaaaaggaggggacccgaagggggttgctgttgccggcttgaatgcgtgggtttacatcccgatccttgtccctcccactgtgctgtcaggcagtagatgattggctatttctttacctcctgttttgcctaattagcattttagtgagctctctgatcaggtgtgagcctaagttgcaagccccgtgtttaaagg

SEQ ID NO: 96699 - DNA, 166273 bp, Homo sapiens
  misc_feature (1)...(166273): n = A,T,C or G
ccagcttcattttaacttgctgtaaaaccttggagaaggaaaatgacaaggctagtgcctgagctgctaactttgaacacctctgtacctgttattgttctaagcaccgtatatgtatcaattcacttaagccttgcagcagtcctatgaaatagatttgtaatctccattttatagatgaggcacagaggggttaaaaaaaacttgcccatggctgggcatggtggctcatacctgcaaccctggcactttgggcagtatagtgagactctacaaaaaaatgaaaaaaaaaaaaaattagctgggcatggtggtgggcctgtaatcccagctacttgggaggctatagcaggaagatcacttgagcccaggagttcgaggcttcagtgagctacgtttgcgccactgtactccagcccgggtgacagagtaagaccctgtctctaaaaataaaaataaaataaaataaaacttgcccatgttaacatcacaaggaaatggcagagatgcgttatagactctagtagtttgactctagagcctacactttcaaccattatcttacaaatgacttatctttatgaaccaaacatatacatttgtggtgtcatttattttactctatcctatccatttgttaaatatttgctttaaaagtacgtaaattggctgggtgtggtggctcacgcctataatcccagcactttgggaggctgaggtgggtggatcacctgaggtcaggagtttgagaccagcctggccaacatggtgaaaccccgtctcaactaaaaatagagaaaaattagctgggcatggtggcgcacacctgtagttccaaatacctgggaggctgaggtgggagaattgcttgaaaccaggaggtggaggtttcagtgagctgagatcacaccactgcaccccagcctgggtgacagaaaggttctgtctcaaaaaaaaaaaaaaaaaaaagtaggccaggtgtggtgactcatgcctgtaatcccagcactttgggaggccaaggagggtggatcaagaccagcctggcccacatggtgaaaccccatctttactaaaaatacaaaaattagccaggcatggtggcatgtacctgtagtcccagctacttgggaggctgaggcatgagaatcacttgaacctgggaggcagaggttgcagtgagctgagaccatgccactgcactccaacctgggcaacagagagagactctgtctcaaaacaaaaaaaattccaaaaagtatgtaaatcacgggtgctgtgagcggtggctcacaactgcagtccaagtgctttgggaagcagaggcgattgcttgaactcaggagttcaagagcagcttgggtaatgtcaggtctctgagcccaagctaagccaccatatcccctgtgaccggcacgtacacatccagatggccttaactgatgacattccttcacaaaagaagtgaaaatggcctgttcctgccttaactgatgacattcccttgtgaaattccttctccttgctcatcctggctcaaaagctcccctgctgatcaccttgtgacccctgccacctgcccgccagagaacaatcccctttgactataactttcctttacctacccaaatcctataaaacggccccactcctatctcccttccatgactctctttttggactcagcccgcctgcagccaggtgaaataaacaaccttgttgctcacacaaaccctgtttggtggtctcttcacacggacacgagtgacacgagtgaaaggtaacatggatagtgagaccctgtctctccaaaaaatttttataaaataaaaaaacaaaaattgaaaaaaaagtatgtaaatcaaaacttatttaattcaatgaaactataatactgaaaaccgggacaggacagcagccagtttctttctcctccttgatgagaaccacctcagttcccagaaagggaggtttggtgagataactgactcagataagaaagcatccagtttagggaggaatgccggagtaccctctgcctagggctagagagaactctcaggctctcccattccctccccagcaacaagctgagcaaatcagtcgaaatccatttctctctaaggtctctgtccatatcaaataacgatcaaactcatgaaaattacttctagccacaaatcatcaatcatcatgtccagaaacctatcctgaattctcccaactctcaaagctgggtgttactctatgtgccctgcaatagcagacaagaggctgatggctccattaccagggagtagctaagccagaatctgattcccaagcccccttgctcatgtgctctctcagaatccctgctgctccctgctgcctgcctgcctgcctgcctgaaatgtctcacacccttctctgcctgaactctgctgattgattatctttccaatttgaacctcagctcttcacagcctctcctgacacctatgcttctgggaacaagttggttgctccatcctttgtgatccccaaacactcctttagtaactttatgaaagcactcacactgcagtttagttattcatgtcttccccagcagacagcaaaggtaagccctgggtttattcttccatgtacctctagtacctggcacacagcttatcaaaaaatatttacctaatgaatgaatctccttagtcatctagttcaactttttcctctaaggtttatccttagaatgtctttacttgttccagttgaagactgattcccccagctggactttagatggcctcttgtttaacgtcctggtactgagttgagctttcccacatctaaggagagccaggctggtctcttggggtctcctccaggtctcccaaccttagtctgttttcttcaccctctgctaacatctgcccaccatcctggtcactatttttggaattccttttggtttaccctgtccttccaaaaaatgtggtgccccgcgtgaaggcaacaaggcagcagcagtaaggttttgaagtcaatcaagtataaaaattatccttaaaaattccaggggaaagtgccaggtagaatgcctgagtgatcccaggacagccaatctcccactgcaatagaatagataactgtttctttgctagaggatcagctagataaacaggacttgcatttagggtccatgttgcagggaaaaacatgtgtctataaatatcagaactccatttaagaagcacatgggaatgaaattagactgaggaaatagcagatgatcatgatcacaaggcatatactttgcgtgggaatcatccacactattgaaatcttgtgtgtgtgtgtgtgtgtgtgtgtgtgtgtgtgtgtatgatgcaactttctgtgtggtcagagacaaggagaatggaactaccatcttcctcatttcacgcatttatgagtttaccccatttcttgtgtaaatgttcttcttccccctacctattgacatcctcctttatttctttgttgactttcagaattgagttgaacttcagaggtttttcaacttggagttcaggaacatctgaaattacattaatgcttgcaagtacattggtatgtacatggttttgagcagtctcctggctttcttacctttcgaaaggaggctgagatgccaaaaggttaaggaccattgtcttcagtgtttaccacataaattgcaaataggacattgagactttgttaagagaagtagattcacctgtttaacaaatactacactctgaaacaaagaaatgcagttataaccagtgaagtactctattatcttccctaaacaaaagtactgggcgtgtaaagagcaaaactgcctactccacagcagatcacagcagaccttcaaggagaaagctaaaaagcctcttgaaaattaacccccagttcccccttttcaagaacttgaatcttgtgctcattctgaaagtttccactgcggtggaggagcataataggcacttaaagaaactgggtattgtattgggatgaggagtggaaaggactatagaattgtttaacagaacaacatgataaagacttgggttgcatcaaaatcatctcacagagatcaggacacgctgattctgcaatctggggaagggtggcatcaagacagccaattctggagcagctgagaagagaatgtggcccaggagtgtttctggatccctggaataccaccaggaggtagaataccatcctttctatcttggccccagagtgtaggtgacaatacctttggactggcaagttcccagaggacaagaaaatgacttctttagagcaaggattcttgacaccttttgggacccatcatgttccattttttttaaacactaaaagaaagattgctttccccgccaaataacagcatgaacattatcttaaaaggcaaagacattaatttctatgaagccaggcacgagacacttttgggtgtcacaataagaatgacaatacgttctgatgttgagcacagaaggagggtgcatcagtgaaaattatgacagacagcatgacggtgctgagaggcaagctacggatccaagcccgcgactgctcagccaggatctctgttccctatgggagcagtgaatcacctgaactttgggtcaatggaagaagtaaaatgcataacaccctaatcctaagacacaagtcctgaccccctaaaccaaggttttcagcactttgctaaaaacacgaacaagctctaagcctggcaaagatggcaatacatacccaggttgtggaagacactgcagaggtggccactggtcacgctgggcagttgagctgctgagagtgccctgcccagccagaaatggtctttaatactcttcccctctttctttcagtttcccttctgaaaaaagatgcttttgtctttcgttctccccaccctgcattcagctaagggtttcttataaatcacccagattctcagaaacacttgagctcttgaccaaccttcttgatgagactgtccaatcaggggtgggttgcctggggggccaggttgagaccaatgaaaccctcttgagaatcgagccattagctggtcattgcatcagccacccctcaccccccgctggcctccaaataacctccccaccctcttcccgttccccaccctcagcgtcagtgtgactgattttgtgtagtcgtgggcggtggaaagggaaactgtaaattccccgcatctgttcaccgaggcggcacagtgcagtggaaagatcaggagttctggggtcacagacgcctgggtttcaatcccagcttggacttattcgaaaccttgggcaagggtcgcattacttttctgcttccccttcggtttcctcatctgtggaatgggcatggagaagcctgctaacattaccgttgaggggactaagtgcaacactacgcaaagcctctggcacatggcaggcgctaaataaaaatgggggcctctctcctcgggaaaagcgaacaggcggagacgatgaagggtgccagtgggaaagggagacggggtgggtcggcggcgctcagaggaaaggggcgaggggtcggtggcaggctccgcgcctcacagtgccagaacgcggcgggcagcaagccgggctctaaggatactcccgggagggccaggccactgggcgccgcgccagcgtccctccatcactccctcccttgtttcctcactccgccccggccttactcccctcgcttaccctgcccagccgggccagtcagcgctcccggctcagcaaccggctgtctcctgggcgtccgtggaaacgccgtccggacggaacaacttccggcccgacggcgccgtcattggctgttcgcgcgggggcggggcagaggccgccactgattggctggcggccgcggcgtcgcgtcggaacgtgactggatggtagtgtgctggccggtctgcctccgggagaaccgagcgcttccggtgcgtgtggtgagcggcgggccccgggctggaggggccgggactgggcagcgcctaaagcgccccrtgccgcttaacgcggtctctcatagccgctcgccttcctttcacttcctgttccttcagaaagcgctgtgccttggaccaaccttacttcttactattgacagctcagctaactcctattcatccttcaaaacccatctctggtcgtatcttgtttgttgctttcatcgctctggggcctccggggggatctgtgttttgtgtttgatttccacccacaccagacccagcatagggcttgacaaagagtacgtaatcaggaaatgtttgttgaatgggaatatcctatttcttttacttcctagcatctccccctcccacccgtttgcattccagaaatatttttagacgctgggcattgaatagtgaacaaaacacagaaagtcctgtcctcatggggctgacttgctgatagtgactgtcagagtcactcgctccttccttagactcttctccagtgtccctgccttcccttccatcttactgtctgttcctcttcgtttaatccctcatctccttccagagggagcacgggcaccctggtggtgggaatctgggtgcatggtgggtggtgcctgggcagaggagttgagagtggcctcgggaccaggcttagcatttagagaacagaaatgccaaattatttgcagtgcacggttccattagtttataattagtctttcatattatattagttccattggagatgagctggctggctggctttagaagttgttgttgttgttgttgttgttttttgagaccaagtctcgctctgtagcccaggctggagtgcagtggcgtgatctccactcaccgcaacctccgcctcccgggttcaagcaattctgcggcctcagcctccagagtagctgggattacaggcgcgcaccactgcacacggctaaattttttttttttttgtatttttagtagagacggggtttcaccatgttggccaggctggtcttgaacccccgacctcaggtaatmcgcccttctcggcctcctacagtgctaggattacaggcgtgagccaccgcgcccggtcgttttatttaaactctggctttgcgtgtggaagttgttacctgcctggaatgggctgcgaacgggggcggcattactagaggaggctgactacagacatttatggaatgatgacctgacttgtagaccagtggaaccctcaggcgaatgatgccacttgggggaaaggtgtggaagaggttgggtggttgattccaggggacatagaaacccattgtctagaagaagagatgggtaataggctgtctggaatgacttagaaaaggacttggagggaatctgttgatgctgacctgactccacctgttgggggatggaggcggagcttggcgtgtttgattaaggttgggtgcactgggttttcttggaagtcggtctattgcctgagcgttctgtgctgttccaccgcgccctctgctgtcytaggagtgcctagcacccttctttttctctggattgtgcttggtgctaacarcacagaagtaaaaaattaccaaagcacttctttctgggaactaattgataaccatgtattgtgtatgatggttcagaatttcagaaagatttttttttttttgagacgaagtttcactcttgtcgcccaggctggggtgcaatggcgcgatcttggctcactgcaacctctgcctcctgggtttaaatgattctcctgcctcagcctcccgagtagctgggattacaggcgtgtgccaccacgcccggctaatttttgtattttagtagagacagggtttcaccatgttggccaggctggtctcgaactcgacctcaggtgatccgcccacctcggcctcccaaagtgctgggattacaggcatgagccactatgccctgcccagaaagattttttttaacaagtagaaattcattgcagtgtgaatctgtgtgttgggagtgaaatgggtggatttggatcatgccctcagaattgctccctgcacacttgggtagacggacacctcaggaccttagccttgtgctgtgggcctgtctgtccagctggctgctacagagatgggatacctgggggaagaatgttccaggcagagagaaaagagggaagggctggagcacagggaaagggtgcaggggaaagtggcaggcctttcccaccatggatcctggacgtcttttgatttcagtattttcagacctamcctcgttcatgatgatgagcatatgttctcacttgttgctaataagcagtgcggcaggttttctttatacatttatcttcatggatttatacatctagcaaacatatgctagtatttgtgtaggataaagttctacagtggggttgctggggtgaaaatgatgtgtttaaacttgtaacacatatgaccaaaatggaccttccaaaggcatttttaaagtcctgtctctttctctgtaggcattgtctcttcaggtcttctttttttttcttttttttttttttgagatggagtcttgctctgtcactcaggctagagtgcagtggcatgatctcagctcactgcaacctccacctcccgggttcaagcaattcttctgtctcagcctctcaagtagctgggactacaggcgcctgccaccatgtccggctaatttttgtatttttagtagagacggggctttgccatattggtcagactagtcttgaactcctgacctcaggtgatccaccaaccttggcctcccaaagtgctgggatttcaggtgtgagccatcacgcccagcctaggtcttcttttatgtccttcaataaaagttttagttttctttccttttttttttttaattttacttttttgagacagagtctcactctgtcacccagtctggagtgcagtggcacaatctcggttcactgcaacttccgcctcctgggttcaagtgattctcctgcttcagcctcccgagtagctgggactacaggtgcgtgccaccacgcctggctaatttttgtatttttagtagagatggggtttcactatgttggccaggctgctcttgagctcctgaccttgtgattccccccgccttggcctcccaaagtgctgggattacaggcatgaaccactgcacccagcgcttttttyttttcttttctctttttgagatggagtctccctctggcacccaggctggagtgcagtggtgcaatctcaggtcattgcaacctccacctcctgggttcaagagattctcctgcctcagcctcccaagtagctgggattacagttgtgtgccaccaggcctggctaatttttgtatttttacttgagatggggtgtcactatgttggccaggctggtctcgaactcctcacctcaagtgatccgcccacctcagcctcccagaatgctgggattacaggtgtgaaccactgcacccagacttactataagtcttcatgtaggtcttgcttattttttacagatttacccccagctattccatagtttcaatttcaaaaattttatcttctaactaattgggcctgatatgtagaaaagccttttttgtttttgtatttattctttttctttctttttttttttgagtcagagtctcgctcttgttgaccaggctggagtgcagtggcacaatttctgctcactgcaacctccgcctcccaggttcaagcgatctcctgcctcagcctcccgagtagctgggactacaggtgcctgccaccctgccycgctactttttgtatttttagtagagacggggtttcaccatgttggccaggctggtctcgaactcctgatctcaggttatccacccacctcggcctcctgaagtgctgggattacaggcgtgagccaccacgcctggcctgtgtttattcttatgagtgttgagttattggatttcctaggtgacatggtttcttataactacatacatattcttccatgcacattttctgacggttgaccttgtttgatcttaggtggtttggctttgaatgacagcaagaactctgtctttaatggcttcattggtagcgtatgatgattcggactcggaggctgagacagagcatgcaggaagttttaatgctaccggccagcagaaagacacttctggtgtggccagaccacctgggcaggattttgcatctggtacactggatgtgcccaragcaggggcacagcccacaaagcatggctcctgtgaagacccagggggctatcgccttccattggctcagcttgggasaagcgatyggggatcttgccccagccagaggctacagtggcccgggaaggagcctcaagtcaccttccccatcaaagagccttcttgttcttctctgtggaygagccatgttccagccagccacatgcccctggcagctgcccgctttaagcaagtaaaactctccaggaactttcccaagtcatctttccrtgctcaaagtgagtctgaaaccgtaggtaaaaatggcagctcttttcagaagaaaaaatgtgaggactgtgtggtaccctatactcccagaagactaagacagcggcaggcattaagcacggagacaggcaagggtaaagacgtggagccacaggggccccctgcagggcgtgccccagcccctctctacgtgggcccgggagtgtctgagtttattcagccrtatttgaatagccattataaagaaaccacagttccccggaaagtgcttttccacctgagaggccacaggggccctgtcaacaccattcagtggtgtccagtcctttctaagagccacatgcttctctccacttctatggataaaactttcaaggtaagacttgaatgaaaacttctgctttcagatgctcttaggaatacactgctggaataatagtgaagtggagggaggttacaggctgaacttttttttgtgtgcagatttctgtaattccctttgttgcattccagaaagggtcatctgtggtcagctccgggttgtgggttccttctgccccaacccttccctgatgctgccttgctcaggttaccagaggatactgtttcttatccctctcggaggccgtgagggaggaggtgagartgattagtgggagaagaaaagcaggcccaggaccaagccctggggactggggacatcctcggtgaccctgtggagcattgagccatgccagctctgtgcctggtgctgtgctggtttcaagggctgttgggagaggtaggtagacccagcccctggtgtcagggcttgcacagtgaggcgggagccgtggacaagtacacagactcaaccctgagctgtgaggacggcccccagtaggacacacaggtgctctgggagcccaacgggagggttaccagcccagcccggcagggctcagtgaaggcctcctgaggaaggggaaggttcgcttggggatgggggcagaagggcgtgcttggctgcaggagccctgtgtatgtgttggctccaagcatgagggcctgggagctggcttcaagcatgtgtgggtgagggacttgaggctggggaagcaaggtcagggaaggttgcacgtgcccttctggggacttctggttttacatggaaactcttttttgcattgtcttatttattttacaggctactgaagtgatagtaatgtagtcccccagtatgsaggtacagtgtgataggtcgttgtgcccacctgggacctgtctccagcccttcgagctgtgcactgcatccctcctctctctcctcgcagctagcaaagcacctgatatgtagcgggtgccaactaaatgctagctgaacagaaagctcttggaaaggaaataacttcaagggacctggcttcacatccagctttgctgcagagtagctagctggtcgaccactggccggctgccttcctgtggagtctagtgtctcatttgtaaaagggcaaaatcatacctgggtcatgtgctcatgtgagaaaaatgctgaaaaagtgccttgcacagagccaggtacctcataggcgctcagtaaatggtggttcccttgcccttgtttcctcagagttctggaaccaactttcctacatcttttctcttgcaaattacattttgagcttttctccctcggaaacattttcttaagtgaagaaaggaagctccaagtatagagatgtctttgaaatgagctgaattgatgggtggcatttttaagtggcgaactggagtcctgaagtggcttgtctgtgctcttttctagcaagactcagagtcctgtgggagagaacgtcatattctctcttcagcctggagttccaggattttccacttaggtctttggtgcttttcctgccattccgggggctgtgaagtgtgcgcggaggcttctggcatccctggcgtggatcacagcatgctgggattgatcctgtggccccggggcttctctgctctccttcccaagtctgcgctgcaagggctggaggatgggaagcccatctggagggttgctggtgggcctgggcagtgtctgactggccctggagttcaagtggtggcccttgtcctccctgtgctcaccttcctgttgaggccttcttttacctgcccgctcacctctggagttctctctcctgatggtgaggggcagacctggggccctgtgggactggccttcgcctggtggcgtgaagtgctccctgggccctgctggcagagtggcagcttgggtcacttttgcctgggaaatttagatttcctaaacagaagcatccccatggtagtttttgagcagagagcacctgagtagaggcattgatttctggccttgtggagtagacaaatgtgccaggcacggtgccactggggacgtggggggagagacgtttctgcccccatggaggggaaactgtgagcagccaactaactgtgacacctcatgaccagaagagggcgcagtgggcccagcttggaatggcagtgagggtggctcagactgagggactgtggtaggaatgccctgctcctgggcgattcagagacctgggtccgggtctgtggggctgccctgggtggggccaggcgccgcagctgtgcccgcctgtcccgaggagactgtgtgtgctgcaggtgatgacactggcatgggccccttgggctgccaggcagcttctggggagccccacccactgcactgtgcaccctgggttccttcccagggcagagcacatttgctgtcatgaggttgggccagggtcagcatggctgctagggttggcatctcctgaccctctttttttactgtggtgtcgtgaacattagggcttttataagccatagatacaaatggtgggccagggccctctctgttttaagatatttgtcagttttcagtgatggggttatttggcaaattggttttgggcaaattgactttgaacaacttttcagtgtgaagagtgtatggcaggggctggaggagccaggatgggaagacagattgggaaccggcggggagccaggcaggagctgtggccagaagtcccggctgaggcctcaggcttgctgggccaccaggtttgtgcgtggcctggctgggaggcacatggtgttcttttccctccttggtgtcagaggtggggcagcatggcagatcttggggacctggtgatctggggaaggcagtgtgtgggtgtgggtggtgggtctggagtggggatagggcctcgggcacaggcaggagtcctggctggctgcagcccagtccctggaggagaggaaatggtgggtgcagcatggaatgagctcaaagaggcgggtgcagcagtacasccttcccagggtgctttccccctgccttttggttaaaatctgccagtgtcttctgggcccctgctggatcaggaaggagggaagagcttgggggctgggtgacaagacctgcttgggtccttcctctacggccagccccttggttgcgtggtctctggcaagttacctcacttctgagccttcatttgagtatctataaagtggagagaattaaacatgcctcgctgggtttttgtgaaaagtaaacgatattagttgtgaatcaccaagtgcartgcctggcacatagcaggcacttagtgtgtgctcgagttcctgcttttccccaagaatttcctcctttccttgacttgtgctcatgtcttattttacgtaagtagccatggaagcatatcagcttcacctactagactttaagcttcctgagccagaacccatttttatattccccagcatctggcacaaaattgtgtacatgttaagtgatcgataaaaattaaaacaaattttttggattttatcgcaagcctttgggaagggattgtcttttgagtggataaatcatattcgccactagggtgcacagtaagacttaatataagcagctcatccaagcttctagaatgtggaagaatccttgattcaaggtaacatttactgaaaaatgatttctttctgatcaggagaaaaacaacacagtccaacttattaatctaaagaacatggagtgccagttccttcatatccttaaaacgtagcttcggaattcatacatttcaactggacacattacagtggaaagatacttattttartatgttctaaatgttctgtgagctgtaaaatatgcttttattagttttgaaaaatttacagctagagaaattaagtaaaataaaacaatgactcataattctgcaccgctgctctttcctgacgatcccttcctccccttgtctgtgaacgtgcttgtttttttcatagctgtgatcccagcacggatacccttttatatactcttttcatctcccagtgaactcttttggcttaacgtgtttgaacacccactgcacgtaaaggtagaaattcagactttgatgcctttttttgaaggaaaacatgtacgtggcctgcgttaaccaaaaacacaaccagccgttattgaatgctcccatgtacagaaccctctgccaggcactgagagggagtcccaaaggaataagacctttgggtgggtgacagaagacccaccagggaccttctgtacctgtatgaaaacctgcagttctgaaacacagaaggtttttaaagaaaatatatgaattagatgttgtttatttgctttacagaataatttgctctagaaattctttcagtaacaagcttccttaaaatactttgaaaaaaaaccttttaatttttgaccatgaatgtaatagatgcttattgtgaaaaactttaatgatgcaggaaatatgaagtatgaaggagaaacagaaatcattgataactcccaaccccaagtcagtgcctcattaacatgaggggcctccctggtcgggggccctacattcctatctgtttacataattgggcttattgcatagtatgtgcagttttgaattcttcctctgctgcccaatcttctgtaacrtgtaaggggaatttttctaccttattaaaaacttttccccaaatatatttttataactgtctcaagtttcatactttgctycatcatttccatgttgtttcctataatttcctgcttttgtttaaaaaataatcagtattacagtgaatatggctatacataaatattgtctttttttgctgccttaatgcagttaagatgggctttgaggccaggcgcggtggctcatgcctgtaatcccagcactttgggaggccgaggcaggcggatcacgaggtcaggagattgagaccatcttggctaacatggtgaaaccccgtctctactaaaaatacaaaaaattagccgggcgcggtggtgggcggctgtagtcccagctgctcgggaggctgaggcaggagaatggcatgaacccaggaggcggagcttgcagtgagcccagatcgcaccactgcactccagcctgggtgaaagagcgagactccatctcagaaaaaaaaagaaaaagatgggctttgatttacacccaggcattagctaaagcccttgtgtgtggtgagagtgggacctgattagattggcaaaccttcagtaccactgttgtactccttggctcccatgccaaatcttctgcttggtagctgtgtgactttgggaaaatcacttagcctctctgatcccctagttcctcactggtaaaatggggataattggtaaatggccaccaattaaggttgttgctgtagagctgaaatgagaagatccagcctagtgcctgacaagggagaggctgaggaagcatgtttctgattcccctgtacctgtcttgattagttataaaacaaagtgtagaaaagacaaatcacccagaatcctccaacttactgtarctcttgttttttgtgaatcttttcattgtctctatgcacacgtttttaaagcgtttcaatctcagtgttcttgagataaatacttttagaatctaaagagtttgaggattgtctgtgccaagccattcatgcactcccttttcatgtactgaacacttggcaggtcygtgttggagagctggttccctgtccccaaagtggtcacatttaaagcatggatgagaggatggagagcgctagccattgctgagtgcttaccatgtactaggcatgttctaaacgctccgtctcctcttcattacaggcctgagaggccacttctgtcctcattcccattttacagatgaggaaattgaggcacagagaggtcaagagacttgtccgtggtcacacagctagtaaatgatagaggcaagcagggaagcttcagactcagagcctgagcagaaagagctaccaccactcacrctgccctcctgcctctgagaataagggatggaaaagcgcatccccttcacccaggtggtgtccaagctctatcccagcttccaaattttgtggttctgttaagggacatacagagaagagatgatttctggggtggtttggatttgcatttttatgtatcacaggatcctgttgatttatcattgttagtgaatctgattacattaagatatcttagatgtgctttgtagaaagtgatctatttcacattcaaagacaagggatttatggctctaagtgccagagtgagggtttatttcagttttgaaagaattattcttgatggattttacaaaatgagattgagaaatgatttgatgtgtggagtgaggagttgtggagcattatgcagatgattggcaatttattctaagcacgaggcaaatctattggcaatgagaggcgcagctgggaaggaggtttgggtggtggtagtgggcctttggtatttggggagtgaatgattaacagtgcatccagggtaattagatgaaggtgaggagagaattggtgatgtgtgtgtgcgcatgtgcgtgcatgcatagcgttcatctggttcatttgatagaggcccatagaggggaagacacgcccgaggacacacaataggtgtttggatgcttcctagtctggacactatatttgcttctcttctttcccaccttccagaggactttcagaatcatctgaattaccccaggattgggagtgtggggctttagactggttggcagcagagctgccgagcctctgggaagagccatgagattctgagctggaatcttctcttcgtgggaagtgaagtttttttgacactcctcctcccccatgtgaaagccgcgacatttctgaggccaacaaatgagacatttcccagttccagttgccttacaatcttgtatcttacagaaaaaaccttgggttgaagaggaataagaaaaggaaagtgtagcagaacccaagctgtgttttctgctttttaataacttcattccatttaacttaaacagttcagtgtaccaagggcggggccttgtgctcgccagaagctgacaggaagaaaacagccgtgtgaaggtgcagcctctgtcctcgagaagcaagcctcattcactctcatcccatgtcattaagggaaggatagagcaatttggaaaaatgcttttaatgtaattgaaaaatgcagattgcaaaattggcgcacttaggagtcgagacagtctagtaaattatttcttgttgcttttaaaactcggagacagtagactcttaaaggtgcttgtctaatgcccagtgatggcctgtgtccaaatgagttgttttagatttaatttgttttatcataaaagtggtaaaattttgggaaaaaatgcaagaaaatggcagaaattaaaagataaaccatagacccttcattcaagcctaatgaccatgaacattttgcaagcagcgtttccttctagtcttttttccctacatatatcaactagttttaatcatatggtaggtactttgtttttgtagcctgcatttaaaatcatagggtggtcatttctcccccagattgttagtattatttcctcttaagagaagggttaggtaagtcattccaaccttttaaggtttccttctagcttctgctgtttcttgtcaggtgttttcttttgtctattctcccagatgaacacagctctcatgcggacccctcatatactggggggagtggagcaagccgggggacagaagccctgaggggcagtcagaaggtacatgtgagtgagaccaactgtgtcagcccaggatagctggaagcctgccttcacctggcctcccctctggcaggcttcctgaagtttcctgaacttggcagaggacagcgtaccttgatcttctacgtggaatactgtgatactggctgaaatgcagggaggaccagaagggctttagaaacctacaaccaaagcggccctagaactctgctttgccagggcttgtggggctgttccaggcctgcctttcctcgccaggattggggcactggggagctcggcccccccatagaacgagggccatacagagatgagcggcaccctctggggctgctgctgctgaaggtcgttgactttgcaactctgattgcttgggcatcctggatgtccctggattgagcgtctcggtttctcctctttatttcttggcctttctgttttatttttctggggaatttcttccactttatctatctttcaatgctttttttgaatttgtatttctgctgtcataaactttcaaattgaagaataatatatattcagggaagtgttctgtcatgtttttacattccaagagctgtttcttattttctgaatgttcctttttttaatatagcatattgttttttattgtatatttacaaggtcttttcttagctctttgagttctttgaaagttttcctgttttctgaaatgtttgtctctttcttatctcctttggtctttttttgttttggtgtctgtgttccatgttagagatttcctgctgctcattccaattagggagggaggacctaaaaagctgacctgaccaaaagctgtgtgtgtgtgtgtgtgtgtgtgtgtgtgtgtgtgcatgcacacgcccttgtgtgggggcaaagggactttgtttgcagcgggccggatgtagggttatgaggcagcaggctggcgctcatcataggaacccacttgtgattatttttatgtatttccttgagcctggtcagcttctcagggaggtgtcttctctgggtgggctcttggcctgctgccagccttccggcatctgagctggggaagagggtcaaggtctctgtgtttagtgtgcagactgcactctccatcctgtcctccagcttggttttctcactgtccggcacatcttttcccaccagtgtgcagatctgtgccgctctttttgggggctgtgtagcgctcagtgtctgacacacaccatcatttatgcgtaaaagtggctgcgtcttctcaccctccacagcggcagaattattaccttttgaaaatgtctgctaatttaatggtgtcttgtttgagaaccaagtgagttcatttacgtacagctcttttagaacgggccggcacttcgttcattctaaacaagcatttgttatcctgattcttgtccattcatctcctgtagtcttagcgtttctcttatctgggcaatttacgtacttacaatattgacctttcatcatattttaccctcttcccccccagggtgttgtgtgatgttgagttttggtatttcatgtatttttttttaacagagaaaacctgacatttttcgctgtcaagtctctggccctttccctttgtaattgtccatggctctagagcatggcatgtcctcccccaccctgagatctgataaatcgtcacctatatttgaccttcatctagtagtgattagcttgagccagtttcaattctcgtcagtgggtccgaggcaggccctgcgccaccatgatgaatgtgtgcgtggtgccagggatcgatgggcatattaaggagcagcgccgcggtccccggcagccagcttcgtgatgctcccccacactgacgctggctattcatgatttaaaatgaccttcttcccatccggcttattccgcagggcatgggtacgccacagcttcctcaacctttcctcaaaaaagaaatgttgtttttgaccataaaagaaatgcaatctggaaagaacagaaaggtataaagaagaaacaaattgcccattttctctccacccagaggcaatgactgcagactttttggtatattttcatccagccttaaaaaaaaaaaagattcaacatagttgagctccaactatacatctaatttaaacccttctttccctccacatactgcagtagcagtttttaatgctgtaatttattgctttggtttttagtgtggtctccaaatccctggggggcctcaagaccctttcagggggtcaaaactattttcataataatacctaggagttatttgccttttccattctccttctctcctgagtgtacatggagttttccagaggctatgaggcgtgtgcttttgcagtggattaaatacagacgcagctttgagaacccagctgtcttgtattaagccagacattaatgagatctgcaaaaatgtaaacaatgccttcttactaatttttcttggtcttggaaaatagagttatttttataagaatgtgctatttctgttaacatgtggggggtttgttactgttacttttacataaattaataaatattttaaaatgtcctcagttttcacttctaatacgcgaagtacccatagctataatccgaaaaaacaacagctctttggggtcctcagtcattttagacagtgtaattgaggaccacagttttctttacatctgtaattacattttggggaatctcactattgtgttggtaaaaacgtcagcacatcctagttctgggataagtgagtgggttcttttccagccacgtctctgtcttcttctgcttggttagctctccaaactgtgtgatgaaaacgtgatcccaggggtccaagcctctgtcaccctcttgccccttctcctctgcccttcctttggccctttgtggagatgactcagcagcattacaaaaccataagcaaaatccaccaactcgaccatacactgaaattatcattatcctttgaacaccctcccatccatttctggtccatacgggctgtgtttgtcagagtgtgcgtgcagctctgcagcctgtctttccatttaacattctctcccagccctgcccgcgccacactgtgccaccagccgcctctgcgtctttggagggccgtcaattttcactggttccatgacgctctatcgagttgattaactgtaatttacttagccgcccttggacacttaggtggtttctaatttttgctattatatagataatgctgaagtggttatcttcatgcatgaaacccttttctgttggattatttctttcggattgattcccagaagtgggactgctgggtcaaagggttgtacattttcatgggtccagatacgtctcttgtcagattgctttccaaaaggattataccaatttgcactgccaccgcaaagcttgcggtgttggtaataaccaactattttgcttaactatcatgcctagaattttcccttgaagccccaagggggcaaaggcccttatctaagtgaatgtgatctgtaattatttagactaacaccaaaattgctttcagaacattcttaacctgctgagtttagaattctaatttgaatacatgctagcattaaaagtttcacaagtagcaatttctctctccctactcacagtgtatttacacagcctgacaactgtagggaaaatgaaagagattttataaacagaagtgctctctttctgaactagttgaaatgttattttgaaaggtacaaaaacacaaattaaaacagattttcattgtcacctttgcttagaaaagttgtttgttttcgtcctgggcttcttttcatgttcttttctctcattcaagtgtgttctgatatggttctgatacggttccggtacctgggtgtcctgctgtgttgctgttagcccgggggcggaggattggtggctgtcatcaggtgctggcagggmtgctgtgggaggggaacgaggtgtattcgggtttgctcccagggcagaagtaggacagatggtggaaggtgtgtctgtggggggaagaggtcagcacatggtgaagaactttccggtgctcagagctgggcaactcgggcagtagactacttggaaagggagcgagggctgttttgcctggaggggtgtagtgcaggttggagcccatgttgctggagggctgggaagtagatgcaggcattgggtcagccactcagaccttgggctccaaggccgttaatggcttgagtgtcctgtggtcagggccaagatggtggctgtgagctgctctgccctgaaatactgcactttactgcacttggggccccgcctgagtggagcacagcgctccacacactgcgtattcaaaagagagtcaggcacattcctcctctaatttctctgagcttcagcattctcatctgtgaaataattatctcacagggctgtgaggatcagaggaggttagatgtgtgaaaccactctgtaaacgataacgctcttacaaatggaaggtattatcaagaactccaagccggggtttattctgtgattgcctcctaagccgtgttcctaagggtgtgaggcttgcaatccactttgcctccagttgccttgattcgttgatcaaataatccggtgcgcacccagtgaccccagcagactcttgaggagctcaggtccctctaggtgtggcttcttgtcttccagtccagcagtgtgacatggctggcagtggttgaggtggtggacttgggggatggctcagctgatgggccttgtgacgtctccatgagccaggcttctggacttgctgctgtgtggcctgtgaattcctcgggccttgctttatgctgtctctgctgtgagcagagaaagcactcagtggcagtgtcagcagggctgttcctcacttctttcttcatttggtcatctgtatggctgtccagccatcagttaaattctggctctttgccaggccctgggatcagaggggaccagacccactcttgctggtaaaaggtgaatgaggcacagacatcaaagcagacttgagagggatgatgagaaaggccctccagggctatctgtgctgggaacaggaatatatgggagagtgtgctaggtctgtcagtgctggaggcagaggacaagaaaagcctcagggaaggggaaggacgagttgggtcttagaagatgaggagccaggatttcggggccagcctggacaaaatagggaggcctatctccacaaaaaattaaaaaattggctgggtgtggtggcacatgcctgtagtcccagctacttgggaggctgaggcgggaggattgcttgagcccaggaggttaaggccacagtgagccatgattgtgccactgcactcaagcctgtatctcaaaaaaaaacaacaacaatgaaatcgatgaggggcagccaggtgggtggggaggacagccctgtactgtgcatgctgtggggcggggacagtgaggacggccaggtgaagtgcttgggctggtcatcagctttagccctggatggtcagtggcccaaggccagatggcgcttcctgtacttgtgctgggtcaggcaccacacaggggtttacatctcatttgccctcagctgggtaatcatcagagctcagggagtcttatttcggtgttcagtcccagcccctgtgctttctgtgtggcttagggtaagttacttaactctctggaccttagtttccccatygtaagtcaaggacaataacagcatccacctcagtcttctgaggattaaacaagagaacccacggcagactctcaggagagtaccaggcgtatggcaggcactccataatgcaagctggcagcagcatcagcatccgtatgccccctttacagatgacaaaactgaggaccagaggggcgtattgaaggacatgtagctcctaagcacggggctggcatttgaactcacctttgctgcctctgctttctgggattgttctagtcacttccctgcttgggggctccaaaagtgtagtcgtgtaactgtggcaaggcctttaatctttttgtgtcttaatgagctcgtctgtaaaatggcaggagctctgatataagttccatgagggcagggaatttgttttcttcccttgttttatctccagtttgaatgaatagcacctgctcagtcgaccatgctctttgtgggcctacttgaattttgggatgtagagaatcttggaggggtccaactgcactcccccacccacccctcacctccagtctgtgcaggaggcatccctgtggggattcgggattggttaaatgtcgccaggtttgtgaaagggctttggaaactttgctgggagctaaatcaaagtgatgattgttccacatctgtgaaatgttttttttttttttttttttttgagacggagtctcgctctgtcgcccaggttggagtgcagtggtgcaatctcggctcactgcaagctccgccttccgggttcatgacattctcctgcctcagcctcccgaggagctgggactacaggcgcccaccaccacgcccggctaattttttgtatttgtagtagagatggggtttcaccatgttagccaggatggtctcgatctcctgaccttgtgatccacctgcctcagcctcccaaagtgctgggattacaggcgtgaaccactgcgcccggccgaaatgtttgtatttacactgtcaggtaatggtcatgggcttgcagcttgtacatttgtttattatttatttataaatcttaaatccagaaaggacttgaggaagcctacaataaaagatacaaacacagtgaagctattaaagcaagacagaccatgaaaagccaccccaaaaggagaaggaagcctgtcaatcaagcgcagagctgactgctgttcccagctggtgccttgcgtcttgttctgtgtgctgtgttctcgcagacccaaggcaggtggcacaagtttgcccagttcttgctgtccaagagaagccaacacaagtggcctcacaaaggcatgtgggatggcaggacagtagtgctcagaggaaaggcagttagcttcttgtctcagctgcccagggaggagatgaagatcataggagaggccaggggaaatctctgtccgaatcaagctaaggagaggtcacatgttctttctagggtgggctgtggcagggccacaggtccctgggccagactgccagagttgttttgctcttttctgtgccttggtttctctcctgccaagtggctgtaacaatacctatctcacagacctgttgtgaggataaatgttgtggttttggccagggaccttgcaaagtgcttttgttaacctgacctgtatggtctgtgtttctcatggtgaatgttgtatttctcaaatggctcaagtccttcaactcaggtccccgagttcagaggagatgctgctggaggggtggcaaggtggggtctcccctcatgcccttggctctgtccatactgacgttgtcaagtgtgacctgtttgttattgcctaaaaacacttaacgagttcaaagcaaagggaacatactttttaattatttctctgcttgtctccagcaatgctgttgtcaaggaaaccaaaacctttggaaagcttttcagcttctcggtcggaagaggatacttgtacrgtgcgtatattgtcggtggaaatggacctgtcgttctgtaacaaaatctgtttcttttaaaagggcttacttccttcacttcttacaaatggactctttttggccttttaacagaagatggaaagttgttactggtattttctcttttaaagaattgcctgcattcttgacatagtatttcattcattcaacatctgttgtgagacttgggtgctagggatgggagtgtgatacagagatgaatatagcctttctggaaaggctcctggctcattgaaagaaacaggtggacagatcattatagcgcagcatcatgactgctctgaagggtgttgggtaaggtgctctggggcataaagaacagcctgggaggggcagtgtcagcaagtcacaggagtcctagaggatgggtagccattgctcagcagcaaagcgatagaaaagcattccaggccaagggaacagagtgtgcaaaggcagggaggtgtacaagagcatgctgccatcagcaaactgcaaggtagctggacgaggctgggcattggatgcataaggcatgaggagcaagacaggctggagaaaactttttttgtttttgagacggagtcttgctctgtcgcctaggctggagtgcagtggtgtggtcttggctcactgcaacctctgcctcgcaggctcaagcaattctcctgcctcagcctcctgagtagctgggattacaggtgtgcaccaccacacctggctaatttttgtatttttggtagagacagagtttcaccatgttggccaggctatctccaactccttacctcaagtgatccacccgccttggcctcccaaagtgctgggattacaggcatgaaccaccacacccggcctggagaagacttctgatcaggagtggggagtgtgaagaggttgcaatacatgctcttcgaagtgcattccatttccgcctgacagagccttgcttcttgacatgcagaggcatgtcactccttttgttcttgcttcagagggaagggacactgctaacacgctggagtttaataatttacttttgctgcaggagtatggccttccttgtaatgtttcagccagcattccagtaaaattttatgatagttaagccctatcggagcattggttttatatgaaaaagataaatcattgttagaaaaacaggagtcttaacttttaaacaccccttgttatttttcttgtaaaactttaaaaaataatttcagatttatggaagagttataaaaataatacagagagttcctatgtacccttcacccaacttcttcgaatggtaacatcttgcataacctggtgcatttatcaaactaagaaattaacattggtacaactctgttaattaaactatggactttatttgcatttcaccaggttttccactaatgtcctttttccgtttcaggatccaatctaggatgccatattgcatttagagagctcttgctatttaataagtaatttgtttttttggggggtggactgggcagtaaggaatggactggagcttgtcctggccactaattttgagttccctgttctgagcaaaccctgcacatcctggctgatgtcccatatcaggagaccagagccttgaagctacagttaagctcgtactggatgtcttttggttttcaagacttgcttcctagttcaatcatgaacaagacaagcagaagatttgcaccttaatgaggcttaaagagcactcacttataaagtgccattagtgacttgtccttaatggtagctgtttagtgataacaggtttctcattccttttttcttttttttttcttccttttttcctccttctggatttaacccagccagccttttgggctaatgttgacattagctagaattygaatttagactgcttaccacattgatgtttttacacaaccttcctgtggtttatcggataattgagtgtgtcttgaggcagtaactgagttgaaatgtgttgcatttaatgagtgaaactagagcatgctttgcataccgatagatgcacatctgtaggtgatttttccgacaaaagtcccagcctaggacgtttccttccattcctttcccttccttctcttgcatttccccccttttcctttctctctcatcctttctctcatgtctttttcggtacttttttcactatgctctcctttggccttgcacctggtcctgtctccgcctgccttttctcctttgcatttcctcctttccgtccccctgtgcccctctcgctctctcttgccaattcccatcttctatgcctttccctgcaacaggccagtgaagctgttgccacggaaacagaagcccagcagaagctctgttctgctttccggatgcttctaacgatgatgacgcagataatattgatttctagaatcagctaagccctggcctgtggcctctggagtcccttcattttccaaaggccaagctgatgccacagctcatcattctgttcagtagatggtcatttttgatttcaaaattgaaacttcaaaattttgagtaatctacttccctgtggctccagaagactgggtgcaaccatgtgaaaaagacttacttgaatttacttacattaactgagggaaaaataccagatgaggagggtacgggtgctgcaggttccaggaataacttaagttacacatgggagagggttagatgcatttgttgaattactgggctgaatgactgcttttaaaggacttgggggaaagagaagtacagttgaggccttaaaaaagatacttaattcaatgaatgttcagtgaggactggccatttctgagacatggggtcaggtgctgtggggcaccaggagtgtgaaaagcacatttcctcctctggaggagtggctttttaagtgacagagctggggcatgtgtgtcctgtaccgcagtgacattccttgatacttgtcatggtgatccagtgagtgcagctgttgtcagttctgccgtacaacccacatggctgcacattaactgggctttgtggtcccctcggagggctgttggcgcctggtcctcagtggagctggtttatgatggtggcagccttgctgcacctttccgggtttgactcaggcccagcttgttggcattagctaggatttggagttttgccattcagccagcaccagctaatagcccagcaaggaagagttagttcatggattatatttaagttagtacttattcccaaaggtaactttgtttaataaaaaccttaagcccttattactgtgcttctgggtatcctggctccagtgtgtaaaaataagacttataaaattcaaacattatttgtgaaaatgcaaaaacattttcattaatacagggcatgataaaaagcaaaaggcactttccatctgtggctaagtggtctttctgcactggggtctttttgttttcataatcactttgcgcttatttaaatattgccctttcagtcgtgaattttaaagggaggaagctttggtgtgtgaataactttacaactacccacagtatttccatccagttgctatgacttaagttgataatggaccccacacagtagtcactaatggatgataatctaggagtgtttttgttattgtttttattttagaagaaaggtttgaaattagcatagtaaatctctgtgggatctktgcaaataaaagaatgttcacgttaaaaacaattttcaagaaagatgtatggtaatgaataaaacatcagtgagtgaaaataagcgtgtttaattattcaagtagaagtagtaatttaaactaattattgcttgcggatttcataattcagtttttgtctcacaataatatttcctctgggcctccggggcgcgtcggcggctgctcgctgttcctggggcgggagagacctccccctccccgtggctgcagcctctgccccaccgagccagagccagagaggcccagtttctgcttctgccggcctcctcgtggtctcagtccacatctatcccccttgcactgcctcattaggcatttccttgcttatcaccttctctggttgattcgggcatctcagaccagttctgtccattgaggtctgagtgtcgtggaggctggtcccctgcctcctccccggtgtcttagacttccttggcaggggtggccctgagcaccctgcccatgtccccaggaggcaagtccttgccgttcagggctgcctcaggttggatcccctccaggaggctcccctgcctggggattgatcacttcttcctccccagtgctttgtaccagcaggttctggtggtagtaagagaattacagagagaatttgttggttgacatttttcttttttgggcttctttttactttgtttctgatcctaaaggaagaaaaacatattcatacagaggaatggaaaagtaccagagagcctgagaggcagtggggaggacacttcatcccctggaacttgcacctggcttctctgctcctgggtggctctgcacgtgtcttagttctgctcattctgtgtatgcaggcacttgccattttctctgtggaatttgagggcttggatgtgatttttagcatggacactttggaggggctcagttacattctccttggtgcacctcctggggtacaactggcattagcaggtgctgatgaaggagtaggaagtgctgcaaagcacttttgctcaatcgtgcgaggcttttaaaacccagttattactgctactcccatgaatgcccataatggcacaggaggttttctgaacctttctttattgcacaaatgctcctggaacagatcttgacaattcaggtgaattattattctacccctcagaaggtaaagggaaagctttctgtttgtaactttttcttcccaagtgtcctctgtcaaaaggtagtgacatcttctctcctgatatgtgacgtccattattacctcggtataatcataaagctcacacccaaaagctttccatccagcacgtcagagggacaatctttatttaagacacactcccccacttttctttgttattgctttctcctaaaaaaaaaaaacaaaaccaaaaaatcaaaaaattcccttggctttaaaggcatgatctgggctaggagtgactcgttcttttgcaaggttattgtcataggcaggaacaagacaggtgggacatgggggtggacagagtgatgcgctgtcagccaggggccaggggtccaaatggggttctgtcattttccagctgagccctcggcaggccaggcaatttctgggtgttggtttcctctcttggcaaacatagargctcaactgtgttctctgaggcccttttaagctgagtagttttgtgatctccaaactaactgtagctaaatgaggtaatgagagaattacaggtgtcccccaaactcttcctgcagagtagttgaaatgagcattcatgattctgaatcggttttctctccctgtgagctccagaggaagtcattaagcagagaaattactaacacctcgtgaccaccgtggagcagagccaggggcacgaaataaaatgccatagggatgagacccrtgcagccagccagcacttagggagatctgctaggaggacacccttaggttgtcctcctgagggtccagccctctctgaggggttgacagctgagcttcattacgttcttgaccctgtctcgctgacctcagggcttctgtattagcagtgtccaacaaatggttgttggggtgaattaaattttctcttatggatagtgtcctatcctttctaccaagtaagcttcctctcggggaagagaccattcttctttatttctttgaaaactgattttttaagaatagaaatacaaattggtatttgatgtacagagaaaaatgagtcgtgctcccatgctctggatctggagaggccacatctggctcatctctggatcctagggagcatcagccttgccgtgggaagcaaagcgggcctgggctgccttgaattagaatgacctggctgcctttccaaccaaagcacatatggccaaatgttgggagagtgaattggaggcaaaagcctttggaattattgggatcgttgggactcctgggaaggaactgggcagatytgtgtttgagccatggctctttctaccctaggtctggggaaggtcctctgcttctcccccactgtttcttgtaaagtggtgctggcatgcttagcccgcagggctgttgtgtatggtcaggagatagcagccctgagtagtgcccagagcttagcacagatacagcaactctggttcctttgaagatggaaaatgaatatgtatcatttggcaatgataatgtaaaatcagtgtggaggtgtgattccattaatagattgctgatgaactcaactttttaggagcccgtttgttgcttagagtgaagctggctggaatgaggcagaattagaatgacaggcccactcttctaattgaaatgcacatgaagtgcttggccctcagacttccatcgagatgattgcagtgatcaatattccagtttgcttggctggcagcttccggggaataagaatggatgatggacccagggaaagtactgccaaacagagcattaagttaattcctgtttgcctgggttctggcctgcctgatgaagtgccttgagtagaatgaggcaatgttggtgtggactttatcatgggctgtacccagtatcacaagagctcaaggtggctgctccctgacattcacttttggtagcaattagaactcccatttgctgagatcctaccatgtgtccagcccagtgctgggccccatacgcacatgattggtccccctgaaacctctgaggtgccgatggcatgccccaacctgcgtccaaggacctggggctgagagggcctcagggcacggtgctgcaaggtgcggagctgggaatggagtccagggctgtttgctcccaaagtctatgttcgttccactctcccacgccagcccgtaagtgtaaagcagatgtttggaacctgggttctcattttcctgtagaatcagtgttattcatggcagtgagggcctggtctcaaaagctgggtttaccactgacagtgtcatttctcatgtggttttcaccttgaccttaccaccatgggaggcagagcgcacacccctctggtgttcctggctgggaaacaggggcccctacctgtgggctgcgtgggccaggagggtcagcaggcccttgggggaagtgcaaatgcatccttatctctgtagtgcttcctcccaggcatagggtccgctggaggcctggcgttcccatggggctcactgtgtgtgcaaatgttctgtcccagttcagtctgctgactgggagatgctgacctgactctgtttctctagggccatgatcctgactctgaaatgccaagtatacacccctccctcctcctgcctgcattctccttctgctgttacatgggggcatgcacccctctcccctgcagctctggcctctgctgggcccatccctcctgtgagtgacatggttattccttgtatcattgtctgaacttggcactggtgtgtttgggcccttcctcttaaccctcctaccttgtgtccccatgctagttctgtctttcctgtgctcgcagaatctgtctgtcctcttgcccccacctcagaggcttcttccagtctcaccccctcattctcagaattgaattttttatctgtggaaggtggcagctggcagccaaaccaggagcctaagtcttgggcaaagcttcaacaaggatgctgagctcaggggcctaggaatcctctctctgccccatctttttttttttgagatggagttttgctcttgttacccaggctggagtgcaatggtatgatctcagctcaccgcagcctctgcctcccgggttcaaaggattctcctgcctcagcctcctgagtagctgggattacaggcatgcaccaccacgcctggctaattttgtatttttagtagagacggggtttgtccatgtaggccaggctggtctccaactcccgacctcaggtgatccacccgcctcagcctcccaaagtgctgggattacaggcatgagccaccatgcctggcctctctgccccatcttataggcaccctggggcctaggatggggctggggtgcaggggatggggagggaggctgggccccctggaggatcagtaactctgttatatgtcttcactataatctcattttgggctgcactctgcttttgtttttgtttgggagcctgcttggaggccagcactaacagaaacatgcaagggcagaagcagagctggccatcgggaggtgggtggcctgcagggcctagctctgtggcgcatggattggtgtgtcagtcgcccttcctggcagcagctctcagtgattaggcttggaggagccttggctttaagttctctttggggaagggcggatattagtgcttaagaaacgccactcccgaggaaacccacctggatgtttttctctgtaactggccatttggagacagggccaggctgtgcataggcttttgagtttctcaggtgcytacatggggctcaaaatgatgatgcaatcaatccgtttcttgacttttgggcctgggtccagctcagaatggaggtgtgctccatgggcttgccttcggagaagatggttagcagggctgtgggaagggatgtgtggtggacagaggtacaggctccccaaggcttagaggcttcagaagcccatgtcaggcacgtggggcccaggttcaaagcagaggatggagaagggagggttaaagccttccttctgacgttgatatgtgtgtctcagcactgggacctggagcagtcggcttcggaggcccgttggactgttgaatattgatggtgtgggtttggctgaggagcataggcaggtgtgtttgccattcttatgtactcaggaggggtatgaagggcaagtcagtggcacaattcaagcaaagtgctgctgttactcgagcatttgctgtgtgccaggatcttcacacggacagcctcagttttcataggagtcacttttaggcattttatctccattttgcagttgaagcaattgatacttaagatggtagtatctttgtttagtgtgaagagccaggaattgagtggggaatgcccttatggcagcaagacagtggcaccaagtcctgcctaggtggcttgtccaatgatcagagtccaaggccacattgctaccaagtggcagagctggaatcagcgctactcagcctcacacattttgctccctgtgcctcttcagaacttcggcctgtcacatgtgtgcagctgtgggagcccagattgtgagttgatcaaggtcagggccacaccctgcacttcctgcctgacacagagtaggtgctggacagacatttgtgttgtgaaagagtgagtgagtgaatgaaagacacaccatggggatagaaaaataaggggcaggccccagggcggttggcagatgtgaaatgtggtttaaagacttggcagtaaatctgtggctaggccccccttctcctttcattcccttcttccttccttcttgggattcagaattgctctctgggcagagggctgcggagcaggagcgaggctgcaggtgtgagaaggaccccgccgtgccagggcagcctcaaggagctgttgagcgagttgagcccagaagacaaaggtcgctgaagtccttccaggagaagaagatcaatgcctgggctgagcctgcggttaacatcttaatagtaaccggagagtttctgagagattaggtgatgatatatactcagagctcagacagttaatttgcattgtgtcctatattcctgaaaagttgctttcagattcttattgatgtgctcacattttttggggtaattgtcctcctttgacattaataacccccctgtttactctcaggctcacatacctctcagagtccaggaggcagtgagggaaagcttttaattcaaagccctatccatcttcccaactcaggtgagatggggactagaaagtcggtctggctgaagctaagtgaggccagccttctgggtgttgggtatcaggttctggacggggctggcagttgtgtgtggggctcatggatggttttaggcccttctgccccctttgtcagtgtgcccttgtgggaagccggtgcgtttccaggggagctgctggaggcttcttatggcatgcagatcaaggaagacctgtagactacatgcaccctggcgctctgggtatgttgtttctgcaggtttgggaggcagctgtcctccaaagcatacaattactaagaasagggaccatagtttcacacttcagtgcctaaacaggccctgacacccagtttggctaggttgagtctgggtgccagagattagagctgggattggagatgtagcccgtccccgttcaggagcctctcacgtgtattgcctctcacgtgtattgtctgtgagtgtgctgggctcccagacacatatgtcacagtgagctgtgggaatgacccttgactcctatcctgatgggagtgggagagggtgcaagaactggccctggagacaggggaggggttgtgagagccagagcacagatgcctgcacaccaggcactgggggcgggggttgggatggagagtgtggtgatggtaatggcctatagtcgtgggggcttggggacttctgagggatgtgggtaaatctggagtttttcctataggaacggggagccatggaacgtgcgtgaagcggtgtgtaaaactggagagaaaaaccctaaggagacctcatcggacgttcctgtgataatctaggcctcaggacaggcagactgggatgcttgtgttacccctaactttagattactctcccactgctcccctccttcactgtagattcccacaatttcagtatcaatgtaattacaatttaggggcttagaaactcctgtatttattgagaacccacttaatttacatatattgagtttcaatattgcacaactctgtgtggaggggttagggtggaggagacctgagatgacagaaggccatgttctctagggatggtctgcagccctcagtgctgtctcttttccctccagcgccccctctgtgcccccctccaatccctgctccccccagtctctatagctgaaggctaggacgaactgtggggttgtgaatatttacgcaggcaggcataggactcagtgacgcagctgagagccacgcaagtgtttggtgactcatcagaccttctccaaagacttgtgatatttttctcctctgaagggccgaaagcaatttgcagttaatgatagtatatgacgccagaagagtacgcagaccttccggctcatcttttctgtgccttgggtgttttgtttttgaaaaaacctatgtgaattattttccctttagtaatgtttattttattctgattattaaaataatgtatgctcattgtagaaaatacataaatgcattaaataggaaataaaatgcatgaattatttttccrttacagtgttattaggaatgttttgcctgtgcaaaggagatgtggagcgctagacttattttatttgaggtgcttgtcgagataactgagatcagtgggttgcagcctgtgctctggggactccaagggcttcatagaaatttctagaggctgcctccagggtgggggatctggggagcttgagactcactcccaggttcctccctccaaacaactctgccgttttctgtctcatgactgggccttctcacagggctgcctttgagcttatcaaattggagacccagtgatccggctccagcctctcattttacaagtgaggagttgcaggccactggttaagcgtgtctggcgcaaggtgatgtggtagcttagggctggtcttcatgcgttgtaggcctgcattgccttttagtatatgaatcagttaggaatattggcattttaactttaatgccattgtcacaagctatgtcaccatgcagaggacccccccccacccatcccaggmagctgatcgagggtctttaaagggctctcttttgagggaaggggacacctcagagcacctggcacttgaaaagatgaaaagtaagagccccatcattgctgttaggcacacaaaggaggagaaattgctgtgggtgatccctggttgtatgaatattgagaagaaattaagtaaaggctgtgtttcctgacactgatgtattagaacatggagtaactttctacaggaaattggaacagggatccctttaaattgaatttgaagctgtgaatagcaaacctgcacttggccctgtgtgtcctaatgcaagttaagtaagcagtttcctgggtgagagttaagtactttagggatatgggttaatgttgaggccaatgtggctcaagttaataaattgcctctcgcgtgtattgtctgtgaagatgcagaagagtaatttgcttcctgcagagctgctccagaattctcatacttagtttattagatttttggcccaatacattttttccctctcattggttttgttgataataattactcacccccttccatctctctatggatttctcttggttttaattgttttcagtagccacaaaagtttaccatttcagaaaataagtgttttaaaataagaatagtcttggccaaaccccatctgagtttccagagggagacagtcaaagctctattgttaaagtgattctgggggcagtggccactgagattaggaaaaagccagcgctcccttcgtcaaacacgtcagtgctcgtccctggcctagggagctctctgggaactggcttcctgaggtttttacatatgctctggaatctggagtgagggtgtatgcgtcaagggcctcccagggagacggtggaggatacagaggaccggctcccccatgctgctggtgtttagttcttgaccctgtgggctcagggggtggagagaacatcgagaattgtacccaccactaggcaccatgtgaggggccagcaatacctagctcacagtctaataaatcagttaattaacagggtaattataagttgcacagtggtatttcctgggaaatggagaaaaatggctgggtgggtaggggagaagacagcatgcaagctgaggttggaagcctgaggaagacatgggtccgtccttgcacggaggacagcccgtgccgaggctgagaagagcttggtgtgtggcaggaggtggaatgcaaggcaagatttgtcttcagattattccttataaagagagtgttcactttatacttgggtcttttagaattttcttaaactacaggacactcacttttggatgcgaagtttaagcagatttttttttttttttttttgatacagagtctcacgctgtcgcccacactggagtgcagtggtgcaatcatggctcactgcagtctctacctcctgggctcaagcgatcctcctaccttagcctcctgagtagctgggactacaggtgtgcaccaccacgcctggctaatttttgtatttttggtagcaatggagtctygtcatgttgcccaggctggtgtggaactcctgagctcaagcaatccgcccgcctcagcctcccaaagtactgggattataggtgtgagccaccctgcctggcaaagcagatcttttgatactttgtccagaacataattggtttcaaatatttacccatcacacatttaaatagtctctggtaagccatttaatggtagatccattcctgaaggccatgttgctttgtgctaggctcagaccccagcttcctagctctgtgatgctgggcaagcaaccccaaggtgcctctgtttccccatgtgtaaaacagagaaaatagtacagagggtctcatgctcttgggtcacaattcccttagtgccactgtcacatttttcacagcactcctaggccaaaacaaacaacttaattaacagtcctgtttactaaggagtgaggaccaaacaacttaaatacttatgttgtaacaacacctgttggttctcaaacattggaagtaggttggatgctgccaccctcatggtctgttccacattgattttcacttgctttttgcttttttttttttttctcgagatagagtcttgctctgtcacccaggctggagtgcaatggtgcagtcttggctcactgcaactgctgcctcccaggttcaagccattctcctacctcagcctccctagtagctgggactacaggcacccgccaccacacccagcaaatttttgtatttttagtaagacaaggtttcaccgtgttggccaggctggtctcaaactccggacctcaggtgatccactcaccttggcctcccaaagtgttgggattacaggtgtgagccaccatgccctgcctggtttttgctttttatcacggcaactattgaaaactcagctttgcagagatatgatgtcatctaaagaaatgcaaaaagatctaatgttgaatgtaatgttgaaacctcagctagcagtctgcatgttgtctagcagatattgctgtttcccttaaaatggtaaaatatcccagcctgggcaacatgggtgaaaccccatctctacaaaaaatagaaaaaatttgcctggtgtggttgtgggctcctgtagtctcagttactcaggaggctgaggtgggaggatcactcgagtccaggagttcaaggctgcagtgagccttgattttgccatcgcactccagcctgggtgacagagtgagaccctgtctcaaaaaaaaaaaaaaaaaaaaaggtaaactatcccttggtgcgttattcgggaactgtggtgatagtattgacgtgtttggtttagtgaagatgaaggaaatggtgcacggaaagtgctgagggcagtgctcggtattaggtgctcaggaatcattgttgccctcaatctcaagggttccctttagtagacctagaaacgtgtctttaggagtggtgaaaacacggctcttggagacgtctagggagaggtgcatttagttgcttcatgagatgacagtggaaatatacagtctttctgtgttttgtagtaagtgattgtaagtatgcatgtgcgtctacgttaataagttaaacacaaatacagacatccagttgtttcttcaacgtctctacatgtatatgtgtttaggtatttgtctctaacctttcagttgtgtttttaatcttcttgttgggaaaatgggtaatgtctctgtggtttgccttatrtttgggatattagcaaaggggagagtgttttgagatggggttgatgccacaggcaggccagatcacgaaaggccctggtaggacacaataagccttaaggttttattcagaatgaaatggaaagctgctgaatggttttgttgttgtcgtttttgagacagtcttgctctgttgcccaggctggagtacagtggcgcgatcttggctcactgcaacctccacctcctgagttcaagtgaatctcctgcctcagcttcccaagtagctgggattacaggcacccaccaccaggcctggctaatttttgtatttttggtagagacggagtttcaccattttggccaggctggtcccagactcctaacctcaagtgatccacctgccttggcctcccaaagttctgggattacaggcatgagtcaccacaactggcctgaatgtttttaatttttaaaaaggtaaattaactctatggagatataacttaacaataaaatgcagccctgtaagtacactgtcagatgagttttgacaaacctgtatacttatgcaaccatcgctccaatcaaggcacagaacctttcccctgacccacagtgttctgggtatcctttatcagcccatctgttagttccacccccaacctcagccccaggcagccacagatctgcttctctcattgtaggttggtacaaaagtaattgcggtttttgccattactttttttttttttttgagacggagtctcgctctgtcgcccaggctggagtgcagtgccacgatctcggctcactgcgacctccgcctcccgggttcacgccattctcctgcctcagcctcccgagtagctgggactacaggcgcccaccaccacgcccggctaattttttgtatttttagtagagatggggtttcaccgtgttagccaggatggtctcgatctcctgacctcgtgatccacccacctcggcctcccaaagtgttgggattacaggcgtgagccaccgcgcccggccttgccattactttgaatggcaaaaaccgcaattacttttgcaccaacccaatagtttttcctgttctagaatgaaatatgtaaatggaatcatgcagggcgtagcctttagtgtctgacttctttcacttaacagaatgtttttgagattcatccacgttcagccatttatccctttttattgctgagtagtattccattgcatgaaaataccagaatttgtttatccattcttctgttgatggacacatttgatttgtttctagtgagccgttagaggtagttcatttttttttttttttgagatagagtctcactctgtcactcaggcttgagtgcagtggtgcaatcttggctcactgcaatctctgcctcctgggttcaagtgattcttctgcctccgcctccctagtagctgggactacaggcgtgcaccaccacgcctggctaatatttttgtatttttagtagagacgaggtctcactatgttggccaggctcgtcttgaactcctgacctcgtgatccgcctgccttggcctcccaaagtgctagtgctaggattacaggcatgagccaccgcgcccagcctagaggtagttctttttttttttttttttttgagacagtcttgctctgtcacccaggctggagtgcagtggtgcaatctcggctcactgcagcctccgcctcccaggctcaagcaattctcctgtctcagcctcccgagtagctgggattatagacgtatgccaccatgcccggctaatttttgtatttttagtagagatagggtttccccatgttggccaggctggtctcgaactcctgacctcaggtaatctgcccgccttggcctcccaaagtgctggaattacaggcatgagccaccgcacccggccgcctagaggtagttcttaaatgaatgttggtgtggactggacatgttttcatctctcttaggtacatatttgggagtggaactgcaggctcatatggtaattgtgtattcagctttgtaagaaaccacctgctttgagcaacgaggtgacaccatcttatttacatctttaaaagttccctttattgaggctgaggcaggagaatcgcgtgaacccgggaggcggagcttgcagtgagccgagatcgcgccactgcactccagcctgggtgacagagcaagactccatctcaaaaaaaaaaaaaagaagaaaaaaaggtccctttatttctagatggagaataggtcacgaggggctggggtgagagcagggggagcagcaagggggcagaggcagctgtcaggtgagcaaggccagtgcttgctgaggatgatggggacagtgaaggggctagctctcacggatggttggggacaggatgactgaagcttggtgatgaactggatgatgttgggagtcaaagatgatttcaggttttggcttaagctactaaggatgagatggtgctactcatggaaaagagaagacccaggaagctttgagcatgttaacttaatttctctgaggctcacttctattctgtccagcaagacaggcaaagaaatattagttttatttctaaactaaccagagaaggggaggaaatggctcagatgggcaataggcagtctaaagtcatatgtgtatgggaggtacgtaggcatgctggtcgtatgtgcacagtacctgcacaattctccatgggtctgtcatatttctgcacagtcttctgagcaagccacgaacagctgatttgctctggcctgtcttttcaaggatgtttgaatagcaagcagccttggagagtagagacagcatctctatctggaacagatttatttwtattccaggataacaaagacaatgtctcccttaggagcagaggttgggcaggtttaccagcagctgcttatataagattggggcatcctaatgtcaggactcctctctgtaatgcatcccactgtgtgtacaggtaacaccttgccttcatgggatcgctatgggaactggggcttagggaactggtgcagcagtgttaccctggctactactactgctgtgagtaataaactgttttcagtctctgacccagggatctcatgccttctgctagtatgtatgaagctgtggcaggctaacttggtagtttgctagcagagtactgtctcaaagcccacacagttcatgacagtgcctctggttgccaagcacgattggcacagctggtgtcctccctgctctgcygctgtccttcttttcttctgcatctctgtcagtgcactgccacctgaatctttactgagcacctagtaggtgtcaggtccaggggcagcagatagagtgggaagccagatatggttctagccctcacagagcacgtgtcattcagcctctgctgtccaatcagccactgagttgtgacttctctacttagaggtagttctttatcaaattcatctcattcctcgctgccgtttggtttctccctgtgaagggtattcattttcatggttgttttaagagtaagaggcagtacaagggaagtgcctggtatagttcctggtaatcgtagatgcccaaattgtgactactgctgttgtaatttctattattacgtattctcaactctgattgtcattccttgatgtaaaaactttgctgtttgccctcatactacaatacaggttgcagcccaaacagtacgggatgcaaaccaacccatgtcaccggcccattcaccctgccccgatttctgttcctatcacaaactgcctgctgtgtgccttgaattctttccagctctttcccaaacatgacacacccttttaggccttttccctttccttccttcttttcaggcaaagtcttccttatccccctggacttggctcaagggtccccttctctctgtacccattccttgaggttgcctttctcccttgtctccagactgcataaatggcagtgtggcctgtgttgctgtagcaccatgtgcacctgggctgtgccccggcagtgttctgtctttgggctcactggggagggagcactggaccatcgtccccagatgcccagggagaagcttggtgctcgttactgactgtagggtacttttctgtagcaggcacttggggctcacttatgggacccagtaacttcacagtcatgaggtacttgatttgaactgaggagaaaatgtgtcaatacctttcccagggagagtcaccctcacaaaccttggtctggaaggcccatcttagcccaggggtgagatcttgcgtggatgattcagaagtcacagtattcctgaaaactagtgactcaacagaattatatggctttgggagaaagagtccctccaggggcaatccaactaccacaggccaggggccaagctttggtgagccgagcctgggccctgcccctcccttctctatgggcctagggttgctgtgctgtgtgtggcatggccagagtcctccgctcatctcctcaccatctgttacttgtgcgtgtctcctgtgccaggcctggtgctgacactagctcagggagagaggcagccgtacctggaggagctgcttagtaggacacttggcacatgccacatgctttgcagacttctcagtctcccagccactcagggatttgtgggactgagtatctcagatccaaggtggtcaggcgagggtgcagggagatggagccatgtgtggggccaggctctttcccatgacctaggtgccccttccaacccccaccatcctgttaagaccctgagcagccaggctggttgctccagccactcttccctggtggctcccctttccagttctgaggctactgcgagtcaccttcctcctccagggagggagagagctgcctgagcattacctctgcttgcggatgggggtgctagagaccgagccttttccttgttgtctctgccagtgaggctctggagagtgagtcaggaatacagctgcacaaatcgcccttactttgatactgtgtgattggtctgcaagacagacacagggctgacatcgcattttctgcctgacttcttcctggctgcagtgaccctgagctgttcctagccttccatcgtttctgttgtggacaggcgtgtcatgctgcccctgttcctcctgccctggcctggctacttaggctcttgtgcatgtgctcataggttctcatgaaggttgttcttagtttgcttatgtcttttttttttttttgagacggaggctcgctctgtcgcccaggctggagtgcagtggcaccatctcagctcactgtaacctctgcctcctgggttcaagcaattctcttgcttcagcctcctgagtagctgggattacaggcaccaaccaccacgcctggctaatttttgtacttttagtagagatgtggtttcaccatgttgatcagactggtttcgaactcctgacctcgtgatccacaccccccactcagcctcccaaagtgctgggataacaggcatgagccactgtgccctgccttcttacgtcttatatccacactgcctgtgattttgtacatgatacacacaatgtcacctagcactggcctttctgactttcatgcaactattgaaagtgaaaaatttggccgggcaccgtggctcatgcctgtaatcccagcactttgggaggccgaggtgggcggatcacgaggtcaagagatggagaccatcctggccaacacggtgaaaccccttctctactaaaaatacaaaaattagctgggcgtggtggtgcacacctgtacaagtcccagctacttttgggaggctgaggcaggagaattgcttgaacccgggaggtagaggttgcagtgagccaagattgtgccactgcactctagcctggcgactgagcgagactccgtctcaaaaaaaaaaaaaaggtgaaaaatttgcacaacagcacagtagtgcagcctgccagtctcagccacaacggtcagggtctatgctaaggtgagtttatgggacatccctgggagtttggggtggcggtggcgggggggggtcctactcacgccacacctactccgggagggacctggcattggactcaggttgccaggcaggggtgtggagtggtccctacacccacaattcctgtgactcccattgtctcacctgagaccctggccttgaaatgatgggctctaagtaagttctatttctaggccgggcgtggtggctcacgcctgtaatcctagcactttgggagtccaaggtgggcgatcacctgatgtcaggagtttgagaccagtctggcgaacatggggaaaccccatctctactaaaaatacaaaaaaaattagctaggtgtggtggtgcacacctgtaatcacagctacttgggaggctgaggcaggacaattgcttgaactctggaggcggagattgcagtgagccgagatcacgccactgcactccagcctgggcgacagaacaagactccatcacaaaaaaaaaaaaaaaaaaaatttatttcccgtctccacaggggtctctctgcggcttcctggggcctcgctccttccgcctacctctttcttccttctcctgctgtctaccctgtgatgtgatagctttctcggggagtgttcagatgaacagtgtttagaattgttgaatgctctgttggaaaacagaaaaggctatttcatgagcagatgatgaccttattaactataattaggcaattcacagaggcttccaatatagtccagcatcttttcttgttgagatggggggaaaattctatggtaatgtctttggagatgtaatagtctttatcacattactagtttaaattattctagaagttttggcagcctggtgttttcatttagaaagccgaggtatagttttacagttagccacattaatataataattataattttgagcaagtaatttcagacactgacatcaagagttgtttttatagcagagaaagatcacaggtaggaaggtggaacctcgcgtctaatctatctaatctgtcacaaataggatgatgttgtgaacacaggcagttcatgcccctggcccatgctttatattatgggacagagatgcaaatgcttagaaactccccctgtattaaatccccagagaacacgcacatttgaaattaatgggaaattgtcttttctaaagaatttggtatgcaggggcacatgatgtggaatttcccctgggttctttgtatcaggttgccccattgccttgggcttgtgtgagagtggacctgggagtgaacgggtgctcgcagggcccacctggtggtcagtctgtaactgtggctatgagcagcctcccaccctgtaggcccctcacaaggcctagttgcctggatctccaggggcatctggaagcctggaagctactgtctcctgggcaaggaggccttcactgcctccacagcccccatctgcacatgggccgcaggccctggcaaccccttcccccacttccctccactggcttggacctccaggcccacagcaagtaacttttggtttgtgttttacctttcacttgtaagcacattttttttttatcgttctatagggatttttcatatatcattttggatcctgtttttaaagctcagtatccctgtttttacagccttcagratagtcatcttctatcatgtggttgtaccacaatttgctagttgtatccctgttgctgaacattgagctttttattccagcaggttttttattgttgttttataggcagtgctgcagtgatcatctttatgtacataatatttagcttctgtgcagttagtttcttagactctattgctagggttggaattgctagccaagactaagaataactttttaaaaatatattaaaatcttcttatagtaataatatttgaagaacagaaaaaggtagaaaaaggaaaataaagatgcccagctgtcccatgatgtggtgttcaccactgtattagctaggagtgtatgaggctgcagataacaggaaacccaactcgagtggcttcaacaggtggagagagactcgtttgtctcagggaacaggagacttgagagagagtccagggctggacccaggtgaagccatgctgtgagcgaccctggctgtttgcatctttctgtcycactgtcctggatgttgctggcctttgtctatgctatgctttcctcatctcagtcttcctttcttacctctggctggatgagtctttttatttctgtctgctgaaacagtgtatctcctgcatttgggtcattataagaagaaatatgattatttttcctgcatgtccctcgtctgcaactgcctgtgtttgtgacattccattcggccaaaactggaattttaacagtgtccagacagagaagaggaagagtaggcatcaggactaggaaagagctcctctttcttattaatgggatagtctttcatccctgtgtttcaagttcacagagtcccttgggttagaaaatatcctttgctctctccttgattcctatgaaccagagaaggggacagaatcttcctgggcttattggtcccccagtcagtcttgcaaagggaggtttattgagcacttaccatatgcagcagggggttgtgagccacagtcgtggcctttgggaagctcacagaagaggggaggaagcaggctgacttacccctgccctatcacactgttacccttgtgtcaaccaagcttaaccttggctgagtagaaatgagtgatttgtgacctatgttaatcctacagaaaagaacaaaaaaataaaataaacttccatagatgcaccaccaggttttagttattagcatttttccgtatttatactgggtacctcttttttgttttgtaaggaatgaaatatggcagatagagctaaaaccctacttcattccctttccattagtggccactcccctgacgttggtgggcatgcttttaaatgtttcctgcatatgttatgaatgacataaataatatgtaatacttttgtattttaaaggtttatgtacatgttattacactctgtggttttttgcaatttgcaaaacagtcaacattatgttttctgttatctctctatccatccatccatctatccatctggttcattcaattttcattggtgtgtgggattccactgtataaataagctcaagtttatttactcattctcctactcctggaaggttgtttttactttttgtctcttgcatacaatattgtagtgaacatgtgttccagttttttattgctgtttaataagccacctctaaacttagtagcttaaaacaataatgtttattttgcttctgaatctgcagtttgggcagggcttggtgtgggcagctcatctctgctccacttggtatcatgtggggcagctcaaaggctagaaatggaagcatctgcaggtctgttcgctcagcatcygatgagtgattctggctgtctgctgggaccctggctgtgctgtttgctggagtattacatgtggcctctccatgtggtctgggcttcctcatcccatggcagctgggttctaggggctagtgttctgagaggcccctatactgaaaccagattgctctgtgacccagcctcaaaggcaggcagcatctgttgacttcattctgttctttggaagcaagtcactgaggctgcctcccattcagggcaagggagattggactccaccttcaatgggacgagcctcacagagttggtagacctgttttcatactggcatttatagatgtacatccttgtacacccctgtgaaagcttctggggctgggacccctcatggtgacttgacgggccttcatgatggccctctttgacgcgaccacatgttgccagcttcccctcctgagtatttgttccgtggacgcccaccagcgtactgagcgttcccatttcttcacaccctctccatcatttgctgttagggattttgattttttgcccctctggtgggtgtgaaataggatcttattgttttaatttgcctgcccactggcgaggccaggccctgtgctccatcctgggggtggtgttttatttcctttcccagctgggtgccctaaagaagacagaaacgtcaaagtgctattttttggcttatgatgtcaatttttcaggattgaagtggcgagcrtcccacagagtttattgcaaactattatgaaggtcttggagttactgttggtatgactcatttatgaaaaaaatatgatttcagtaactgcaggctgtatttgtaatgtgatagattttcatttaatctctcacctctctataatttgcccaatttaaaaatgccctgaagcttgctttctctttgtctgggagccctgttcttggtatgtgttattacaataatagtaataagaaattgtgccaatatgtgtctctcttccagctcttgctgtctccttggtcatttaattacttctggtactgatttcccccagcctgatctcccctgttataatagcgtgtgcatgaagcttctgtggagaatgccactgaggatggaagctgtcggtggttggcaggccccagtgtgggcatacctggacccacgggctggctgtgggcttcctccttgggccacatagcacccaattagtcagacacaccttattccgatcgtactgtgaggttgtagaggaaagtcccttcagatcctggcacaaaggctggcattggggagtgtttaggaaacgtgttgaaccaaataattcaaaatgttcggttattataattatcaaggtaacctgctgacgtcactcaaaaacatctggaaaatagccatgtcagatcaagaattttatgatgaatttcctcgaaaacggaacttttgactacttttaatttaatctggttccatctgaacactctgaacactatttgcagcgtgctggagaacattatcttctctgcttccctcctaaggggtgtttggattcttatctgtgttgagaaccagagcctgtgctgcggaaatgagatcttgtctgtgcactgagtcagcccaggtcttttgcaggcactcaggaagcagcatctacatcttgaggggctacttttctggattgtgtgggtgcagcgtgtcctgaaaacatcactgggcactgctgtccataccttatgatggggcacgggccactccaggagtctcaggtggcacagctgcccaggatgggcttggtgctggtcccagggaggcagatgacacgtgttgcccctcagaacagtggggacagccaggtgtgccacaggccatctcgcagggcctccctgtaccaaccagattgggtataaacaaggcattcattacctgttgttttaaggggaggaaggcaccacgggcgaggcctcccaggctggctgggtgagtgttcctgagcccaggcacttcgatgcccacactacttccagggagctgagtttcagagcctgtggcgttttcacaccatgttctaggtgccagcagaagtctaacaaggagcagggcattagcctctgtttccatgacagactgttcacagcctcacagtttgcatcccgtgtaaacaaacatcagcacctgttatcctaattaaacctcagaccttgtttgcatgttaagagttagcaggacaatcctttgctactggggaccygccactgaccccagggctttcttgtatcaagaggaacaaaatggcatgagattgggacctgggagcaggccccacaccaggtgtgacatgcctgtgctcagccaaggggtttaactgcctgtggagtctggggcccagggccctgctgcctgtccagtgtttgcgtgggaatgtcttgggcctggggatgtagagcccaggttctgggaccagcccttcctgccctggtgtcttggtttcctagaatcttggtgcgattcggtggttaggctgatctcagggttcctttcagcagcagtggcagccgtgaccacctactatggaccagcttctgccaggcaccttgtagtctagcagagtaagtttgatcattccattccactgacaaggaaactcaggctcaacaaggtgatgcctttcccaggacatgtgctcctgttgccctgcccctcctggcataatatcccacttcctgcttggtggctcaggcctgtcagtcacacagctcgtggcttccccatgaagcatctcttgggtctgtctgtttctctcttcatccacaccttcctggcccaggctaccatcatatcttgccaagacaagtgcagcagcctcagaaatgttctcccctgcctccccttcatgcccccaggcagccaggatttttctaaaaactgtgcacctgggtgtgtcccttgctggccccatggcctgcagggctcaggatcaagttcctcttccttgatgtgggtcctgggtccttggaggctggttgtgtcagcccttctccatcctacctcccttaatgtgcacatcctgtcaccccatgggcctaagctgtaacggggcagggctgtcacttgcactgactcattccagtgcccagcacaggggtggcacacacccaggagtagctgttgggtggatatacaaatgttgccataggttgcagagctaaaaattagggaggctaggatttggacctacatttgctatattccaaagcccctgctctttctactccttcccctagactgtgaaatatgtttgatggggaaagatacccgggacagaacccgacttttgcacgttacagtagaggtccctggcagcccagctctcctaaacatgaagctcatcaggcagcaccgtcggacgctgatggtgggggctgggccctgtgctgacacaggctcagcaggctgttaatgaggtcctgacaagctttcgttttgaaggagttctcaaaaatgacaggttttatttcaagggtctttgttaatctaatagttttccctggctgaaatttgtggactgtttaccaaagctctggcatgtgatgacctagggacagaattaaagcaatttcagcttggtttcaggcacagatatgcagccagggaaatcacctggggcaagctgaccctcaacatgaggcaaggggtattcagtggggccagggcgagaccctgggccttgcgaggacgccgtcctgacatttccaccccaaatgggatttgcataagcccaaatgagtgcagggttattctccgcacgccgtcatcgtgaatatgcattccacagcttcacatggggtagtttaaaaaattaatagatatgtcctttatttctctctctacaagccaaagcttggaattaattttttctggcccactaactcttgtggttaaaagtacaaattaagttttctgggagaatccatcacaaaattattgaaaagtcagtgtagagaagataatgggctctgtattgggttatgtctgtagggttattgttttctgcaattacacttttctttgtttttctttttttgtgctttgggaaatcaacctgagaatgggcttccaactcggaagagttattggctacttttcccaaatgggattgcccttccaaagaactgtgggcatctgtttgacaacaagttataaatttgtrttccaagttctctgaagaaagcatgaatcttcgacaatggcactgtggcactgtatttcaggcaggcgtgcagagctgtcaaaagtcaataaagtactcagacgcctgcgtgcgcccagcccacatttgtcaagtgttctccgcgtattttgcgcaggattggaaggcggattagagccgagttctccagagctcttcactctrccccttccctgagccccacagctatcctagaatgggatctgttggagcctctggagcaagtttcctggtcccagagtccggctatccatctttcccatggaagaggaagactgctgccccccagccccaccccatttactgagaacctgctaggtgccaggcattgtgcaaggcaaccgggcacagagaaacaaaagatacgcccctgccccagcaatgccgcctggtatgggtgctgccctgccattagctatcccagccctaggaaactgccagctggggtccagtgtctattacttgtgtggtggtttctctagtggcagctagtgaaatctcaggcagaggggtttcatacatgagctgatcactcgggggcttgcttaaaacccttcagcaactcccccttggtctccagataaaagcccggtccatcaatgtgtcttccaaggccttctggaacctgtccctgccaccttggggccctcctcctcctcctctctgctgctctggctatgtggagccgtgctgtccttcaccctgcctggccagccttcacctgtgcctgtcctctgcctgggacattccttcctcctactctcttcttcagcttcatccttcctgactttgtgagacagcccttttcccacgaagccctccatgccccccagctgcattagatgcatccaccagtgtgctcccactgcctctcagtctcctctcttgcagcacttatctgtcccgctccaaatgtatcccgttcaccatggggcaggggcctgtgtgtcttgctcactgcattgtatccccagcttgatcacagtcagcagggtgcagtaggcactttgaaacatttgcaaagtgacacacggtgccttggaggaaggtgccatctctgtgaggcargagtcctggtgccgagtaggtgcgggccttggaggccaccagtgtgctaatggcaggtgtccaggcaggagccgggggtgacgtgtgggtgaaggatgtgctgtggggtcccgtcatcacttgctttattaagctggttgtatcacttgacatctttcaccactgaaggaaatagagcttgttttaaggtacaaattcaggggtgtctgggctgtgagagaaatagcttctggcaggagtgctgggttgatgggcacctttgccaccaccccacccattgcccaggcagggacaggaggccagagctggggaggggctggagccctggcctcctggctctcagtggctctcagtgtcaggagatgactccctctgcacccctgctgtttctcctggtgatgtggtgctggagtgggtttctctggccaggacagccagtggaggccttgcagcgactgccgtgccctcaggctgaggctccttctacgaggctggaagccttttcctcctgagaccctaacacgctccctttcctttcctttttgagggaagccaggttccctgcagcagggcctcatcacagttccccctggagcattcacgcaaggtcacttttcccatctgaggaaacgtttgtcgtgtgctccgaccgaagcgttggcactgacccgtctagaattctgtgtgcggagtggaggtgagatgctgaggctgtgcctcagcctatcttgggtccccctctgcctacaggcagtgagtgtggcctgggaggcaggtggccctgtggggtgactgagctgggcgttgtcctttcctcttcctggtgtgtgtagcgagcctggtcagagcatggcgtctggagtcaggcggcctggctacgggtcttgggtctgccactcaccagcctggtgtgggcagccattttagcctttctgggcctcagcgtcctcctctgtggatgggggacagtgcctgagcgccgggggctgcacatggtgcctgtctctctgcgttcttagtggaggtggcccctgtggtggtccctgttgatgccgacctgctagcctgctccatgctgtccaggagagtactggggccttgccagcggagccccctcttccctggtcttatccctcggaggtgctctgctgagagctgcccctgtgaggagccatttcacttctttcttcaagtggatgtatttttgaacatttgataccttctttcaaaagtgctgtaccttcgcttttattctactttgaatgtaatttagttgcacattcatatttaaaatctcatatgaattaatttcatgaaattggtttgtttttcttcttccatttcatgaagcaatatcactcaagctcctcttgcgtctttggcaccagaggcgtcatcccccgagccactctgagtcatctaatatggtttcccgagcgtgtcagcttcacttcacataagtcatttcagatcctgcacttattgaatcagtgcatactgctgtcactgggaagtttccactgtgccgtagatactcgtttgtaacattttagaacattttcttccatttggcactttgtgttttgtcccccgggttttgatctaggctgcagaacaggacctgtcctgactccgtgctcaaagtgctgagtgaccctgtgctccactgaagttgctccatccaccttctagaactctgacgccagcttgtcatcagcttctcgtttccttgggagatggggtggtgcagcagaggccagcctgccgtggggaggtgggctgtgtgtgctcccatccctatgaggctaacaggagacttacctataagcaggcatgcaggacctggagtgaaagaaagaggagaagaagttgcctccttgggccaaggggctaaggtggctcaggatatgtctgttcatcttatatcggagcccactgttcatctgccctgaggcctttaatcaccaagaccccagtggctgggggaaggcctaggcagtcctatacatacagcttctgagaacgtcagaaaatcaaggattcaaccccataatataggtgacactgcttgtcttagtctgcttggactgccataacaaaataccctagactgagtggcccacacaatagatagtttatattctcccagttctgtagactggaagtccaaggtccaggatcagccagcagcattggtgtcaggtgtgggctttccccttgggttgcacacagccaccttctccactatgtgcacacatggcctttccttggtgtgtgcgtgctgctggggtggggcggtgggggcagggaattggggcagggagagagagggctcttatgtctcttcctgtaaagatagtaatcctgttgaatcagggcctaacttatatgacctcatttagccttccttccttccttagaagtcccatctccaagtgcagccacctggggagttagggcttcaacatatgaattttggggaagacacatccatgacacccctagtatgctgcctgacacatggcaagtgctcaatgaatgtttgttatatttgaatctgaaaggttccagaaagatgagatggacttggccccagaggctctaggcaaatcttgcagaccaagggggcctggtktgtgtgtgtgtgtgtgtgtgtgtgtgtgtgttcccgggaaggcacatcctaagcttggcctgctggctctggctggtatgttgggtatagactggagatgagctccacctctgcccagccagtcagagtcacctccggacctcctgcttcctgatctcctcagccctttggggaaatggaggaattgtgacatttgccctaggtgatggggtgctgctactggggccatataccatgaagccgaaattcctagtctgtttattcataataataccttatagctgagtaatgaaagctgcatgagagcaaggagagtgttttatcatcagcacgtcagatggcgcctggcacaaagtaggtgctcactcattgggtgttggatttaattaaaataacggctagtcttgatgtgcaaaatggcttcatgtactgataacctcgtaccttatgccaggcaggactgtggtccctgtttgcagatgaggacactgaggcacagtgggaaccagcggctgttataggtgacccagtgagggaggctgcatctcgataggctgtggggaagggatggtggagatgcaggaagcccatgctgacgtgcggagtgggcctgcacagatgaggcttgcttcgtgctccccagcctggcaacgtggacatttctggctgtcgagaaggggcctaagaggtgcccactcccctccttgtgggtcatttcatccaccaactcctgcggtgccagaggtgtcctctggcctcagcctgcaggaataaatcgctggtgaagggcttccttctggcctcatcgttggcttctatgtggccggccttcagtaggtgtttcctgagtgagtcgatggaaggacacattaaccacacttacagattgaaatcaatgccctttctgctcagctagctaatctatcactctctttggcccctgacatttattatgaagtgtgttcttattttattagtatggctaattaatggatgacattaaaatattgacatgaattgatttgagtatctgtatccttggagcttcagttaataaaataacttttgataagactagtggttttagaacattgagacttaattatattttctaaaggatttctctagaatcatataactgcttggcaaggtactttaattccctagttaaccgaaagaaattggtttttcgtttgattttgctaaatacaaattaaaagtaatatacatttgataaaagcagttaaaggattatttataaaagcctccttctttatatattcggaaataatccataagaactgaattaatattgaggatgatatgcagagaatatgacagttggagagcctgtttggcctagagaaatatgcatgcatttctgttggtaatttctttttttttttttttgagacagagtcttgctctgttgcccaggctggagtgcaatgggacgatctctgctcactgcaacctccgactctggggttcaagtgattctcctgccttagcctcccaagtagctgggattacaggtgcctgccaccatgcccaactaattttttttttttttgagatggagtcttgctctgttgcccaggctggagtgcagtggcatgatctcggctcactgcaacctctgcctcccaagttcaagtgattctcttgcctcagcctcccaagtagctaggattacaggtgcccgccaccaagcccagctaatttttgtatttttagtagagatggggtttcaccagattgatcaggctggtcccgaactactgacctcaggtgatccacccgcctcagcctcccaaagtgctgggattacaggcgtgagccaccgcacccagccttgttggtaatttcttttgccattcttcctcaaagatgagtgcctttcttccttgggtttcttctgtgcagttgatgtgttacacttgtacatcccagtttcagcatcagcaagttgtgaattatgacaatggttgaaataggagcactaaggagaattcaggtgtttcattctcatcttacttaggttaggaagtctgccaaagctagcaatttgaaaagaaagaaaataaacaaaatgaaaggaaaggaagatatcttgcagaarcactcactataaaaatataataagtcaatgggtattatcccacttgtaagagagtcaactcctttcattcgttatttttagaaagcttactgtcacgatgcctgaatcttccaaaaatgtagcatgctgaaagakaccttgcaaataactccatcaagttcactagcctacaaaaaatccatcttctcacctttcttccccttttaaaaaatgttgatgtaatttcaggcttacggaagagttgcaagaacagtatcaagaatccccagacacccttcacccagtttctccaaatgttaacatcattttataacccattccacatatataagcatgcatatatacatattttttggtaccatrtaagagtaagactgayagtcctttactcccaaatatttcagtgtgtgtttcctaaaacaagaaattctcttatatagtcacagtgtaatcatcaacatcaggaaaataacattgaagcactagtcatgtgttgcttaacaatggagatatgttctgagaaatgcgttgttagacagtgttgtggtgggaacaccatatagtgtacctacatgaacctagatggtacagcctactacacacccaggctatatggtataacccattgctcctaggctacacagctgtacagcatgtggctgtgctgaatactgtaggcaattggaacacaatggggcatttgtgtatctacacatatctgaacttagaagaggtacagtaaaaatacagtctaatcttatgggaccactgccgtgcatgtggatcgtcattgactgaaatgttgttatgcagcacatgactgtattatctactgtacataccttattgatattttgtcaactgtcccaaaaatatcctttatagcaaaagagaattcatggtcatgtgttcccttcatcattctatctctttagtctccgttagtttgaaacagttcctcagtttcacaacactcacatttagagtacaagccagttattttatagaccttcaatgtaggtctgtctagtctttccttgtgattaggttcaggtgatgccctttggcaggagtgttccgggtgatgctgtgtttctcagtgcttcctaccaggaggcacatgttggttagtcctgttgctggcagtgttaactttgatcacttggctaagatgccaggtttcttcagtgtagttaatattttgccttttgcaattaaaaaatataatatggagaggcactttgagacaacataagtatcctgttattcctcaacctctcatcaactcgttttagcatccatccatgattcttacctgagtcagtccctatgatcacgcttgtcacgtggggatttctcatcctaactagaaagaagagttttcattccccccccattagtctgtttattttgtatccatgtggactcatggactcctagtttcttagtttaacagtaagttataataatacatttttatcatttgataagagaaatctcttcacgctagctgctgtctccatattctttgaacatgacttgactttttggcacagcaagatattctgggctyacttattcttttcctgccccagtcctagaatcagccatctccaaggagctctggttccttttagtggagaaaggcatttagaaaccaagattttggccaggcatagtggctcatgcctgtaatcccagtgttttgggaggctgaggcaggggggtcacgtgaggccgggagtttgagaccagcctgggcaacatagtgaaaagccgtttctacaaaaaaaaaagaaaagaaaaaaaaaccagagagagaaaccaagatttgggatttgggtattagatgtgctcattgcttcattgctactgggggtcactgcttctcagaagacagatcttggcgatagatgtctgcctatacatgcacacatgcctctattcagttatttccaggagaacctgtgagtttacactgatgtctctaatcctgatctagtgctgtggggttcattctgcccttttccatttccatatttgtcactcccccctccaacagtgaaacctggcttcctggttttcacaatgtatttatgtatttgctcaattctagaatgtcagaaagtagtttcaaaattgctaacttctgcaaaaagaggtctagtgatcagaattcagtattagagctcttttcgacttcagactgagagcatatagtccacatttcaggtgtttcttgggtttgttccctgctgccccctttcagtgtggttatgttattcatttgaaatacaatttggttcctttgtttctctttgtattctatttgagagatttccccaatcttagggattttctcttccctcccttttgtgtgaaccacggacatttccaaaaggcaggtctgtacaaaaagttctattcagagaggtgctccccctcctttccactccaatccctttttcctctctacccagctcccaccctgccctgtagggaaccagtctcattagtctgtgttttttccttctatgtttctttttgctttaatgagtagtttcttattccgctctttttcttcataaaaagtagaatattctgaatcctctttcacagtttgcygtttctcatttaactgtgcgcctgagcaggctacattagtcctgaggggtccctgatccttccttctgctcctgaggggtctgttgtggtctccattttggctgttatgtaggtgcatgagaactgtgcagtgtgcgtctaggtgctaatgacagcacagcccccaccaggcgttgtgtcttttccacctgactctggaagagtggtaatgtgggcagaggaggaaactgaggctcaaagtagtcccatgaccacacgtcacacagatgtgagctggtcctagaggttgaggccagactgtctggtgccagaactgaaacttgtgaatgacgggtgtacttgctcctcctgctggggttcattgcatgcctgagatgccaagagcagggctcgcatcaccctgggtgctaaggaaaaaggccccagggagggaaggataacccaggagaaaggaggagctattccccttataattgctttccttatcattcttttaaaatttgttgtgtgtacatgttttgtaatgagtataacacatcaatagaatagggtttatgtactcaaagttgtgtgctcagaaaaatttttaaaaatgatagtgatatgtgatcaaaaaagtttggagatcacggaaagagaagctcactcagctgtcttgaagtggagagagccctggcctggccttaacatccagagatgagggcttgtgatcccacctgctcctgctatgggggcaacaagacattcattcactcaatcattcgttcattcattcattcattcattcagtatggctgagcggtgaggttaacacagtgagcaggaaggtgctgtcctgacttcagagagcatctgcaagtccagatggggatcttcatggctggaaggacagtgaggcctgtcagggaaggacacagtgctgtggatcacctaggaggggcttgtaagtgaggtttgggggttagatgtgacttccagggagaagagtgacgcctaagtgtgtatgagagtcctctggtgtgaggcttggagaggagggagtgtagctgctggccagcaccgtggaagagttgactctgagcaaatcattaatctttttgggccttaattgtcttctctgtaatggggaaggatagtaccactggcctctccagcaagttctttgcatctgctgaggccagattcaggtgtcaaattctcagctctgctgttgactagccatgtgtctttgggatgtgttatgtctggagctttgctaacaaagctttctcaccttatctcattgagtcctcccatccagcattttccatatgagtgctttgagtttcagagaagtgaagcgcttatggagggtcccacaagcagtgggagccgggacgcagggctgactactacacctgggcccgccttttcaccacagactgtgtgtgcttgtcatacttagactttgcttgtacttgggaaaggagttcagtttgctttaatgtcactttaatgctttttagaattcatttcctttgtttattttgcagcggtataatttgcaatgaaatagtttcacattgagcttacatgttttgatggcatcttaatgttggctccatggatttgcagccagatacttttgtcattctaactttcctatatgatggcactatgtggcagtgtggccatgaactatggcctgggtttccctttaggccggccaggtagcctctgagtcaggtgttcggtgtctcttgggtcgtggaggactctgcacactggggacaagtgtcctgtgtgtcagtctcctgtgtagcttggttttactttgccatgtcattgggtccttcctggggttgggtttcacctaggaacatctggctgggcatcatatgtgcagaagagagcgtctcttcgctctcgccccctgagctgtggagggtacatgcgcaccccagaagcaaaagctctggctcccagagggccttggtttgctaggttggccctgctttcagttgctgtccttgtgccacagcatatgctgagccatctgttctgcctttttgttttggaaaatgtggcacaacagttagagtcttgcctagaagagcactgaaggccttttagcactggggctgtgccttagccatttgggtcccttcagtgcttggtgaggggctggagctggagtaagggcctggtacttgtgtgttgaatgcttgtatgcatgtttgattattgtggctgagggctcaggagagtggcaggaaaggaggaggtggagcccagagcagggacttctttccagggcccaacccacacgttggtcttgctcctggaagagcacctgcctgtagaaagcaggtcccttctgcccagccccccacggcccagccttagccccatcctctcctcaagagaccccacagcttggctttagcaagacccagacccatatctgagattccagtctgagcccgctgagtgttgagtctcactgtttcagctcttgggtttcagtgcccaagaagtggtactatagtggcataaaaaagccacccgaagctgggctcataccttagctttggcacttactagctgtgtggccttgggcaaggtgggttgcttaacttctggcagccttgatttccttactgtgaagcagagacatacctctaagcagagagtggttgtagggatttgggatgacatgtgtccagcacccagacacttgggcattggttgccattattattattagtattattactagtattattagtattagtagtattactgttactgctactgatgttactgtcaccaccactgttaacccccattctctccctctacctctccaaccctacgttcacccacagcactggtgttatacgcccccttagtgaagaagagaagacaggagctggctcagagcatttatctgcccagctgctgtgagccctgagctgaccaccaaggatgctaaggggttcaaggaggactgcacctccctctgtccttgccttctcatccttttttctcctgacacaccattgttttcgcaaaagaaagaagtagttggagtctgggaaagaaatccccagggccctgtttcagatgattgtcccatttctaaacttgagttaataagagtaaacaaagtagtaggtagatttgcacaggagaatattattattctcatgattatgtaaatatttatctgttctggctttcttattttgttgctggtgtctaatttccaagtcttgtaatgaagtgtaatttggagaagatttgcaaagacaggcacgtagtgaaataatttgatttgttcagtaaacttggtttcagttattcctttccatgagttgttttagaaccccttcaatttctttgtgatttgacaacagctttcagcccaatgaagatatgactcttaggcattgccaggaattcagaattggtttataatattgtcgcttaataagaaaatgcgttcattggcaggatataaaatttatgggcttcaaatggatttctgtttgtagttttagccctctgtgctcctgccattctcgaggctatgagtaaggttttttaattaagtcaaattgaattgaatgagcttttattgaacgcccactctgtgccagacaccagctccttaacccttgcactgccctgtaggtggctatggggagctgagccagaggaggttttgccccatgctcacgatcattcagctggcaaacctgggaggtgggatttgaagttaggtttgattctctggctttttcatccaaagctgattataggcagacttgattaaggagaagagagaggttgagtggctttcatgttatttcattgaatcttgtttagtcttctcagccaccctgtgaggttcattacattttccctattgtatatctgaggaaagtaaggctcagagaggtacagtgatatgctcagggtcacacagctggtaagaggcagagctgggatttgaactcagaactgcctggctgcaaggccagagttccttctagaacccctctaggggtctgcacttcctttagcacatggccaattgaccacctgcccacaaaaaatggcctggccctggtggctagggcaccctcctgcagatggaggcaaggagcagtagggagtggggctgggcatcagttgcccaggtacttcctagctctatgccctgggcaagtgaagtcctcctttctgaccctccctgcacccactggtgactggtggcagaataccctcctgggttattgttaggatcacagacaacatgtgtgaggcacctggcacttggtgggcactcaggaagtgaaggaccctgccctttggcatctgttgcttgtcagaatgcgtggtggatggctctggcctcggtgacgaagctgctgttgcttcagcccccggactcctgtgcatcacagagctgattcagtgcagacaggtgactcatctgatggcattttgtgtggcgttgtgcagttcagcctggtacagcacggcccgcccacagcaggtattcaagagccgttagtgtttatgaaggtgataaaattgcctagatggagggaagccgtcaaaataagagcctttgcctgtcttgtgaaagttaacttgcaaacctaatgcctgtggggctgctgaaaaagcgtcacctggatttctccttggagacagaactctctggaaggacagctgggcagcccctgcttgccatgtgggggtggacgctttttatgtgacagtgagttggagaaactaacagtggtcttcaaggcattgtgctcagcttaactctttgaattgccatagctttaaaatgaatactagaaacagttatatatttttcacactctccatattttctccattcaatataataaatgttatcttgaatgtttgagggttttatagcaaaaattcctcccatttgtaaagcatgctgcagtggatgggagtgaactagctggcagcgctctcgtgtgacgtggcagaggctgagggagttgcccaaaccccacttccagttggaggaagcctgggccctgacttccagtgcatgttcaggtccacttgtcaaggaaaggatccattgttaagaaacaaacatgggaaactgtcatgtgagcgtccctaaaagcagcatagtcattttcgagtcactctctgataaagatagaacacttcatttaggcacatttcaggatttcagaacatttggagtagtcctggggtggaaagcagcgttttcctttttcaatttcaacctgactccattcctctctttatgtgtgtcagtcatagcaggggagtgttttcctcttggatgcgtttgcacctggcaaatgaatgtgcaggaattctttgattgcaaaatagctactctcaaaatgcagacaggcagccacagtcagggagcccttcggccacggcagcggggtggcgccagacacctggctttgagtcccgtggaggcatgccacttagtctgttctgagcggctgtttacaggcggatagaaagggctgtaggatgggaccctcaaggttttggggcatgggaggggctggccgtcatgattcagcatgctagctctctggaggctgtgctgagcactgagggacactgggagaaaaacacaggctcctgctttgtccatgtggaaggagcccaggctgccctggctgctatacgcatccttccaggcaaccttcaccttctggtctatttagtctcattccctgtttttattcccttcttttatttagggagagccagagcagcaattctcaggtcaggattatttgggagatccatattacttctgattatttacgaagggacaggccgggggaggtaaccacctcgataaattcgtcagcgaggcagctggagggatgtgtgacaaacataccaggctgtcatttggccagagattgtctgcactgggattgttcccccaggatagtcctgatgacaaatgtaattgacattttttattaaccctgaaatgattaaagatgctgctgctgaatttgtgtcaaagtacccggtccctggcattttgagaaagggattctctgtggagccaataaacagcctgtgttttcttcctgttcatcactttaatcaactaagacatacagagccctgtctggtttggtcttgaaactgggccagggagataagactctgcttcctggcttaggtttccagaacactctggtatggacatcatgagggacacataggaggcactctgttcatttaccacacagtcatcaaacgtttgctgagctccttctgtgtgccaggtcctgtgtgtgatattgggcgctgtctccttgaagggtggtcgctgtagaatgggggctagaaagatgtttatggggatgattgtgagaactgagcattgtaggggaagactgggccaccctcactgcctagggggtggggtggggcagggaaggcagtgcagggggtggtttgcgtcttacaggaagggagtctcctctccagacaggtcttacctctggagctctccagrcagatgctggaagtggcagtgcccagagtgtgtgggtcttggagtgccagagtgtgggaacacagaggggcagcaggggagggtggaagacacacaggagagcttggctggggcctgcagatgggctgggggccacatggagcgcaggtggactttgctgcttcctagcctgcctgctgagttactgaagctcttggtcttggtttccttatctgtgaaatgggacaatcctactttcgcttctgtcatagggctgctgcaggatgaaatgacagtaggaggaaagcccctgattggtgcttggcatacagagcctagtcaacaagcatcggttccttcctagatgcagtctcagtagcagtggccaggtattgagcacctactgcatgccaagcgctgggctgaaggccttgcactgactctctgttaggtatttttattcccattttatagctgagaaacttgttagagggtaaagcagttgctcagggtcacacatagagagaggcagagagaagatctgacaccaggctgttgctcccaagggcttcctttcagcagtgcaggggctgggaggtgccaggaggagcaggaacatggagagggccagctttgactgtggccagagccatgcttgagctcttcttttggagggatgggcttgggttgcagagggtcttacagggagagtgtgcttatcacactgctcctggatggactgatgaattgaacacttcctgagcacctgttttgtggctagccctctgctgagggtgcacacattccctcagccacaaagccagtatttagtgagcacctactgcatgccatgtggtccaccaggccttgggtagatggtggtgtaccagaggcaggggtcttcaccctgggggagctcccaggctggcagggaaagaaggaaagaaaaagatcacacatctagcattgtggataagcaacatttcagcactgaaatagtgggtctatgttattaacattttatatgctaggctctcccacacaaaaccagatcagaaccctctctcttgcccctgaactgcataggtttcaaaggtgatctgtccccttgtatctcgacctgttgctcaggaaccattcccatcagtttaatttctttttccttttaatcctgtggctggcaggatgttgcaggggcagtaatttaataaaagtatgcagtttgtaaagcagctgctattctgtgtactaagcacatttgccaaccttttcagggaaacctccaagctgttcttggaacttagcgatattgcaggaaaaaaaacattctatttaataacatttcatcctttgggttctgcagctaatagaagcataaatggaggccatgtctgaaagccatttctttatgtgattcagagaatcaggacatagcaattacacagtgtatgggatttatggaaacattcatgcctaacaagaagaaaacagctcagtaagttatttaatttgaagtcacaggcccgctgactggttccccacccagacctaccgcactgctcggcaggccccaggcgctcgcacacaggtgcccactgctccctgtctctctgagtcctgcccggctgcaggtggaaacctgggcctgctctgtggggtgtgttcacaccttaggccagggcaaggtggagctgggtttgaatattgctcttctgactccaagcctgtctttcctcaccactgcatataacagcctcattaggtttgtaatacgtggcagctgcatgatctgctgggtaagagacacacatttagaaaaatttatgtgccacatgcttttcctttctttatttctctttcccctgaactgagataaaaaggagagtcacacacaagcagatgtcagaatgactgccttgcttcgccccatctactggaaaagccaccgactgaattcttcctaacaccgtttctgtttatggcagatatagggtgggggtggggggcagggccctccattctctgctttccgtgctagccgaagccttaattcaaaaacaaattgagtccttcagctgtcactcgattgttccctctgattttgggggataaatatcattgctgcagcctcatgtctcctctctctccttttccccaaagcttttccccttttattttctctctctgcccagaactcaacatatctctgacaaaagcatgcattatttagagcctgtcgcctcttgaagttctttaattacagaattaaaccaaagtaatgacagtttaatttgttctttcattaattgggagcgctccgggctgatgtgaaatgagcgcatttggaaggcatgaggaatatgtactgagtgattggagcatgagtaataataattgctgtcgtttagtgccgggcgctggctaggtgctcctcatgcatattctctgttaatgctccctgcaaccttgaggaggagataccaccttctctgttttgcggcttaggatcttgaggctcagagaggtgaaccaacagccacctgtcagccagaggaagagccaggcctagacaccaggagcccagccccagagccttatcctgtccatagccccacttggccttgagaccagcagctgtggcctcaggattctgcaaggggtggcccacaggaagatgggcacacctggcggggcatgcctgagaaggactaagttgtgtctggctgaatttgaggctgagaggaaacatttgaacccgtgaaaatggaaggaaattggcggtcagagggagctgaagcctcactggtgctgatggaaattttgctacttygaaggtagcagtttgtcctcccgggagccctgcagccactgaggggcatgcctgcgagtgcatccgtgccacttagttgtgggtcagggaggctgctgcagggaaccgcaggatggacatctctaaagcatatagtgaagggtagaatccaggtgtatggggccccgtcaggcctgctggtcccccttaccctagctaaggcccatgccagagctgctacctttccatggacacgtctgggtccaggtgacttccttcttgcactggccccaggccccaggccccaggccccaccgtacctggcagatgaagtgcctctgatgcccctccgtggcctgcagaagttctgggttgggcctttggtttcaggcccctgggactatacagagggtggatggttggtgcattcacagtactagtggctcatctggagggctgtgtctagaaggaggcagcggcgaaacagctcatcgtcctcctcacgtccttagggacttgagcctggtgtgtaccgacactgcgctctcttggcagcaggcagtgagggacaggagaagaaccaaagttgatagtgccttctgtggcaccttctacttcgtcactttaattccctttaagcttccccaccactctggaaagtgggaagattagccccgttttctagctgttgaaatgaaagctcagagacaatggtcatttacccaggccacatggattgaaggggcagaacagagttaggattcaggggtgtctgaccctgaagtcccccatggaactgggcctcygtgttcttgctgtcaccccatatccccaccaggcaccctctcactcactctgttcacatctcccagcaacctcagagttttaccctatgagttctcagacaaaactttagaatttattatcaatgcatttctctgcagcaaagtctggatgaatttaagattaggggattcggttacactttattactgtttgtcattaaaaatcatgcaaataagccatggaataaagtaacttgtgttgttttggacaccagatttacatgtttactggaagaaaaatgatgctgaactccttcaaggtggtaataaaattttgcctcagagccttagctttgttggtctttttctataatttactccacaacttccaaaaaatattttaaactagtttatcataaaaactcacaccaagggtttcaaaacatccttttgtaaaggtgaaaagaagactgagaagctgcataggctgcaggctgggagtggagaaggaaagacctgctgcagccatgtgactcaggggcctgagaggtgaatcaaagcctccttgttgccagggctgagacggggacaggatggcttctaggcttcctgtctttggattttagtaggaagtttccaggcttttgttctgaaacccccaggttgcttcatttagcttccgacctccctgtaggaggaggtgggcacagaacgtgtttggaagcgtctgggagaataaggaccaggctagaaagaacctttgttctaccctgactcaggcatcggccatcctttcagagcccatttccaccacagttggaagaagtagttggggtttagaaccctgtgattccaacccatgctgcccctccaagaagacacggggcgaggcccggccataccagtgttgaggtaaaggatctgaggctggccatcctggtagatgaaaagagggttcaacccaggatgaccccaagcctttgggttaactgctgagtttggtgtttgccccasatattataccccctgactgtttcagtgctgtgctccaccttcctcctggcgtggtggggaagggtagccatgaagctcagttggagtatagaggaggagccttctggctttgtgagctcctgcccctggggtcctgcggtggtggtcacaagtgacacagagccatgacaagtagcattgttgatgttgatgatcagaattagtaaaaatgggctggtcgtggtggctcatgcctgtaatcctagcactttgggaggccaaggcaggtggatcacttgaggtcaggagtttgagaccagcctggcccacatggttaggccatctactaaaaatacaaaaattagccaggcatggtggtgggtgcctgtaatcccagctacttgggaggctgtggcaggagaatcacttgaacctgggaggcagaggttgcagtgagctgagatcatgccactgcactctagcctgggtgacagaggaagactccatctcaaaaaaaaaaaaaaaaaaaaagtaaaaatgtataaatcacaacacatggtaagtaacacaataccaatcataattcacttcaaaaacagcagcttgaaattaatcagcagttgtgttgtttcttagaaatatcagaagccacacgctgtgtctgaaagcttgtgagtaagaatgaggaggagtgacaggcagatcagccaacgatagaggggcttctgtgatctgggcaggtgtcgctggtcactcctggctctgtgggcgtggttatgtcctaaccctgtgagttcttgctgctgtcagcaccgcatggatgcagggattcctggctgttagttacatggccaagcagcttctgaaaattatcgtctgtggccacagaaatccttgactaagtgctacggagtcatcattattatcccatcacatgattcttcttaatcctttagaatcacttgttaaactttaataggtaagataatttcatgctcattgaagtaatgtaattatacagactaattcaacgctattagaaaatttctgggctccatttataataacagctaatgcattctaagtacagtttgttagggaaccttgcatattcaacccaaaagaaccccaggtttgcgcgtgagcttggatgctgagcagtgttgagtgaactggagcctactggaagctgttccatttgtccttaggtgacttttttagaagtgattagacttggggattgtttctcagaaatggactggagacccataaatctacaacgattttawttttggacaccaacctggagcccacaaagacaacttcccacgagttagcagcagtgctgggcagtaggggggcacgtgtgctgaggcgtgggcgtgccagccttgcagtggaggaggggctgctctttgccacgtgtctgcagctctcttccggtctctggcttgaacagactggggagcctgaggtcacattttacttgtcttttgggagggaggttggggtaatctggggcaaggggctcagccagctgccacccagacttgagtgctctgtttggtggcaccagacatggtgaggtgggtggtattgagcagggtgggggaggcagcaaaagccaggcctacagaattacacttctgtggcctaatgattttcaaaaaccatttgcgagattgaggtaatgtatttcccagacttaagcaatttactccttcccaccgtgctgaatcaggctgttaaatcctcttgctgtgtgcgtagagctattggcaccagggaaaaatggtcaagttcaaggcccctgccaaatctgtgctcttttctttggaaagtgatgagtaactgcactttaaaaaaaaatgggctgggcgtggtggctcacgcctgtaatcccagcactttgggaggccgaggtgggtgaatcacctgaggtcgggagttcgagaccagcctgaccaacatggagaaaccttgtctctgctgaaaatacaaaaaattagccaggcgtggtggcatttgcctgtaatcccagctactctggaggctgaggcaggagaatcacttgaaccagggaggtggaggttgtggtgagccgagatcgtgccattgcactccagcctggaaaacgagcaaaactccgtctcaaaaaaaaaaaaaaaaaaaagaagattttaggaacattggaaaatgttaagtgaagaaagcaggatgccagattgtacattcagtaggatctcaggagaaacaatgtctgcatagaaaaatactgtggaaactgccagcaggttgcagggcttacctgtgcttgagtgcaaggattagatccagtgtcccctctgttccttttcagcatcttacccgttgcccagggtggtgacacctgggccccaggtgagaagcgccccagaaagagaagcacatgcatgctggccgtgagtcatgggcctgctaacttgcttgtcctgtaaccttgggcaacttccttcctactgggagccctagtctcttcatctgtatagtggcccagttacactatctcagaggagtgagggtcactgccaggactccgtcacctgcgtaaacacctggcaatgtgggcatgtggcagtctagataaaccatagccttgtggtggtgatggggtcattataaaaatgcattgtttctttcacaaccaggaaaacattacacataaaagaacagggcaatgactggaggtggaaaaacaacgcagcctacctagctgcatggagacctatgggaacatccactggaccttaacttggcttatgggagtcaggagggcttcctggcggaaggagtgtctcatgggagacaggagagaagagtaggagccaaccaggtggagacagaggaatgtacttcaaacagagagaaggcatatgtaaggctggaggttcaaggaacagagtgagtttgggaaacgcacctagaaagtggcgtgcaaggacgatcgtgatgggagatgaggctgggcaggtgagtggggcctccggagtcagccactgactttcccactgtagctgtttacaaccccctaagcccttgggatgtgcttggcaagataaggccttatggctagaaggctcggagagcatcctttactgggcttytggatggaatttttggagcaaagggttagtactcatttttatgcaaattgagaaatcttgatgaaaacgatcacttccatcccagccccatcagggagggccagggagaaccgtggcttcgataatggtatgggcctgttggagcctggctacagggctgccccgggaggcctcctttgggagcagagacagcctggcactggcctgtggcggttgccatggcagcaggacatgagcaacctgactttctgagagtggtcacctctattccggggccctgccctggctggctgttgcattggggtgggagaggctgtctcagctgggtctctggaaaagctgaggtcaggaggcctgtgccctgggacatggctatgtatgacagccaggacactctgcctccacccagactgggccttcagaaggaattaagttggaggccattaaaactaaatcaggtgatgcttccaggagcccccactcastaactgctgagagcatccctgagtccctgcacgtgcatgaagcagacagagtgattttaacgcagctccttgtcctggcttaggtgacgcctcccctcacttgtagaggtggcaccatcatgcggtcataggatgagacgtcccaggttctggctctccctgcctctgctatggtgtgatcagaagggggctgtctcctgctgttacgccatgtgccacgacaccctgccttctcccctgctccccttctgcctcactcccctctaatccacctgtaagtcccagtgattcttctctaaactgggcattcagtgcgtccacagtccggcggcccaggcctgctctctcccctctgcgcaccctcttcacttgtctccttgtgttattctggcctttcctatagcagctggtatgctctttaaaaacaaaaatctgcttatcactttgctccaatgcttaaaaaaccatccattttacatggagggaaaaattccaaacttttgcaagtgtctgctgagccctgggtgacctgcgttttgcccactcttgttgctctcctccttcacatagggctccagccacactggccgccagtcccccaggctgtgtgactatgccttgctcaggccctccccacctcaccccttcctctggagaagcctgctgacctccccagtggaaatcaaggtgaatctgttccacctgctattgtcatctcctagagccagttctgttcttcacagcactgatctgagtgagaagagctgtttgttgcttaatatctttctcttccactagactctcatgagctattttgttctctagcagttccagcagtgagcaaatttcttggcagatagcagactggcataaatatctgttgaacaaacccagcgagtgaatgagagtcactcagtcactctaagcctctctttgcccatctgtaaaatggagatgacagtttccctgacaaccttgtgggcttgtgtgaggggcacatgaatgtggaaagtgatgcacaaaaataaaggtataacattattactactcattctaaccaggtcacaacctcttcttccccgcagttattgagagagggagtatgtcttaggataagagagtaggagcagtccagagcccctcttactgtgtgcagattaagcacactgaggagggaagaggcctgtggcttgaggaaagatgtgacatgcaaccccaaaagcacttcacagtccctacaggtggggcaggtgtgaaagagcacctaacaacgtcaaagcagctcaggctttagacctcgggttccagctgtgcgggtccacaagagagtgctgagaaattacagagaatgggagggagctgggagaytagaggtgcccaagtggaaaacccattttccaagagtgaaaaaaggtagttttggaagccccatgtaccatagtgactgagtcggggagggacgcttatactagagaaagagaaaatagacgccaggcaggcagtagaattcatggccttgcaggattaaaagacagacatgcttgccaggagccagcgttcattcgccaaagcattcttttttttttttttttgagacgaggtctcactttgtcacccaggctggagtgcagtggtgcaatcatggcttactgcagccttgacttcctgggctcaggtgatcctcccacctcagacacccaagtagctgggtctagagttgtgtgccaccgtagtagagacagggtttctccatgttgccccaggctggtctcgaactcctgggctcaaacgatctgcccgcctcagccacccaaagtgttgggattacaggcatcagccaccttgcctggctcattcattcttacgtgagctgttagacttataggatctgtgtgtattgaggccagaggctgagtgtgtcttgatttggaaaggtgctgacattcagagcctcaggcctttagagccttggtgattccatcccatccttgttttacagaagagcaggaaccagcctaaggttcttgtggtgccagagaggttcagactgttcttgagaaggtaagagagataaagaggtcatacagtccaactggatgacctatggcttgttgaacaagagcactcaactctgagaattaattatttactctcagaatagaggaggtctctcatgactaaaggatactatacttagcattcttttccacagcctaataataaataaattgggtaatgttacagaagggaggtccgctttccaatctgctgatgacccaaagctaggatagccattcttttgtccacatgtttgtccatctgtccttctatctgtccatcatccatccaactatccatcctccattaatcacccatcccttcatctcattcatttatccatctatttcattccattcattcatccatccatccgtccatcatccattcataacccatccctccatgccattcattcattcatccattccgttctgttccattccattccttcatgtatccatgcattccatccatccatccatccatttattctatctatgccgtcactcactcaagagacattgggcttctagtatatgctagactctgttcaagacactgggggatatagaagcgaacaaaacagataatgaagagatagtgtccttacccccatggaacttacattttagtgggagaaataaacaacaaataagcaaataaataaatatgttaggaagtaacataaagctttgaagaaaagtagagctggctaagatgaaggggagtgatgagagcagtgtttagatcgtgtggttcagggaacatctctctgagtagagacttgagggaacccagcagctgggtagagaagagcacctggacagaggagtagcaggtgcccaggccttgagggggaagatgctggagtgtgagaggccaggaggccagtgctgctacagtggagtcagggcaggtgacacaagatttattccaggtgtgatgggaagccactggatagtttgtggggtggggggctataactcgactctgatgcagaggtccagtctggctgctgtgtggcagtagattgtagggcaagagtggaagctgagataccagttttttgtttttttctaaaatgtttttactgtggtaaaatatacataaaatgtaccatcttagacattttcagcatacagttgagtggtattagatacattcatagtgttgtgtggccatcaccaccatcctctccataatgctttcatcctgtgaaacttgagacatcggttttgaggctgttgcagtggtgctggggagagaggatggtgctcagaggatggagccacagaggcaaggagaagtggttgggttgacagagctgacgagtgagggggaagggcataaaggaggacctcagcactttggaccatcaaattaggagacagggattcagtggggaactcaccacgagacaacctaaaggctggcagtaggaagaggggttagtctggctttgcattgtatttctctggagtgcaggactagggcagtgggttggaccttgaggggtattgcaggtgggaggtagaagagcattagtggtgctgaaacctgcacactttcgagccagagtgccttggtccaggtgcctgccccacctctcacagtatggcctgggacaggcaacctctctatgcttcagtttcctcatctgtaaaacagacctaattttctacttcatagggctgtggagaggattgagttaattcggttaactcagttcactcaactaactcaattgtaaagtgctgaaaagcatgtgtggcatgtagtaacatgctcaatacatgattattgctacctggaggcggtcccagaataatgccctggattatgatgctttcaaatgtcccggatatgaagttccagattatgatgctttcaaaaggtgcactggctcctcctgagaccattgtactcccaccattggacaggctctgcacctgctgggggactgggcaggctgtggagggatcttcccactctgcgaagtgggtgtagctgatggcccccagaagccccagcctccagctctccacactctcttcagccccttctgtgatatgtctcgctcttaatcctttttgctttaagaaaactcttctttgcccttttacatcttctgttgacatttaaaattccttccctttgttctgaccttattgaatagagagaataatttcttggaattctctgtataatgaatgttcaggtacttacagatgctgatcgagtttctcctcaacctttccttcgagagaccttgcatcatttggtgtagaaacactttaggaagcacttaggaagatggtgtaaaatgaaaatgctgctgctgttcttgctgttgctgcaaatgtgagccctttgtaacccagatatcagcttgggtaccctgcccttagagatgcaaatgaaattggctcaaactcccataccatgtatcctacaaaccctgaagtgttcccaggttctctgcaaatttttgtgaagctggtggtggtggtgttcagtggctcacccacagaataaatactctgatcccctcactctcctaaacattcctaccagaaggctgggtgtggagaagattttgactgaggtaatggggtaatggagtatgtgtatggcaggtgtgagggtggaggtgaggaggtggggtgaagtgttactttttaattactgcaaaacagatgcttaaaattgaaaattatgtttggcttccagtaatgaagcagtagttctggcagactaaccctcccacagctaacaactataaactgtacaacagcaacaacaacaaaactacctgaaggtattggagagcaaaaaaaagcaggcagagactggacagacgtctaccctccaaagaaggaaatggtactggatgagtttctgacttttatgattttgtctgtttgttttgcctaagcataggctccagtctgtgccagacaggctgctaaaaatttgtatagaaaatctgtagtgttactggcttgaagaaccagaggacagagtttggggtaaccacagcagctggaaagtggctataaactctacccaaatctttkaatgcagactctaagcagctcaactaaggcaaagagaactgaatagaaatttctgctgctgcacaccgcaagggaaacagagtttgaaatttgagtagagccaggttagctgcgtgtttttttttttaaatcaatattcttcagaggagcataaaagaatttagagataacatacattttgtaatgttcagtattccacccaaaattcctagataaagcaagaaacaggaagagggggcctatattcaagagaaaggccatcaaaggagcttattgccaagatgatcccaatgttgaaattagcagacaagtattttaaaacagttattatagatgtgctgaaggacacaaaggaaaatatcctcgcaacaagtaaaacaacggggaatctcagtagagaaatagaagctacaagaaaaacaagtgttaaattctggaactgaaaaatacagtatctgaaatgaataattcaccatttcgattccataacagagggaaatgacagagccagtggacttggagatagatcaacagaaagtattcagccttaaaacagagaaaaatgatggaggagaagaaggacagatactcagagaactgtggacaatatcagaaaatctattatacaagtaattgagctccagargagaggagggagagaatggggaagaaaaaaatattttcaataaataatatcaggaaatgccccatatttggtgagtttcttttttaaaagaaaaaaaaaaatcccaaacatgtaaattgcaaacaggacaaatacaaagaaaaccacacctaggcatatggtagtcaaaccaaagatgaagagaaaatcttgaaagcagtcggagaaaaatgagtgtcatgtggaggagaataatcatgtgaaaaactactcactcttcaccagaaatagtggagtctagagacaatggaatggtatctttaaagatagaaaactaaaaatggtatctttaaagttcatacttatagtgaatgagatcagtttgtagatcactgctggccttcttgttatctatgacacagtggctcacccacaaaacaaatatttgggtctcctcactctcctaaatattcctatcaggaggctgggtgtggggaagatttgactgaaatggagtaatggagtatgtgtatggcaggtatgaggtggaggtgaggaggtggggtatctttgatggcatctttaaagataggaaactaggaacatgtcaactcatgattctgtatccttcaagaatgaatgtgaagccaggcatggtggtgcatgcctgtaatcccagctacttgcgaggatgaggtgggaggatcacttgaagccaggagttcaagaccagtctgggcaatgtagtgagaccttgtctcaaaaaattaggtaggcatggtgacatgcacctgtagtcccagccactcaggctgagacgggaggattgcttgagcccaggagttcaaggctgcagtgagctgtgattgtgccacccaggctggagtactcagcctcctgaatttactgtgtctagtatccaaataaagattacaaaacatgcaaagaagtaaaaaaaatatgaaccatgatgagaagaaaaatcagtcaatagatacagatccagaaatggcacagatgatacaatgagtagacaagaactgttcaaccaactattataaacatattacatatgtgcaaaaaggtagagactagcatgagcttattaagaagagacatgggcgatacaaaaaagatccaaactggacttctagagatgaaacaaagtcttcagtgaaaaacacagtacatggaattaacagcagatcagaaactataaaagaggttagcgaacttgaagtcatagaagctatccaaagtgaaatacagggaacaaaaagcttgggggaaaaatgaacagatcatcagtgagctgtgggacaacttcaggttcacccaatatatgtgaaagtggagtcctcaaagaagggtagaacagaaaaaatatttaaagaaataatggctgaaacttttctaaatttgatgaaaatcataaacccatagattcaagaatctcagtgaacccctggcacaggaaacatgaagaaaaaagttcaccaaggtatattataatgaagtttcttttcttttcttttctttttttttgagacggagtcgcactctgtctcccaggctgaaatgcagtggtgtgatctcgggtcactgcaacctccgcctcccagattcaagcgaatcttctgcctaagcccccaggtagctgggattacagttgcctgtcaccacgcctagctaatttgtatttttaatagagacagggtttcaccatataggccaggctggtctcgaacctctgacctcaagtgatacacccaccttggcctcccaaagtgctgggattacaggcgtgagccaccgcacttggcctgaaatttcttataactactgttaaggggaaaaaaacttaaaagtaaccagaagggggaacaaggcacattacatacagaggagcaaagacgagagtgacctgaacttctcattggaaataytgccagaagacagtggaacaccgtttgaaagcactgaaaggaaaagccaaaaccaaaaccactgtcaaccccaaatttaatatccagtgaaatatcttttaaaaaagaaaggcagattactttttcaggcattttaaaaccgaagtgatttcgccgtcagcaaacttgcgctataagacatgttaataaagggagtccttgacacagaaggaaaatgatgctagagagaaatctacatttgcagagaggaataatgagcactagaaatggtaaatatgtgggaaaatgtaagatgttttttgttcttatttaaaaatcactttcaatgatgattgactgtttagagtaaaaacataataatgtgccgtttgtaacatatgtagatgtaaaatacacaataacaatagcacaaaggctaggatggaggagattgtgtatattattgttacagttctcataggggaagtgataatattacttgcaagtagtctgtgataagctaaagatgtatgctgtaaaccttaaagcaactagtaataaaacagatttatggttataagtctaacaatgggagrtaaaataacaaaagatattcaatrcaaaagaaggcaaaaaaattaggaaagagggaacaaggaacagatgggataaaaacaaataacaagatttaaacccaaaccatatcaattatggatgaaatggtctacccatcccatttgaaagacaaagattgttaggttggataaaaagtcaagactcagtgcctataagaaacccactttataaagacacaaaaagttaaatataaagggatagaaaaagatatatcatactaatagtaataaaagaaagctggagttaacatagacaagagcagatttcagagcaaagaatagtaccaggataaagagactcataacaacaagggggtcagttcatcaaaggacataacattaggtgtgtaatgtcagctgcttaaacattaggtgcataaatatttatataaataataagcgagctctaaaatacatgaagcaatactgacagaagctgaatggagaaatagtaaaatccacaattatagttggagatttcaacaccccgctctcaataatcaatagatcaagtagacagaaaatcagttaagatttataagactggaacaacactgtcacccaatttggcttaattgacatttatggaacactccatgtaacaacagcagaatatacattcttttcaattgccyatggaatgtccaccaagagagaccatataaaacaagtctcagtrtatctaaaaagattggaatcattcaaagtatattctctgactactatgggattaaattaaaaatcagtaacaaaagtatctggacaatttctaaatatttggaaactaacacacttctaaatagcccgtgggtcaatgaagaaacagatagagacattagaaagtatttggaatggaatgcaaatgaaaacacaatataaaaaatttgtgcagtgttactagaagagttctcagatagtaatttatagcactaaatatctatattagttgggaagaaattttcaaatctgtgatctcagcttctaccttaagacaccagaaaaagaaaagcaaattcaacccaaataagccaataaaaataagagcagaaataactgaaatagcaaatagaaaaatagtagaggaaaatcagtgaaacaaaaagttggttctttgagaccaatgaaaggtatatttagccygactcatgggagataacagagaaaaattgcaaattactaatattaggaatgagagaagtgwcctaattatagatactgcagacatttgaaagacactaaggtaatgttatgaccacctttatgccaatgaattctacaacttagatgatatggaagagttccttgaaagacgcaaacaataaaagctcattcaagaagaaatagataacccccaaagcctcatgtttatttaaaaaattgaattcatgattaaaaaccttcccacaaagaaaactccagttgaatactcgctagtgaattgtaccacttaagaaattataccaatttatcatgggatgaattgtacctaccccaactccaaatttatattttgaaatcttaacccccagtgcctcaaaaggtagctttatttggagatggggtcatgactgaggtaatcaagtcaaaatgaggtcattaggggtgcatcctatccaattctccctctatgcatatctatctccgaatctcccctttctataagggagaagctatgtgaatacaaagacagccatctacaagtcaaggagagaggtctggaacagattcttccttcagagccctcagaaggaaccaaccctgccaacagcttgatttcagacttctagcttctggaactgtgagacaacaaaattctgttgtttaaggcactcagtttatggtactctagtcatggcagccctgggaaatggatatatatatatatccgtatatgtgtgtgtggtgtgtatatatatatatatatatatatatatatacacatacacatacacacacatatacacacaaactcttctagaatagcaaagaagggggacacttcccaactcattctatgaggccatgattaccctggtatcaaaccaagaaaaggacatcataagagaagaaagcaagagaccaatatctctcatgaacatagatacaaaatttttttttttttttttgagayggagtctcgctctgtcgcccaggctggagtgcagtggcgcgatctyggcttactgcaagctccacctcctgggttcatgccattctcctgcctcagcctcctgagtaactgggactacaggcgcccgccaccacgccctgctaattttttgtatttttagtagagacggggtttcactgcgttagccaggatggtcttgatctcctgaccacatgatccgcctgcctcggcctcccaaagtgctgggattacaggtgtgagccaccgcacccggctgatacaaaatttttaaataaaattttagcaaatcaatccaactacatatatgtgcatatcatgaccaaggaggatttgtcccaggaatgtaagcttgccttaacatttgaaaatcaatgtaactcagcattaatgactgaactataatgttaatgactaattatgaaagaaaaaccatatgaacatttcaatagatgctgaaagagcttttgacaatatccaacattcattagtgattaaaaaaaaacaaacttccagcaaactagaaatagaagagaactcctttaaactgataagaggcaccaaaaaaaaacattagctctaatgtcgttcttaactgtgtaagactgaccaccttcccagtgagatcaggaataggcaagggtgtcacggagagttatttagcattctactggagattgccagtgtgataagacaagacaagaaaaggatccagattggaaaggaggaagtaaaactgcctttatgtgcagataacatgatcatctatatgcaattccaggctgcgcacagtggctcatgctgtaatccagcctttgggaagctgtagctggaggatcatttgaggccaggagtttgagaccagcttgggcaacatagtgagaccccagctctacaaaaataaaaataaaaacatttagaagggtgatgtgtgcctgcagtcccagctccttggaaggctgaggtgggaggattgcttgagcccaggagttcaaagttttacagtgaactgtgatcgcaccacttcactccagcctgggtaacagagcgagaccctgacttggaaagaaaagaaaagaaaagaaaattccactctgtctattttaaaaagcttctagtactaaaaagtgagtttagtaaggttgcagaatccaaggtcaatatccaaaattaattgtatttctacatacgagaaatcaacaatctgaaaataaaagttaaaaataccatttatattatcaaactatgaaataattagagataaatttgacaaaagacattcaagatcttttcatttaaaaaaccacaaactgttccttagggaaattaaagaagacctaaataaatggagagagacatcctgttcatggattgggagactcaatattattaaggtgtttccccagatattttagaatcagtgcaactccagctgtagaacacaaacatcatgaagggcttctcaaagatttggcaaatgggctgatcccatccgtttggtaaagggttaggcactggttgcacaggcttgtgctgaactgtgtgagtttgagaatggtctctaaaattattttctggggcaacagggactgtcaagaggtgggatgaggccaggagccaggcctgactaggagggtctccgagataagagtgagtaggatagggccacgagggaggcgaaggcttacccagaagtttgacagccaggtgatggggttatggatgactcttattttcgttgtatttttctgttttttttgtttgttttgtttgtttttttttttgggcagagcacacatatttccaatgaaatcagagaaacaacaatcctatagctgtttcctttgggattttgtttttgcacttctgtatagtttgaataatttacaagaagactgtattttttgtaaccaaaaacgaaaggcaggcaggcagaaagaacatgacctgtggctagatcaatacttgttcaatctttggagactgtgaggaactcctggtggggccatgtcttggtaacgaggacacagaaactgtggtaaatatggcaccgacaagtgactgcaccatattttacttgtcatattcttttcaaatctgttacttttgtcggacacaaagaatgtctctagttaatacatgaaatcatcttggaacatttgacagaagatttaactccttaattctatgaaggcagtttgggatctctaattacttaattgaaaaaagcacgcacttcagtctgctgcaatgttggggaattaatctttaaaacctgacagtgaacattaaattcaattaaggagaccaattggcaaagattcttccctccttcaccctggatagctttgagaggtagctgactggtctgcattgattcagatgctgtcgttgtctgtgcatctactaggagagccaagtgtgcgtttttcacttcagggggagcttgtcagacgatttacagattgatggatctccttacatgtttccgtggctgatttgggagttcccctggacaagaattcaaacattccagtttgctgcttttggccttggacttcatagagttcaagttttttgtaatttcttctttcttgcatgagaccactatgttgcccaagctggttcttcctcctccctccgtcctctcctcctctccatcctctcttcccctcccttctcttctcttcttcccccttcctctctgcaccccccttcctttttccnnnnnnnnnnnnnnnnnnnnttctctttccctctccccgcttcctctcccccgctccttcctttttcccttctccccttctcttctctcccccttcctctcccccttgctccttcctttttcccttctccccttctcttctctcccccttcctctcccccttgctccttcctttttcccttctcttcttctttcaccccttcctctccccctgctccttccttcctttttcccttctcttttcctccctttccgtttcccatcctgtgtttcttttttctctcctctccccaattcctccatcactccttctctcccttccttttttcttctgctcctcctcctctccgtcttggttaatttaactttttattttaaatatgaaatgttttaaacatactcaaaattatagaaggtaacagatacctatacacctgtcactgagattgtcaaatccccaggtgtgtctgttctcattctcagcggacccacccatcagcatttgacatggtgaccagcctctttgtcaaaacactctcttctctacgcttccaggactttcctcttctgtttttttcccacacttcactggcctcttcttagactcctttctggtttctctctctcctcccctggttcccagcctgtgaaacttggaggcctggggctgagatgtgggactcctctctgtcctgtctgcacttgctccctaggagagctcatccagctcaaggctgcggcacaatttccacaatggcatccacagctcagcctctaccctgggcctctcttttgaacatcacactggtacgggaatgagtctttatactgtctgctgtctgtcattcaaaactgagctccaggtcctccttccctcaaacttaccccttctgcaggctgacccatccctgcaactccacccctttcagtgcttgggccaggaactgcgaatgtgtcctgggcttttcccttgccctcatatcctacctccagtccagggaagtcctgttggttctaccctccaaggcaggccacttctctactgcctcccactgttccaagccatttcctctctccctggattcttgcagaagcctcctgattgtcttccttcatctctcttgcccttcattctcctccctgcatggcagctggagtggtcctactgcagtggaaccagccctcattcccctccgttccacctgcagaaccctgggatgccccaacggcttgtggttttccgacttcatccctttcttaccacctccctgccaacccccagccttgctcacttctctagctgcagtggcccttcttgctgttgcttgaccatgccaggcatactcctgtcactgcctggaagcttcttccctcaatttctacatagctggctttctcaccccttcaggacttcctccaaagtcacctcctcagagaggtcctccctggccaccatttcagccccttcccttgaccttatagagccctttcctggttactttttaatacttcagtcttcaccactgccttaaggactgtggatttttatttgttcagtgtctgtctccctcactagaatataaactctttgaaggcagagatttttgtcttatttgtttcctgttacacaatgcctggctaatagcaggtcctcaggaaatctttgttgaatgaatgaataaatgaatgagtttcagaggaaacatttgggcatgttttcttcggagagcattttccatctctccctctcctcatctcccacaccccatcgcatcamcccagtgcatttcatctcccccaccccatctcatctcccctacctcatctcccctccccatctcatcctcccctaccccatctcatctcccctactccatctcatctcatctcatctcatctcatctcatctcatcttcttttaccccatctgctctcccctatgccatctactctttcctaccccatctactctcccctaccccatctcatctcctttacctcatttcatctcctctacccgatctgctctcctctaccccatctcaagtcccctactccatctcctctcccctaccccatctcatctcccctgccttatctactctcccctacatgytccaccctctctttggaagagctgctgcttagtgttcatagcttttccctctagccctgcccctttccctcccttcctaggagtgatggccctcctcatgcatgtttttatagcctggctacaaattcacgtataaatgagatctgcttttttttttctttgtgtgtgtgtgtgtatttttaaaaactgtggcagaataatacacagcataaaattgaccatcttcaccgctattaagcatacaggtcagtggcattaagcacattcacagtgttgtgcagtctgcaccccrtctgtctgcagaactctttatcttggaaaactgaaactctgtccccattaaacaactccccattccccctcccccagccctggccaccaccattctactttctatctatctctatgattttgactactctgggtacctcatataagtgcagttatatagtatttgtccttatgtgtctggcttattttacttagcataatatcttcaagtttcatccatgttgtagcaagtgccaagatttctttccattctaaggctgaatactattccactgtatggatagaacacatttttacaattcattcatccatccatagacacttggattactcccctcttttggctattattaataatgctgctatgaacatggatgtacagtatctttttgagaccctggtttcagctttttgggcatttacccagaagtggaatggctggatcatgtcataattctacatttaattttttgaggaaccatcatgctgtttttcacagtggctgcaccatttgacatgcccaccagcagtggacaagggttccagtttttccacatccttgtcaatgcttgttattttctgttttttgatagcagccatcctaatgggtacaaggtggtgtttcatgtaaaaacttaaatggcattgtacttcgtatatgcagcttgacttatgtacttaatattaacttttttaccatttaaccatgtaagccctgtagatctcgtttattttactatttaaataaaattaaactcatattcatacatatttttggaaaacagcagttccctgtgccccatctccctcccgtgaattcttattccactttgaagtcttctggctgtgtcttctggctgtgtcgtgtttctaaatgtaaatactgctgtttcttgattttttcagtttgagaccccagctattgacccttagtgaggaagaaaggaactgagctctcttcacattttttgaaggctactcttgaccttttgttttcttaagtgtagacatttacataatcccaggaaacaaggtttcagagctctgatcctttgcattctgagaacattcaggacttggcaggttgaattttcttgtctttaatgagaaggttatccctgggatcaggttggtagaagtgcatgggtgtactttgtttgggtttttctcttattaaagaaaatgaagcttggttttcctaatggaacaggtctggaatccacatccagttgtgtgccagccattatgccatgtgctgtgcagccattacctcctcagccttcaccactgccctcggggtggcgctcttcttattcccacttcagggaggagaggactgaggcccagagaggcaaagccactcagccaaggcccgaggcctgccagcagccgtaycaggtgggaggcactccgttctgactcccacacgctggctgcaagtgctcctctgcttctcgggttcagcctctgagccacctgggtggtaggtgagagcactgccctcatcctgcagtgacaagaaggtaggggactagcactgctgagtacctctgtgtgtcaggccctgggcctaccctgacatattccaaactctccggcagttcccctgggctgcacggtgtgtttggcggcatttgctgggagagctggtggaaagctaagctcaggggctctcacgtggtgtggccctggctctgggaatgtgcagttttatacttgatatcttagatcatttttcagaagtcattgagtgtaacagggttttctctcatgagcctcataccctcatgaaaggccagcatgggaaggagggaaagcaccttctctcctccaacaraaggacagctgcccctacggcagatatttgtactttgactggttgtaaatacgagtgtagcacattcctttttggatctctgtcttacagcagaacccatgaaaatagcctggacttgggcagtgtccatggcaggacagatgccagggatgcaggygagcctgggataagatgccagggatgcaggcgagcctgggataagatgccagggatgcaggcgagcctgggataagatgccagggacgcaggtgagcctgggatagggttgtgaatgctgagggtgcaggactcccacccggctgcagggatgaarcaggtgtgaagggctgggtaggtgaccggcagacacaggaatgcgttttcttttttcttttattttgagacagtctcgctgtgtcacccaggttggagggcagtggtgcaatcgtgattcactgcaacctctgcctcctgggctcaaacaattctcctgcctcagcctcctgagtagttgggactagaggcatgtgtcactatgcccaactaattttatgtagagaaaaggtttcaccatgttgcctgggctggtcttgaactcctgagctcaaatagtctgcccaccttggcctcccaaagtgctgggactacagawgtgagctgccatacccgtccagratgcagttttcttaaccccagaaaaaatttggggaaatgatcctcccaacttaccaatcccaagcctttacatttctgcaatgaaaagtttaacatctagatatagatttgatggtaaaayaatgagaatctaattccaccgagacctttttctttctacagtggggtcgagctgagccctggagatcaggcccttgttgwgacacctggtgctgtctgtgtttgcctgcaggtatggaacgccgtggactccgggcactgcctgcagacctactccctgcacacagaggcagtgcgggccgcccggtgggctccctgtggccggcgcatcctcagtggtggctttgacttcgcgctgcacctaacagaccttgaaacaggtgcgtttcttgtgtcacctccctgaggtgagctggcagctctctccctggggaaggttctctggtgggcacgcagccacaagctgtatacgcttgygtggcagagggagaggggcctcagggtgggctcgtgctcggtgagagggcttccagactgcttgcccattggaactgcgactccccacagaggatgggcctctgccagccaacacagaggacagagccccaaggttgtctcagcctcaagccatggggctggataaagaggtggctttttaatctacttctgacatgcaatttgtgctgaaatagatttaactttatcattgtgtcctttggttggaatcaggttagaattcctgtcaattcattatcgttgaaagkctgtgagaaatgattccagctcataaggaaagtcttcaaacgagttctgctttaatgcccacactgaaaaggcacttgggtaggatggattcgtgccgggtaaatcctgagagggctcttgacaagcagggcgagaaggagagagaagtcagtggaaggaactttccttactcagcgctcctgtgcaacaggcactgtcaatacccaccgcagccacagcccccaggtgggctctctccagggtttacagtgaggactgccagggagtgacagagctgggattcgcacctctgccatctgcctcccagtccgagctccttcctctctttctcctttcccctcccctccccttttctttcctttcctttccctctatgttctctttcttttctttctttcctttttaaaaatgttttatccccctccatgagcaggatccagcttctttcagcaccacactacctcctccccagagctcctcggtctcatttctgctgggctccactgccaggagcccagggagaggccagacttcacaccagtccctggggctccccttgaaccctcaggccagcatcttgcctgcctagccccgcagtggtggtggctctgggccctgcctctcytagggtctggcaagaaggagatgataacttgctggtccaaccsctgccactcatgcccagcagcccccaggagacgcagagggaaaatggagaaggtggtttgtttccaccttgagtgtgggcggccttgcagctccttgcatgctcagtaggggaggggacagtactaatggtcacagggcccctgccacgtgctataggctttgcacacagcatgtctaatcctcactgcagctgccagcagtgattatttccattttaaaggagaggaaactgaggctcagaggggcaaagcagcttgctcagtgcctcccagtggtgcatagccagcagggatttgaagccatgtctgtacaactacagattctgtgcccttcccaccgtgccgtgtgtggcagtttcttctcacaaagcacttccctggtcttactgattctcttaaccccttgcagagtggccagactcagggagtttgatgccacttgatgatggtgatgactgggctgatgatggcagcacttactactgagmactgtgtgctgggcattcttccacagcctctatacagcatcttatttaggccccactcaccctttgagacaggcgccatcagaatcagctgtacacacactggccaggggcacaaaccagcaagtgacagagycaggatgcacgcaggtctgctaggccccaaagcctgctgcctgactgttacactctgttgtctgcatgtcccataagatatgcttgataggcgagacagagctgaacaagacccagtgcctaccctggagaagctcctgtctgctggagaagacagaagtgcagagtcaatcccaaattgcagtgatggagaaagacacaggaattgcaagaacatctagattggaaaatcaaggaagacttcctggaggaagtgaaacctgagctgagccacagattaggtggacagagaattaggatggaggaggtatggttgatgaggaggaaagtaggttcttgcagatggaacaaggacagagctgacacaggaacagggttccatgtagtatgcatggaaaccaaagcaggatgtaatatggggtgcaggggctggggcagatgagtctgaggagtgcaggaggggaaaccccagcctgtgggtcaggtgagcacatgtgggtagcacaccgctcacagagtgacaagctcactcacacacaccgtcggattactcaaatcaaattcatttgatggcattgatgggttcatagtggcccttaagcattattctctcartcaacagaagttaaacaaatgcatgcaattgtatgtgtgggtgggtgtgagtgggtgtgtcttgacagggggttctgaaatttttagacattcaaagagggtcctcctgtctgatgagtcagggactgccatagcagctggcgggcagaggccattgctgagtttgaagcaggcaagagtcagggcttggtctgtgctttgagtagtcctccttggtagctcccactggtcctgtgtgacctgcagcccctggtggagagttggaggagtgggaggtagaatgccttgcctggttggtgataggactgcgtttggagaacagcttgtctggccccaggcccaatgtgcccctctagctgtggtgtgttgggtgtgtaaagaaaagcatggccctgcccccagggcattaccatccagtgggggaggtgattgaggacttcttcactccatccctctgctaggaatggcgctcaccactgggttcattcaactgttgaatgaactgttgaattcaactcttgaaggccccgtttcgttcactccgcagttgcttattgtgcacccactgcgtgtaggacttggtgctgaggccacagtggagagtgtggtgggcccctgggagagaatggttgagggatttggacctcacccttggggaagcgctgcacacacagacagggtctctgctgctgagggtggttggtttccatgtccctctccctggctggcttgggagctccatgaggatgggagcctgtcctggtggtctttgtgtctctatcctctggccagggctggcttggagcagctgctcagtacctgtgtgggtaagatgtgctgagtttgtccttgccaggtcctcctatctgggcagtgaagcccatcagggactgccagggctggtcggggggcctccacctatgtctccccctatgtctcctaccttatctctgcacatcccacctccagcttttggtaagtgctctctttagccattggggtgggctctgcaggccctgtggctttcgtcccgctttgacttgtcttgtcctttctcttcgctgagtctgatctccctttctactggatctgcctttttcygcccttggtgatttggctttttcatttcaatctaattagggctccctgccaggagaaggcagtgcagggcgttctcaccgcagcgctttgggaattagtcacttggtgcccattgtcattaatttggcgccaaggccatttatcctggtgtcctcaatcaatacagttaaaaatctgtggattctgtaatgtcaatacctggcctgaaatacggagggccagcaccattttatctcattaatttatagttctgacaggttgttggcttatagaacaaccatgaatcaacacttaaataaaacttgctcacarttatttttggtgctcttgtttcagtctgtaatcttcctaacaaaacgtctgtggcacgttaggctgaggtggcctcagggaacgctggccgactccaccagggccctgagtgtcacctgtcttatgagtcagctgtgccacacgccagctcagccagtctcctcagaatcccccggagagctcsctcagttctaagcggtcctgtcatgtttcttgcagactccaggccctgaggcaggtgtcccagcctgaccctcgaggctgcagctgtagaggcatgcagggcctctgtcctttacctttgatggctgcaaaggagattcctcttcctggagccctggagccccggctgggcagggaaccctgtcctccttcctgtgcatgggccggctctcctgatgtgcgctggctcctctgagccatctgtgcagtgccacctgggtctacctcccagatcctggaggcagcacgcrtgagagggcacatagacagggtacaggtgttggctcttctgcctccccgaaccaggcctcttcacctgtttctaccacaccacctggtgctggggctgttgaagggagcagctgtgataacacatatagggtgctttgcagaatgcctggcgtgtggtaggtcctcagcaaggaactcctctcctcctccgtcatggcccatgaggcccttgttcctgctaagytgtccagatggcccttgttggcaggccatttccccacatggggccacttttcgatcatcatccagaggcccctgctggtcccctcagtgagcttacagatgtgctgttggtcccctgcgtgggtcttgggggcagactgggaggaggccttgggccatcatgggttctcccagcatctcctccacattccccttcctcctggtaatgggacaacacgcactctttattagggctctcgagtgggtatacagacccccagcctgcccggcctgaccctctccagagccccaggcactcatggctgcaggaggcctatggccctcttccttcagatgcccacagcctgcagctctgctgtccccagcttttggctggctcctcctgccctgggtgtcccagtgtcttttggtgggagtcatgktgtgtggaagtgagcagccaactgggactgggctcataaatgaccatttctccttgctttccaagaggtgtcttcttgtctctcccttgttttcaatctatgactggggcttccattcacagaaatgctacaaggaaaaagagaatgacaggttatcgagcccttgctgtgggctgggccctgggctatgtgccctgggttccagcacgctgcctggcctgtgtggaggtgaaatgagtgagtggatggtagactctttgcttatgtgactcctcctgtgagaggagtgtttttaatcccatttcatggacccagaaactgaggcttagcatggtcagtgactttcttgaggtgacagaggtgggatccagtgctggcatgtgactagtagagctcctgctgttgaggtatggtgtggcatgccctccccacgtctgtttccctgctgtgaacaaacagggaaacaatggggaacccaacttaacctgactcctggggagcctgctgggcagcagctggccacctgcagaggataacatggggcctctgggaagaaggagtgctccagactcatggggactgatccctctgattaagtgggccactgagggaaagatgcctcttcagtgatggatggccacgctccaatgacgactttagaccacttggcatgggaagggtgagaagtgtccaaatgaaaaccatggcaaagagccccaagagctcctgggctttggagaaggggccacagaaggaggctccttgttgtgctaagcctttgaggtggtgctggctcctgccggtccttggaagaagtgccgtggaggggcctgggcttctccgttctttggctttctggcactgtggctggagtttcgctagcgtagcttaggaggacttgattaggtatccctcaggtgcccacagacccaaaggaagtagaagaaagcttgtgggcacatttacaaagcatctgatacttacatgtacatgctccttgagtcctagggactgttgccactgatccagaagtgaaggctcagaggggctccacagcctagcgaggtctgagctgatgagggttccctggctgccgccctttatgtgcctccttgtccagttagcagccgcctactttcttgcccacttgtgagtgggtctattttccaaggccagtctctgttgccacgaatatccttcgtttctcactctgaaagtgcttctcctctggctcaatcttgttttctctttccttacttctttggagtgagaagctgaccctagttacggatattaaatcaaatgttattaaacttcattacaacaccatgccagcccttaactgccacttggaaaagtgcctagagatccttcacatctccacaaacacagctcacgccagccctctaggcaaagaaaagatggtttctaattcaaattcttgttttgttcatgaccgtgactgcacagtagtgatgtctggcgtgtgtgtgtttggttgcagctgcatcacagtttggtgcccttgttaggtaaggctgccattattgactgactctggagcccaaacgtgtttacggcatgtctgctattggaatggcgagttccgagtttcagaaaaccaacttactagtaaagcactgggatacaccttgtttgaaagttgagaactcttattattattttttaaattttggaacattcggtcttgtccagagaattaaaagcagtggctgacaatggtctgggcaatgattttttggataggacttaaagcactggcagcaaaagcaaatataggcaaaagaattgcatcaaactaaaaagcttctgcacagcaaaggaaacagttaacagagtgaagagacagcccgtggattggaagagaaagtttgcaaatcatacatcttgtgaggggctaatatggaaaatgcatgaggaacttaactcaacagcaagaagccaaataacctgatttttaaaatgagcaaaggatctgaacagacttttctcaaaagaagagatatgaatggccaacagatattagaaaaaatgctcaacatctgtaatcatggggaaatgcaaattaaaaccacaatgagatatcacctcaaacctgttggaatgcctattttcaaaaagacaaatgatagcaagtattggtgaggatgtggagaaaagggaatccttgtacaatgtaaatgagtacagctattttggaaaatagtgtggaggttcttcaaaagactaaaaatagaattaccgtatgatcctgcaatcccacttctgggtgtatctccaaaggaattgaaatcggtgtgtggaagggatctctgcacccccgtattcattgcagcactgttcacagtagccaagatatggaagccacctcggtgtccatcagcagatgagtggataaagaaaatgcggtgaatattcacaatggaatactctacagccttaaaaaagaagaatattctgtcatttttgacaacatgggtgaacctggaggacattacaataagtgggataagcgaaggcacagaaagacaaatactgcatgatctcacttatatgtggaagctaaaaaagttgatctcgtagaagcgttgagtagaaaggtgttaccaggggtttgggggtaggggtggatatggaaagtggagatgttgatgaaagggtataaagtttcagttagaatgaaggaataagttttggtgatctattgcactgcatgatgaccacagttaataatgtgtatttcataactgctaaaagaatgcacttttaacattctgtccacaaaaaataaattagtgaggtgatagatatgttaattatcttgattaaatctttctacaatgtatatacagatcaaaacatcacattgtacccccaaatatatatatatataaaattatttatcaattaaaattaatttaaaatgaaacaaaaaagaatgggaaggaaagagctggtgtaagtatgttattagaagacaaattttaaaaaatgactgcaactactactatttcttctgttactactattattacaatgctacagctactgtttattgggccctatcagttgtctggggcttagctctcctacatacattattgctaattctcacaaccaccttttgtggtcctgagtctacagatgaggataccagggctggagaggattgctggccgatgcagggccacagctgatggggaatgttcagatgcaggcccagctggctctcaggccagacccttcccaggcctttgcccggattgctaagatggcccctgtttctgatgcataaagtttgatttgaaagttagtaagtttcttttctcgttaactttgagtcaggatggctaaatttatagctggctgaatacttcccagaggatgagtgtaacgatattgattttagcgaagtgagtcatatgcctactgcctggaaacacaagctcaattaccacaagccaacagcataagctttcccttgtcaacatttttcctacatgttcatgagtctgtggatgtgaacaaagcactaggagaagcaaaggtcacgaataactggcggcgatgcaaggtagggtgccgagagctggccttgagattagacagggccagtctccgtctcagtgtggctgactcatgtggctctgagcgagtctctcacctcgctgagcttccatttccctggctgtgagagatgggttaattacacctaccacccagggtgccgtgtgatgcgtgcaagctccagacaggcctggaggtaacaggctcctgataaatgttgttccccttccttgactgtgaactgctttgccagggctgcctctgagctccctggagaggggggcatgagcttctcttttctctcctggagacccatacttgggtttcatgtggcctggacgaaatacctattatgtgccaggaactaggctgggagtcagtcatgctgaatggaagaggaaggccctcacaggcctggagccctgcatgatgataggattcctagtatagacgtttgcaacttctatgttaactaagaacttcttagttagcaagatggacaggtggtgctgccccggccacatggttggtcactttgggaagctggatatctccacctgagaaaggaagaggggcagcttggaggagccactattccagagttcccagatgccttatcacagtcatacgggggtggaagcactggtcatagagtcagtagaacaaatggaatttctgcattgtgttttaaacttgtttttgctttaacaatttttttatttgtatcattattgattcaaggagaaaataagtgatttttcctagctccaagaagatccaaacagtttttacactggtttagctcattataatgagatcaataaagtcagtgctagtggattaaatattttaaaactcagtttcctataataagcatacagtgaataaacagaattttctataacaaacaggtaaacaarcaagatggtcttaaggttaaaggttatataacagctaaccattgcgctgaaagtaacattgcccaggagaggatatgataaacaagctccttgatttatgaaaaggtagagaggaagagcccgtctgacaagttaagaccttctcctctggcacagctagtgttcatgttcaagatatttcactgatgaatattttccagactttacccatatctctttaacaaatgtaaagggcagcccagggcrttgtattttcaaagcctcatgagaaaagctgaaaaagcattaatctgtggaggttattgctatttaaaaacctgtatcccagccgggcgccgtggctcacgcctgaaatcccagcaatttgggaggccgaggtgggtggatcacaaggtcaggagattgagaccatcctggctaacacggtgaaaccccatctctactaaaaatacaaaaaaattagctgggtgtkgtagcaggcacctgtagtcccagctactagggaggctgaggcaggagaatggcgtgaatctgggagacagagcttgcagtgagccggatagcaccactgcactccagcctgggcgacagagcgagactctgtctcaaaaaaacaaaacaaaacaaaacaaaaacaaacaaacaaaaaaacctgtatcccttggttttagtttgtaaatgaaccaattgtgaattcaataatttggggtttaattttgtaaactataatagctcccttttgttgattgctgtttgccatgctctttggaaggcttcatgcaccgcgttacatttagctctcatgacgaccttacatttgtaagagtgtgagacagagcagtgcaaggtcctgcccaaggcccctccactggaagtgacagagctgggatgggatctgggtctgygtggctctgaactcctcagctataccatctcctgcttccaacattgtgccagataatgatggctatggccctaatttctgaaacaaagtcttatttgagaacttcttagttagcgagatttctaccttagtcttttcactaggtatccagaaacttactaaaaaatttaaaaatcttgtagttttgaacccttttaacaaagaaaagcagtaagggcctagttattataagtacaaataggaaaaatgtataaactacagcttatcttctaaatggaaatacttaaaagacagattttcaatctctttagggggttgaggaaaaaataacattcagattttttgtttgtttgttttagcagaaaaagttygatcatcgtcttttagcaattcagctttcacattttctctcatctttcttccccattgttggcaagactgtatcactgcacttttgaaaaaaacatatggataattcactgccatttctgaaattaagcatatggttatatgctatggtctaaaaaataaggaacattttttctccaggcagagagagtttgtgtttccttttggatttaaggattggcaatgaattccaagtgagcaagaagccggccactgaatgttctcagcaataagcgcagttgtccttgtggggagaaagagtttggcagtcctgggccttctcggtggtgtggggactgcagtggtatccgtgtcctccttttctgtctaggggttgtgatgktggtccctgcctgcagtctccagatgacccccagccgcttggctgaagcgagtgtcctggggcctctgtgctgccacattgctgctctgagtccctggcataggcacatggagaccaaggggacagccctctgcctgtgctccctgagcagggggacttgctagttggtcatatcacggttggtttctgatcaccaattgtagcttaaaaggtggggtttgtcatgctctgtagaaggctttatgtaccaccttgagttccaggaaaggaaaagaagagtacatttttttttttaggaataccagatttccaattagatcaattcaccaagaagcagttttttggtttacttgagagagtcgtttgtctgctgatctaatgagagggacatagcacaaagaccatcatcttacaagtctgctcatctccttgatgacttaaaaaatctttatttattagaaaaacagtattacaacaaatctgttagtataatttaaaaagttatcttactacccctagaacaattcatttcatttcagtgaatctcttcccagtctttgtccatatcagcagggatccccaacccctgggccacggactggtacctgtccatagcctgttaggaaccagaccacacagcaggaggtgagcagtgggtgagtgaacattcccgcctgagctccttctcctgtcagatcagcagcagcatcagattctcatacgaacggagccctattgtgaactgcgcatacgagggatctaggttgtgctcttcttatgagaatctaactaatgcctggtgatctgaggtgggacagtttcatcccgaaagcacccccatcgcaacccctggttcatggaagaattgtcttccacaaaacctgtccctggtgccaaaaaggtcggggactgcttcgtatcaattcccattttatactcttgtagttgaagaataggaatcaagcattgtccatcttgccaaagactgctgtttgtgattccagttttcagtggcttttcagcatcccatcaggcagaaaaccacatttgtcttcactactcccctcaggctggaccgttagggtgttgtttacagtcccttctccatacgggttggatggcctaaagcagccagttcttgacaacattgtgctgacacaagagtgaccatgaaaatctcttgtgctatctgcactgcatcttgtagcaaaatagtcaaggggcttgtggagctcaaagaggtatagattcttcatttacagaaaagcaagtatttctaaaattttctctgttgataagtgactaccagttttaggcccctagaagatactagaaaaaaaagatcaacacactttattatccatcatggcaaatgtgatgcttgaacaaagggtgaaagagtaactactttctaaaaaatttctactatggagagaacattttgaaaacagatgtttttgtttccattgttatgtgatttttgttgccaaaaatgatctgtcacctattaaaatcttgaatatcttcacccttaacctgggaacagtgtttttctaatctgttttaaaatcctttaagtgaaaatttcagtggattttgagctgggtggttacaaatatgataatgcaattattaacctgattagttgcaggagccattayttgacattagggaaatggggctttactagcaaaatgttcacaaaatcctttgcttcsatggtggataaaagtggaaaatgtccgggcagcccagctttgcaaaggctctcgtggctctgcaggcacctggcatgcaccctccccattgccaggatacccaagaggaaggtcagctctgctgaaggggccaccaaggaagagcccaagaggagactggtgcagttgtcagctaaacctgctcctgcaaaagtggaattgaagctgaaaaaggcagcagcgaaggataaatcttcagacaaaaaagtgcaaaaaaaaaaaaaaaaaaaaaaagggaaaaggggagcaaagggaaaacaggccaaagtggttaaccaagaaactaaagtagagttacctgcagaaaatggggaaatgaaaactgaggagagtccagcctctgatgaagcaggagagaaagaaaccaagtctgatagaataccatataccatgtcttatcagtggcccctgtctcccttcttgtacaatccagaggaatatttttatcaactattttgtaaatgcaagttttttagtagctctagaaacatttttaagaaggagggaatcccacctcatcccattttttaagtgtaaatgcttttttttttttttttaagaggtgaaatcatttgctggttgtttattttttggtacaaccagaaaatagtgtgggatattgaattatgggaggctttgactgtctcgggtgtcagcttaacattccatacatggggggttagtttttatatcctataatacaaagcatgttaaatggccatatggagtcagtcctgcatttaacgtcttgaatgttttaaattacttctattcccttgttttttagtagaattgtttcctaaagaaaaccactccttggtcattgctctccctgtcagaattgtgtggactctgtaaatctttggttgtggtagtcctgttttcctaataactttgttactgtgctgtgaaagattacagattggaatatgtagtgtargtgctcttcagttgtgagctggtgggacgtctgtaacagctgatcagcatgtgaagatactggtacttgatagcctcttaargacaatttgcttccaaattttgacctggaaagtcactggaataactttcaaaaataattacaatacatggctttttagatttttgttacatgtgttaagaattgtgtacaaattgaaatgtctgcacgatcctcaaccaataaaatctcaattatgaaagagaaaaaaaaaaaaagaagtggaaaatgtctcccatgtggccagtggtgaatatcttccatctaggtccgggcatctctgcgtgcaagaaactttgtcggctttgatagagttcagtggataaactgaacctacttgcaaccagactacattcaaataactgaatcacaaaaagttccctacattaagaaaaatggaagcatattcaattctgttgctctcactaaaaatagtattacataactcagatgatttcagagaggttcattgattctcttaataagggtatattaaaatatattttaaaatattgacttttatccttgcatcatcctttaaagagttctatttttggtttttaaaaaatgtttataatatgttggtacagaggcacattattcaacttaacacaratatctatatattggtggtatgtgccttaggtttttcatggatggggcgtactgtcaaactataatagcttggagaccatggatctaggcagattgggtctgtgaaagccttctgctgggactgtcatgagtactcatgtgactgtcatgagtactttcatttccacacctggtgagctggtagagcccttcactaatgtgtgggggtcacagaacacaaagcagggcaaccttttgtgctttctgaattgaatgagcaagtgctgcttcctgggttcccgtgagtggaaatgatgcttgagacctcggtgtcttcatggtcttcttcgccaccagcttcccgtgtccctaagtagcccactgctcagtcccatgggggagtttctacgggtacaaggcagtcaaggttcttcctcctgcgctgtgggagcccttgtggcacctctgagcgaagcctcctccatgtttctggctgggtggcgtggggcagctgctgtgcctggtgtgtgagccctgcctgtgggggacatatacgggggtggcactcagagactcccacagtgagaacacctccccaaggccagtctgccttcttgatgcagtttcagatggatgaggtgtggacagacaagaatgacagccagtgctctgggacatgggggctgcactgggcagtggaaggaggaccagctttgacctgctccaaatgattgatgtttttgaagtttatatagcttacctctaaaagatcatagtgataaaaaagacgttttccacaccatacgtatatatatgtacatacacagacacttacctaatgcacataaatgcttgacaacagtttatgatgtatttataaaggacaaggactgcgttgtgtcctgtagagccagtgagacccccaatggcccacaccaccctgtccaatctgtgcttgggccaccatgatggccactctcatttatcgcccagcrtctcaggccaccccacctgccatgctccatagcaaaccattcatccattattataaagtggctgattctgaaaagtatcaccttagaacaatcctgtttttggtttttagactcccagataaataatctactgtattaactgtagagccttggaaatgttccatgacctccctgggcttggtttttggctgttaggtgggcatagggtcgttgcatggtttatatgagctaatgcatgtcatgcttacagcaaatgtgaaaggtgcactcatcaatccacccatctaagctcagcccagggggaggggatgttcagctagtcaagggtgggctggccagagaaacagagaataagggcaaatcttgctgccaccgctgtcatatttccaaaaagtgtccattgggctacatcgggcccaggggagctgtgtttgctatgagccccataccagatggcatcttagttttaagatatttgttttgtgacctaagtactttctaaccctctcttctctttttgtgttgtaggaacccagctatttagtggtcgaagtgactttagaatcactaccttgaaattccatccaaaagaccacaacatctttttatgtggaggcttcagctctgaaatgaaagcttgggatataaggactggcaaggtaatagccatattcctaacttggcctttccacaggagagcttgtttcgacaatttgaataattgggggcaggtcagcatctatatataggacccttgaggtggaataattaccacttaatatttaatcagtgctaagcataatttttagatgttttgaaagaacattcttgagttgtcagacttaaaatatcaaaggtgcaattttatgcagcatattactaaaaatatttgttgaacacctactgtgcacaaatgcttccagatgatataaaatgaatctgctgggttactcaagggaataatgtgcgggtacagatgactttggtacagagaattggtgtgtgtgtgtgtgtgtkcgtgtgtgtgtgtgcgcacttgtttgcatgcttgcgagaggaagggagggggtaagtgcttttagcttgctgtgggaagacttcttagaggaatcacttttcctcagtcttaaaggctggttgtgatttccatccccatcctttattacaacctgctgtgccttttaccatcaccacttactagatggcagctccaccctagttgttcaggccaaaaacatcagaattagccctgtctctgctctttgcatcacattcccatacccaaaccattagcaaattctccaaaacttggacattttyccccacatcagctgttgtagctctgctattgtctctcgctgggatggttgcaggagtttcccatctgatctctcactttcccccttgccccttgsaggctgttctcaacacagccgctagactggtctgttacagtgtgactcagacatgtcactcctctcatcagaatcctccaggctctgatcttacagtaaaagccaatgtctctgatgatccacaaggcctaaatgatcctccttggcctgggggtaggtcagcatttctcatcagtgccagccccactaggctccttgccttccctgaacataccagcacattcctgtctcagggcctttgcacctgctgctccctctgcctggaaggctcttctgcctgtttcctaagtagaggcttgctgccccctgtcatggggctctgctcacatattacctctcggtgaggtgccccctgcccaaaacccactagcatccgctagtcccctctgctatctcatttctctccatagcatttaccatcacctgacatattatggattttatgtgttcattcatctgcctgtttccctcctctagaatgtaagctctttgaaggcagagagttttgtttgctgctgacatctagcttctaaaacagtgcctggcacatagttggcactgtgtgaatcatgattgactgagtaaatgccagaggaaggcagtcatgcagacagggcagatacaggaggtgggaacacaggatgtctatggggacttggctaggcgtgggcttcacacagcgaggtggcctgggcagagagtctttcaacgctgtgtgtcttggtctcaacagtggggagccacgggaggtttgtgaacatctgccttggtcctagacaggtgcagcgtccaagcagatatgtcctgagtagaggctgtccatgtgttccagagggaggagggtgagacagagcccccaaggcctagattccaaatttgccttcttgcttcagactggctggcaccggaagaccctttcctgacaggcagttggaaggggctgctggtttgttgaggagagcctaaatgcagagacttttcttgacagagaatgggaagttttgtctgtacatgagatcttgcttaaagtactcacaagtgggagcatagatagatgtagtctttaaaaaaaaatcacacatttttcttttacaaaggaactttcttataaaaatatttggaaaagggaggaaattacccataaagaagtggacacagtggcattaaaaaaaaaaaaccgccaaaacacgttatatttaggatctaaatacatgacaagtgaaagaaaacatttgaacgtgccttgtgaactggaaactcttagtcataccgtttgaagtgggacctcctgagcacccagccactcctgacaaccacgtcccttatgggtgcgcttactgtttttagcctcaaagaccaaacacgtaagaaattactcaccaaggacgccatctgatttaagcatttgttaaaaataccggattttttcccagggcagatgccagctgacgagctctgaaaatgctgggggagaagcaattagaagcagatgttgctgtgactggtgttggcatgtttgcgagtctctcccaagatagtaatgtggctaagggatctgtgcagtatttgtttttacttcctttctaccaacaatcctcccccactgggtcacggggctcgttccgtttgcatcagttgggctcaggggacaacactctttcctgcttagacaggtgttgcccatgtgtctcaaatggactcggcaggaggaccagggaggaggcacagccccctgccctccagggactcccgcctggggctgctcacttcttatccctgtgggctcctgtggcgctgtcccaggtgctgaaccttctggctcagcctgggcgtgtatgtgaacatccagaagtgagcagcttggctttttccagctgctttcagggaccgcggtgggaatcgcaggtgtaagtaggagggacacagaccttagcttaaaccaagacaggccttcccttttaaatacagtagggaaggaatgttttgttgtaaaagtaatacagaatcatatgataacattgggaaattcaggtaaagagaggagggggagtccaagcagccaaaggtaaacattagcaacattttgatattcttctttctgtttttttttcctcttgtggtttttaaaaaaattataaaagcactatttggttttatttgtatacgcaattttgtgttttgcttttcatgtagcattagaaggatattctttgttagtgcagaccctcgtaaggtcgtcagtcatattcctttgactcagggtgttcctgactcactgccttgcttctccccaggactcagaacaatgtctggcataggcaggaactcagtaagtatctatggatcaaatgaatcagatgaatgctttaacatattaaaccatttccctgcattagacatgtaggagatttaaaaaacttttgccatttaaaattaatagatgtgaggacagagaccagcagtcagcaaactatagcctaaggctagtccagcttgctgccagtttttgtaaataaaggtttattggaacacagctatactcatttatgtatcatctgtggctgcttttatactacagtagcagagtggactcattgcaacagagaccacatagcccacaaaaccaaagatatttaagatctggctgaccttggtaaagagagatgtgattctgacatctgtcaccctattgattgtcaggactaatcctcctgagctggctgacaagttgggtgtcttaccccattctgtgttccttgcagaaaccaggtgctcagagaatgtgttttccaagtgggaactgttccttcagtcaggggtgtataagttgtttctctctcttgttacaatctccaaacaaactatcaaggttgactttattacacattccactgtaagaaacatctttttgcatatagctttttccacatttgggatttatttccttaagcttgaatctcagaatgaaaatttctgggtcaaagcaagcctacattgtgaaggtaaggagtaggtttctgccaacagaactgaggggagtgaggccagacaacctctccctgggatcttagggcacagtgagtagttggaacatacaactttttagttactttccagtcatgagattttatgattccttaaacgtagccaagtgctaagtgtcaagattctggacttctctagtctagcccaattcattacagcaaatgggctgtttggctccctgtctcctcttcttggtgatcttgggtgatctctccgcctcgggtttgatgtttgtagcacatctcattagtgcaaagtgcctgacttcatctccagaggtcggcaggatgtgttctgcacaagccagctgtgcgtacttacttgaaactggcttcctgccgctgctgcagcatcctctgacccctcttcctcccagcagtctgcttgaacatgggtgtggtctggaacccaggatgcctgtggtctgacctttatagtattgtgagggtcaatttctgcagaagcccctgagcctctagtgccgttggcctgagctgcaggagacctgggctcacgtcctccctctgctacttgcttggctgggtgatttcggccacattccttragcaaaagcctctctgattcacaatttttaaattggtatcgtaaagtggcaggccaagccacacctccaaagtagcgtttctcaaactcacctgtgtaggagagcacctgggctcttgttaggatgcagattctgtttcagcaggtccaggttgggataagatcctgcatttctaacaagctcccaggaaatgaaggggaggatagtatatggaccacattttgagaagctagggaccaaagggcctctgaagttaaaagtcccttgcttctctcatttgaaccttatcctcaattagcctgcaccatctgtgacctatctcagggacaacgatcactcttgatctgtgggcacttttatccacaggtgtttatttacagccgcttggtgtgggagcctgagtcacctctgtgcctggcatccccgacagggcctggaccagagcaggtgttcaggataacctggagtgagctgatggggtcagccgccactgtcattgtgatagaggcctgcaggagcacccacctgcccacaacctcaggggcagtggccaccctgggatcgacatagagggcatggcccctmtgacaaatgggatatgaaggctagctggaattcagctgtagtgagtcattccagaagtgtggacagaggcaggaggacttgggagaccctgtgtcagatgagatatggtgtggccatcaaagcactgtagttctccactgaggctgagctcctctgctccccggtgtttggtggataacagagttatgagtctcttgcatttccagctttgcggtgctgtggctctgtgcccagcacagaatggaagctgtagaattgcaggagaagcctgtgacacggactcagctgtactgggccctctagcagtgtggggaatgttccaaggtagagccactttcaagttcactttaagatgactatgtattttgaaccaaaagttaggataagtaataaaaataaattctccttttgtaatatgaatcagatttgttaagaaagcttatatagcaaatttggtgaatcaccttttttgcaggactacattatggaaccccaacctcagcaaattacctctcagttaaggcaagattgaacactggaaattggagcagccctggaaaatctaggacatgtggctcctgcagctggcagcctggactctgccccagttcctcctctctttctatgtgcagggtgacattgggcaggctaggggtcgagtggttcttttgttgtctagctcctactctgcgcctgagaaaaagagttgcagatgcattcagatctgccaactttactcctccagagaaggctgcacctctaaaaccccgattctctgctcgctctgggactctcatgataaaaccagctctgacaggccagctcactttctccagcataccctggtgtcacattgacactaatcgtcaatatttcatgcttgttctacatcttttcttcctacttttattattatttttaaatttgtaaagggacattttgacttccagatcttgacttggtttcttgacctccttctctagctttgtcccacaccctctgcaggcacgtgtcctaacatgcaggtgacaggggagtgggtggctcacccttgggcctgtgtgggccctcagctcagcttcctatgatcctagcccatcactagtatgctgtagcattctggtagcatgtggactccctgagggaaagagttgtgcctcatttaccatggtattcccagcatccagcatagtgctaagcacatagtagggagggaggggaggcaggaagggcgcaaactgtcgcatgaatgactgatagctctaatcaagaccagttcttaaaatcacaagcaattatcctggccagttgaacggaggctgagccactgtcattaatttgcttatctccttcccctcctgtgggcatccttccttggatgggagtgatctcaggatgatagtaataggaactggtaaagcagcaggtggtggctgggctggcctgacctgactgatctagggcacgggccagagctacccagggagcattagaaactattgctgcccagggtggcctaggcctccaggtttttgaaaactctgcaggtgattctaatgtatagccagatttgggggccatggtatgggtgcctagtgaaaattcagagtggtttctgtggggcttctgccccagtgggtgagactgtctttgagatttgcactcctgtgatggtggccatctgagagatggcttcgtctacttggctcaaagtgccatcagttttgtggcattgtaggcaagttgcttatttgccttaatgagattttgattactctccatttgtctctttcatctgttttatattaaaaaggctttttatttggactttttgtgctttccacagtcctgactaagctttgctgcaagctaaactttgaatgcagatgagagtaggagcctaatggaggcaaagatgtaggacccgaggctgttccttgtctttcttggctcccatttcctcatctgtcaactggggacgtggtggagcccctgatgatctcgagagcccctttcagcagccagtgctgaccacagtgtgcctcctgcaggcatcacgctgtgcacgctgtgtgcgccatggctcatttcctcgtggcctcttgggaggtggactgggtgctgccaccatccccttcctctgtcagggccctgaggctcggaagggctcagttacacaccacaagcacacggccagttggtagtggggcaagactgtgaactgggggtggtttgatgcccaaaccctcacagatcctcttgttcacagtgtgaattcagctttagtcttgaatgaacatacagtcatgcaccacataatgacgtttcggtcaatgtcagaccatatataggacaatggtcctgtaagattatagtgaagctgaaaaattcctgtcacctagtgatcacctgcagtgttcagtacaatcacatgctgtccaaatgtatagcctaggagccataggctagacctctagcttagatgtgtcgcaggctataccgtcgaggttcgtgtaagcgcatgatgttcacgcaatgacaaaatcgcctgatgacgcatttcccagactgtatccctgtcgttaagcaacacatgactaaatatttatcagtgagggctgtgcgttttgttcttggagaagcctgcatggacagccctggcattcacatgctcactgagcactgccatgtgcagctccgtgcctggtgtcaggacctggccatggatgggacagtggtgggttttgttctgagggaccacagccctgtaacctcaggcctgaaaacagaacccaacgtatctgtgagagcagccttcctgcccccaaaatattggcaaggaaactggttctgaaaggttcagctgtctgtgcagggtaggcagccattgacgggattggatctgaacccaggtcttcctctaatttctgcttctccctattgcaggaagaggacgcatttcatttatccatgtcacaaacattttctgagcccccaccagaaaccaggcattgtcccagggcatggggcaacaaaatccagttagatggcgcatgccctaaagctgtagaagggactgctgaaaacatctgtttctctcaatattcagtggatccatcagcttcactggctgccttcacaattggctggggagtccctgtgtgtyccctgggttgtctaaagtcttaggcagaagtgggcaattggttcccagaatctggaacctcagagacctgccctgcaacccagtcctcctcttcagcctccctctgcaccactttcactgggactgtgtaagaagacccctgtttaaaacccatgagctgccaacaagctcagtggatgacagtgggaggcccatggcactcaagagggcgatgttccaagactttcattaacacccaccccacttgataatttttgcccttaaaaatgcagcaggcagtttcagaaaatataaagcaggttctttggacctgtgctgattctataaatatgatgtttctgtaattctaatttataaatcttctataatacatattgccactaaaataagctctgtgctgcactgaacatgcttcttcttaaggtttttaaaaatttatttatttttttttactattgatttacaattcttgtacttgaaaacttattttagccttgccataactaatagtgtccaaaaaagtcatgggcttgatgccttagttatttttttgtcttaatatactttaactaaaaaaatttctttagagacatggtctcattctgtcacccaggctggagtgcagtggcattatcatatctcactgcatcctcgaactcctgggctcaaggtatcctccagcctcagcttctctagtagctgggactacaggcgcctgccaccatgcctggctaatttttaaattttctgtagagaagggtctcactatgttgcgcaggctggtcttgaactcctggcctcaagcgattctcctgcgtcagcccaaagtgctgggattacaagtgtgagccaccacattgggcctaaagtaaatactcattaaatgttttttggtaacagatttattctgtattgtacaactcactcattcactcattcactcagttcttagtgtgtttgcagggttatgcagccacagcagtcggttgagaacattttcctcaccccaaaaagaaaccacrttttttagcagccatgcctatccccccagtgccccagcccctggcaaccataaatctactctgtctgtatagatttgtctgttatgaacattttatataaatggtcttttgtaactggcttctttcgcttaacataatgttttcaagattcattcacattgtagcctatatcaggacttcactcctttatgtttttttaaaattagactttattttttagaggagttttatgttcacagaaaaaatttagcagaagggctagagatttcccacttgccctctgcccattcttatgcacaacctccccataatcattctgcatcagagtggcccatctgttacagatggtgaacccacagtgacacatcgttgtcactcagagtttatagtttacgttagggttcacttttgatgttgtacattctatgggtttggacaaatgtttaatgacatgtacaatagactgactgtttgtgtcctccccaaaattcatatgttgaggccctaatccctaatgtgatgatattaggaggcggagtcattgggtggtaattaggacatgagggtggagcccatagaactggggatagtgcccctgtaagaagagacacgagagagatgaatctctctccaccacgtgaggatatggtgagaagacagatgactgtttgcaaacctgcaagagtgccttcaccagacaccagatctgtctctgttgagatatcctcaagctcaaagattctttcctcagctgtatccatgctactaaactcataaaaagcattcttcaatttttatttcttgtttttggagacagggtctcacactctctcccaggctggaatgcaatgctgtgatcacagcttactgcagcctcaatgtcctgggctcaagggatcctcccaccttggcctcctaaaagtgttaggattataggcgtgagccactacacctagcagtgcagtgttctttatttttgttacagtgcttttgatctcaagcagttatttttggtcttttcttagaatttctatctgtttgcttacagtgcccttctgtttttgcgtattgtctactttttccattagagcccttagcatgttgattatagttgttttaaatttgcagcctgataattccgtcatcactgccatatttgagtctagttctgatacttgctcttcaagctatgttttttgccttttattatgccttacaattctttcttgctagccagacaagatgagctaggtaaaaggaactgctataaaaaggactttagtaatgtggtgtagtgtcagggtggtggggaagtgtcttgtggctaggttagtcttttagagagtctgcttctggactgtgagctcacatgtacttcttagtcccctctcccctttaaataggacaggacagctagaatgggctggacctgggtgttttcttcctccacatagaaggctagaggggaaggaattgggcgtttnnnnnnnnnnnnnnnnnnnnnnnnnnnnnnnnnnnnnnnnnnnnnnnnnnnnnnnnnnnnnnnnnnnnnnnnnnnnnnnnnnnnnnnnnnnnnnnnnnnnnnnnnnngaattgggcgtttcccttctcccatgtggaaaggcgggaagccagtggcggttgggtattccccttccccaggtcagctaggctgtgataaacccagcaggttagactctggctaactagtttctctgcagtacagacctcattaagagcagaatgcactttaggaggctgaggcaggaggattgcttgaggccaggagttagagagcagcctgggcaacatagcgagatcatgactctacaaaaacaaacaaacaaacaacatagcaagatcctgactctacaaagataaatacataaaagaagaacagaatgctctgttatattttaaagtagttctggctgggcgtggtggctcacgcctgtaatcccagcactttgggaggccgaggagggcggatcacaaggtcaggagtttgagaccagcctggtcaacatggtgaaactctgtctctctactaaaaatatgaaaattagctgggagtggtggcaggcacctataatcccagctacttgggaggctgaggcaggataatggtttgaaccctggaagcggaggttgcagtgagctgagaccgtgtcattgtatccagtctgggtgacagggtgagactccgtctcaaaaacaaacaaacaaacaaaaaaaccaaaaaacccaaagtagttctttttctccttctgctggaaacataaggggattttctccagtcttcactgtgagaacctggtagctcctggaggtaaaatgcacaaaattttgggggccactgatgatcaggtcttccagagtttttaatctctctgacttgtccacaatgagcctctagcaatttgtcaattataattcagttttctggccctggttcctgtggaaatttctgctccaatgcattgtgattgtttattcacctatctatgtctccagttttgggggcagtggtttgccytacgatctcacttcttttgtggatctgagaagagttttccagtttgttcagctttttacttgctaggacagagttttgatttataagctccttacctgccagaccattaacaggaagtcttctgcttctttttatgaccaaataatattccattgtatggatatacacattttgtttctccattctctaggtgatggacgtttgcattgtttccatttttggacatttgtttgtaagtctttgtgtggatatatgttttcatttctcatggttcttcctagaagtagaattgcaaagtcatatggttggtagctgtttttatgtgtaatcttttgagaaactgctagactgttttccaaagtggttgcaccattttatattcccaccaacaaygtgtgagggttctgatttttccatatcctcaccagcacttgttcttacttgtcttttatattatacgtatcctagtgggtacaaagtggtctcgtttgatctctttgaggtttgatatagaactattcagattgtatatgtcttcatgagtgagacttggtagttgcatgcctcaaagaattggttcattttatctaagttgtgaaacttaatgtacatacactgatttgtaatattctctttttcttttgatatttttagagcctgtagtgatgtctcctctttcattcctgataatggtatttgtgtctttttactcagtcattgtgactagagttttatcaatcttactgatcatttcaaagaaatactgattttctctattgtttttctacttccttaatttctgctccaatttttattttcttctgtctgcttgctttggatttaatttgcccttctttttctgatttcttaaggaggcaagttaggccattgatttgagatcttttttaatataaacattttaatgctacacattttcctctcagcactacttcatctatatcccacaaattttagttataatatactggctgtattttaattttaatccaattacaaatactttctaattttctttagactttctctttgacatgtgggctatttagaagtgtattgttcagtttccaagcatgtggaaacatctggagatttgccagatttttctttttctttttttctttaaatcctttttttttttttttttttttttggagacagagtcttgctctgtcccttaggctggagtgtagtggtatgattttggcttactgcaaagtctgcctcctggattcaagcaattctcatgcctcagtctccagaatagctgggactacaggcatgtgccaccacgcctggctaatttttgtatttaatagagatggggtttcaccgtattggtcaggctggaagatagctttctatcattaatttctagtttaatcctgttgtagtcagaaaacatactttgtatttcagttcttctaaatttgccaaggttagctttatggyccagaatatagcctgcagtgttgaatgttccatatgctccgtgcattttgctgttgttgggtggagtgttgtataaatggcaatttggtcaattggttgatgacggtgtctgttcttttacatccttgctgttttttaatctacttgttctttcagtgactgagagaggagtgttgacatctccagctatagttgtgaatttgtgtatttttctcttcagttctgtgactttttttgcttcatatactttgaagctgccagcacagctctactacagtcctcctctcaggtcaaagctgttagaaaaaataagaaaaaagaaacaaaacaaaaacaaaaacaaacaaacaaaaaaagaaatcaagttcccacctctgtactagtcacttctctgagtttctgtctctctctcacaagccacctgctcttgtttacttttcgagtcctcagggagttgctttttgtattttgtccagaatttcagttgtcatcagtggagaggtgggctgcaggaggtgtgctccaatttagcctcaggtcgattttgaacatatttttctttttcccttgaatttcccttctttttggctaaatgtcacctgtcctccaactctctagtgatgtctcctctccaggaaattttcccaagcccgactggattgtgtgtccccctccccccgccaggtgatgctgcttccacagctcgatagcctgggttgtagcccctggttgtcccccggtgggatgcgagccctgtgagggctgggagacatgatggtcttttccaacctggtatccccagactgtgtgtgtgctggcatctggtcagcagttcattcactgtttcttgaataagtgattgtgccaacctccatggacctgcagtataactctgcaaagattgtatgactttaggaaagtttgtgcaattcaatttgtgccccaacaaatagattcccagtttcaggagtgtgttgatggctgtgtgattttaagcacacggatgttccatgtaccctgtcagtgggcaggctttcctggcagccacagccttttctcayacccctgagggaagactgcttggtgcttctctgcaaatctggcgcggaggctgcggagggagatggatgtgctgagaggagactgagggccacgttccgtaacaagcgggccattgccacgcccagttcagaagggagatgaggagtggatagctctctttcccctctgcatgccccttttccaccaaacagatttcttggtttttaattacagtctttgtcttgaattttttcttttttttcaaaaaggtcggttttctggctcacctcactcatttgctcattgaacactgcggagcacctgctgtttatagggtgtcttcctagtttagaggattcagagaagctgcaggaaatgtctcttgccctgctgctggcaccacctccacccagttggtggcccagccagaaacctctgcagcagctttagggtctcccttctccaccacctcagtccctgcgtcctcctcttccagggccaacatgtgaggttgtgcagtctgtacagtgcagagaggcaccttgctgagggataggtggggtctgtattccattccaagccctgctggccaggccacgcccctgatttggaatggtttctactcgaaggggtatctttctctaataggaaccaaggtgccatgcgggccagtggcagccctgtccctccccttctgtctcttacttggcctgagtggggctgtgagccgatgagagggcttgtcgtggggtccccctgtgacttgggtgcaagcagggtgtaggggtagaggcaaaaaagggccttggagacctggagacccaagtgctgcccatgacttcagaatggaggktgaggtggttgttctctagatgttcgttttgattagaaaaggaatacatggtctttgttggctacttgggaaatggaaaaatataaagaagataacccattaaacttcaacccagccataaccaccactgacagttggtatccttcattcaattgttttatgcatatgtatttacatttttatataattgtctttcagcttattataatatcattagaatttcccatattgttaaaaggtttttggatgctataatttttaataattactcaatatattataccaagatgtatttaaccagccctctattgttgggtgtttataagatttccagtggttcccttattacaacactaaggcaaacttctctgcacaataattcttaaacgcagaattagtcgaaaggtaagcatggtttttaggttccggaaaccactgcctgcttccttccagaagtggaagtgccagctaaccctgaagaatgggttcatttgttagtttgcttgttttcagtgtaggtgagacttatgcatgttcacctgcatcctggaggaaggcactggtgcagagagatgggctggaggtggggtggtggctgagggagcagggtgggtatagggaagaaagccacctccttcttgagacaggaaggaagtggggctgggagatagagcagacgggccacaagaggcctccttccttccagagctcctgtcctgggctgtggaatgggtcccagggggtgaagttcgctgtgttctgctttgctcccagtccttgctaatcagcccagccaagcacctcagaactcaaaggggtggccaggattcactgcacacctggtgaatgtagaattcagtgtttggagtcaggtgggatacaaggactggaaattgacaccagatagctctgtctggtggggagacagagctgtccctgagatgggggatggtacaagcattgggaaatggtcttgcagcctgcctggccccgctccacccagaggttccctgggacctggttgctgtcttcctagaggtgccacaaccctcctcccctacttctctcttacctgctgcatcctctctgtgcaccaaggaggagggccagcctgactggatggggcggctccctcctagtgcattgtgtgtgcccctggtgtggacactggaggggccygagagtggggtggcttgctcactcttacttctctcctgctgcggttctgggtggttcaggacctgcgggggctgcggggaaggccctgccctaattcagtggcctagaggcaggccagctcgtctcttctgctccttcttccagggacccgaggagggtgaagtggctctggctgtggagggtggagaaggaggggtggggatggtcagatggaggcatgccgggcacggggcattctctgtggcccagcccaaggccagtgcaccacaaagtggccttttttggtccctgttgaccctgtgcctcattagagagatagacccctcccctcagtgccctagttagtttctctggggctaggcagggcctggggttttggggccccccacagttttgacgctggctcagccaagcgagcctcaccatctccatctctgttcagagtaggcctgagcctctgtccattgtcctacgtggcttctttggggttgagggtgcgtggaggaggcagctgcaggtggtactgcgaggcaggggcctgggcttttcagagttgggctgctcttgggggtggctgcattgttagagcctagttttaatttgtgcctccgctataaagtaagggaaaccaatttttcacttgagaggatcaacacacaaatacatgtgtaattgtctatttctgcttttcttcctttcccatgtgttttgtatctgtaatttaaaatttcacagtcttcaacatgacagtttctctgtgggtatgtttagattcaattagattcaattcaaattcagcaaacactaattgagcagctactgtgtgcaccgggcgacctggtgtagtgcatggtacagaggggtccggcttgaatgtcaggccatggagtaggtgtgacagtggctctgcctgcacctcgcttcatgattgtgggcagggcacttcacctgtctgacctcagtgtcctcaactgtacagtgcagctggcgagcccaactttcccaaagtggtcacgaggattaaggaggtcacatgtaaggcacctagcaagacagatggcacttagagtgttcaataaatgctcctggccatcttgatgtcttcagatgatgatcacaacagggttgtgccctccacgagctcatgataattggccatcatgagctgtcttcagttttgctaaaagtggagcagagattgtaccttccccccagccagacagcatacctggccaaaacatcaagtgcctgtgctttcggctgaagatgttctaacccagtgcgataacaccggtcatctcaggctgatcagaagctcagatacacattctcccatgtctttgattaattttttaaagggagaagtgaattaattattgctgaataagtgtggacactcaggatgtgggggaaagaacctaaaatgggaacttaggagctgtcactgtgggaacccctgtgtaagccaccccaggagctgtcagaggccctgtgattcccacatggcaacaagccagtaaataccctccaagacagaggaaggtacagctcagcccttcctgatggatggagaacttgaggaccagagaatgggggcactgaatgtgggggctcacaaaggccatttgggccttttccttggaggaggatgctgggaaatggtccctcaggcaatgcagagaggaggatggtgcagtctgcctggagctgtgcagcagacaagggccagcttcatctcactctccaggagccccagggagccctccttccctgtccgctcctaccaccctttggtggatcctattccccatccctccccgggtcccgtgacctgtccccagacagctctttgggctgtttgatggggctcacacctaggaaggctgtccttggaggatatgttctgcttctgttggaagtgcctcaggcatggccccttgatagttgtgggaggtgcaggcagagccccccactgtggtggcccttgccctcccactcagctctgagcctgatgtcatccacctctgtacattgtccgagggacagtttcataacttccctgcttaaggggaaaggccttaaggctctcatgagccccccacattcagtgccctcattccctggtcctcagtttccccatctgccaggaataggctgaactccatgacctagcctgtgtagagcacaacccccagttgttagctgggaatggctctgacgaggccttcctgctgcgagtagtcagctccctctcctggagctgggggagctgggggacccaagacactcacaggctgctccccacctgccagctccagttccaccagtgtcctggagctgctcactttagagttcttcattaggggtcctatagacacttgctgaattaaccactgcatggccaagtggccacggcgtgggggaacatgaggtccctccctgcatggcgaggggaggagtcagtctccacagagtacatcgtgatgggaactgcttgggggctaatgaaagactcacagaagaaggagctaatgattttgcttgccacattgggaggcttggctggcagagggtttcaaaggatacataggagttttctaggcagcaagtcaaggtagggtattttaggcataaggaatgtataaaggcacgtaggcactaaagggcacaacayatgagggaatggtgagggttttttgttgctggagaacacgcagtgtgtgtctgtgagtgtgtgtgtctgtatgtgtgtcggtgcatgtgtgtgtgtccatccatgcatgtgtgtgtccatccatgcatgtgtgtgtgtctgtgtccgtgtgtgtgtgtgcgtgtgtgtgtgtgtgtgtgcatgcgcattcagaggagagttaggaaacaaggtcagcttggctgcccatggtggccagtgcagggcctccaccctggccatttttaggttgtgacccagagctgaacaccccaagggaggctttagagataagggagacctccccagtcacgcccagcatgctgtcaccattgcctttaaagcgtgtcccctgggagcctgagccagctcatcagttacacctgaatataaaagggaaaggtgtcctccccctgccccccgcatgtggttattaaagcgcgccatctttaagcctcattaaggagtgttaaatgctaatgaatttagagagaggggtgtcttggggcctctgtttccttggaaacatttgaaagcaggtgctttataatgagctgtacctatttaaaagtgagccgtgagggccactttgataagctggatctcagctgcagatgggcaagtgtgaacaaagccagtggaggccagtggagacgctttgtgctctgtgaaatatcatttctctggtggtttctatagaaaccactggcacctaggtaggagaattgccgggctccccggcttcacttacacatcacaaccttgtccccagccctggccacctcagcccccgtccccgaagactgctggattcccgttggcagagcggggttgggttctggacagatgggacagatgcatgctaccgcaggtgtaattcgctttaattatgtctgttctgtacccactgcttgatttcagttggtcccacctctgcttatgatttcaggcccagctgataagaagaactaacatttgtggagctaattcctcccctcagagcactttaaagaaactttttattattgaaaaatgtaaatatataccaaagtagaaagactaattaatgaacctttatgcaaccagcatcctgttttaacaattataaaattatggccatgcttattttatccataatcctacccatttcccaatagtctccaccctcctcaccctcaccactgattattttgaagcaaatcccagacatcctgtcattttatttgtaaatacttttgtttctttaaaaggtgtgggcttaaaaaactgttatcccatctagtaatttggcaataattccttaatatcatccactctctaatccatgttcagatttccctggttgtctcataatttgctttaaacagtgccttgttcaaatcaggaccctaacatttgatttctaagtctcttaagtctatagatttctttcctactttctttttcttataacttatttattgggtaataaatcagttatttttcctgtatctttcttactgtatccctctgatgtaatttaacacattcctctgttccttctgtatgtcttatgaactggtggtttcatcttaaagcaggtcactgggggagcttgtgagtctgctgctgcttccaaggctcatccctattgtatgtatcagcattccttgttgctgagtcatagtccattgtatggacataccgcagtttgtttatccagtcacctgtggatggacgttttgagttgtctccagtttttggctgttatgagtaaagctgctgagaacgttcatgaacaggtctgtatgtgaatatacattttcctttctttgggtaaataactgagagtggaattgctaagtggtgtagtatatatatatttaaatttttaataagtcaccaaactgtttccaaagtggttgtaccattttgcatttccatcagcagtgtgggaaagtgtcagttgcctcacattctcaccaacacttggtgttgtcagtctttttcattttagttattttagtgggtgtgtagtagtatctgattgtggctttaatttcttctccctgatgactaatgatggtgaacatctttttgtgggcctattgaccatttgaatgtcttgttttgtgaaggatctgttcaaagtatttgcctatataaatttattattattgagttctaagagtctttctatattctggaattattttctcctattacataggtttttgtgttctaagaaatctttacctatcctaatgttgcaaagattttctcctatgtcttcttctagaagtttcatagtttttgccatacatttattcagggctatggtatattttcagttaatttttgtttatggtgtgaggtaaggtcaacagttatttatttcttttgctatgtgggatacccagttgttttggcagcatttgttgaaacgacattattttcctcattagattgtttttggagccttggtggaaaatcaatttgccacatgaggttctctttctggcttgtcagttctgttctattgattgatgtgtctatcattttaccaatatcatactcttttggttactgtagctttataataatttttgagattgagaagtttaagcctcaaactttgcttttctttttcaagatttttctggctattctaggttctttacattcgtatttcaattttacaatcaacttatctttttctacaaagatatctattgggtccaatctgtagatcagtttggggataattgacatcttaataatgttgcatcttcttatccatgaacatagcacatctcttcatttatttagctcttctttagtttctgtcagctgtgttttgtagttttcagtgtttgatgttacacatgttgtattaatttattcctcagtttctcatgtttttggatactaatgtgagtggaattttatattttatttcattttccagttgtttggtattagtatatagaaatactattaactttctttttaaaaaaataatttcaacttttattttagatccaggggatacacgtgcaggtttgttacctgggtataatgcgtgatgttgaggtttcgggtatgattgatcccttcacccagttactgagcatagtactcaacagttagtttttcaacccttgcccgctccctccctccaccctctagaccacagtgtctattgtgccatctttatttccacaagtacccaaagtttagcttccacttataagtgaaaacatggagtatttttgttttctgttcctgcattaatttgcttaggaaaatggtctccaacttcatccgtgktgctgcaaaggacatgatttcatccttttttatggctgcatagtattccatggtgtatatttgccacattttctgtattcaatctactgttgatgggcacctagattgattccatgtctttgctattgtgaatagtgctgtgatgaacacgtgagtgcatgtgtctctttggtagaataacattttcttttggatatatacccagtaatgggattgctgggataaatggtagtactgttttatgttctttgagaaacctccaaactgctttccacaatggctgaaataacttacattcccaccaacagagtataagtgttcttttttctctgcagccttgctagcacctgttatttttttgactttttagtaatagccatgctgtctggtgtgagaagttatctcattgtgattttgatttgcatttctctgctgactagtgatgttgaacattttttcatatttgctggctgcctgtatgtcttcttttgagaagtgtctattcatgtctttggcccattttttaatagggttatttgtttttttgcttgttcaattgtttaagtttcttatagattctggatattacagctttgtcagatgcgtagtttgcaaatatttctcctattctgtaggttgtctgtttactctctggatagtttattttgctgtgcagaagctctttggtttaattaggtcctgcttgttaatttttgtttttattgcagttgcttttgaggacttagcaataaattctttcctaaggctgatgtccaaaatgatgtttcctaggttttatttttataggattcttaaagtttgaggtcttacatttaaatgttgagttaatttttgtatatggtgaaaggcaggggccagtttcatttttttgtatatggctagccatctatcccagcaccatttattgcaaagggaatcttttccccattgcttattttggttgactttgttgaagatcagatggctgcaggtgtgcagctttattctgggttctctattctgtttgattgggctatgtgtctgtgtttgtacagtactatgttgttttggttactgtagccttatagtatagtttgaggtcaagtaataggatgtctccagctttgttctttttgcttaagattgctttggctatttgggctctttttgggtttcatatgaattttagagcagttttttctagttctgtgaaaaatgatattggtagtttgataggaatagcattggatctatagagtgctttgggcagtatggtcattttaatgatattgattcttcgaatccatgagcacggaatggttttctatttgtttgtgtcgtttatgatttctttcagcagtattttgtagttctccttgtagagatctttcaccttcttggttagatgtattcctaggtatttgtgtttttttttttttttatggctgttgcaaatggtattgcaaatgggattgtattcttgatttgttctcagcttgaatgttattggtrtatagaaatgctacagatttttacacattgaatttttatcttgaaactttactgaagtcatttattagttccaggagccctttggcatagtctttagggttttctaaatattgaataatatcatctgtgaagagagatagtttgacttattttttcctatctcaatgccctttatttctcttgcctgactcattctacaaagccaacatttcataccaaaacttggcaagaaaaaaagaaaactacaagccaatatccctgatgaacatagatgcagaaatcctcaacaaaatactagtgaaccaaatccagcagcacatcaaaaagttaattcaccatgatcaagtaggcttcattcctcggatgcaaagttggttcattatatgtgaatcaacaaatgtgattcaccacataaacagaattgaaaacaaaaataatatgattatctcaataaacacagaaaaagctttcaataaaatccaacatcctttcgtgataaaaaccctcaagaaactaggccttgaaggaacataccttaaaataaaaagagctgtctatgacaaacccacagccaacttcatactgaatgggcaaaaactggaagcattccccttgagaactggaataagacaagggtgcctactctcaccattcctaattcaatgtagtactggaagtcctagccagaacaatcaggcaagatacaggactcttttatatggactgtgtatcatgtgaccttactaaaattcacttcttagttcttgtagctttttcctagattacttagaaattttaatttacatgatcatgtagtctgtattattttacagctttctttctaatgcatgtgcaattatttatttttcttgctgtattacaatgactagaactttcggtacaatactgaatagaaattgtgaaaatggacatttttgtcttgtttctcattttgtagggaaaacaatcagtcttttaccattaagtatgatgttagatgttggtttttcatagataccttaagtcagtttaagaaagctaccttctattcttagttgtatgaattttttaaaaatcatatattggtgttgaattttgtcaaaaatgattttactacatctatatgttttcctatgttctgctaatatgttgaattacattgattttttttaaagttaaaccatatctttcctatttggttttatgatatattgtccttatatagagtttaattcaagttgctaataatttgttaaggatttttaaaatctatgttaatgaggattattggatcgatacattttttcctatnnnnnnnnnnnnnnnnnnnnactgagaaaatgttctctacttatgtttttgaatgtttgtataagattggtattatttcttccttaaatgtttgatagaattcagcagtgaagacatctggacacaagactttctttgtaggtagatattgaatcacaaaaaaaattaactatgtgtaacgtgggccattcaggtgtcctatttctcctttagttgtttttgttatcttttatcttctaaggaatttttccattttatctaaattgtcaaatttattgctctaaaattgtttttaactttattttttaatggctggggtgtcttcatttcttcttgttgatctgagtgccaatctggtatcactaccccccaggctgcagaacttcctttagcatttcttataatacaggtttgtggtggggaattctctgtttttgtttatcaaaaatgtctttatttttccttcatttttgtcgtgtcctgccctttttatacttttatggaaatataactgacatacaataagctgcacatattcaaaatgtacagtttaagttttcatatatgtatacatccatgaaatagttaccacaatcaagataaataatgcatccattaccttcaaaagtttttgtgcccctgtgtttacttctagaagttgtatagttttgggcttcatattaaagtctgtgatctatttagtattaattttttgtgtatggtacaggtatggatgtagtttcatgtttttgcctgtggataatcaaatttctgcagcatttgttgaaaacaatatctgtgcctttacctctctgtggaaatcaattggctaaatagatttaggtctattgttgtactctctcttctgttccattgatttctttttttttttaattaaaaaaattttttgtaggctggttatggtggctcacacctgtaaccccagcactttgggaggctgaggtgggtggatcacttgaggtcaggaggtcgagaccagcctggccaacatggcaaaacctgtctctactagaagtacacaaaatagctgggcgtggtggcgtgtgtctgtagtcctagctactcaggaggctgaggcaagagaattgcttgaacccgggaggcggaggttgcagtgagctgagattgcaccactgcactccagcctgggtgacagaacgagactccatgtcaaaaaaaaaaaaattaatttttagagacaagggtttcactgtgtcatccaggcagtggcacgatcatggctcctgcagcctggaacttctgggctcaagcgatccttctgcctcaatctcctgagtagctggcactatagatgtgcaccaccacactcggctaatttaaaaaaaatttcttttggccgggcacagtggttcacgcctgtaatcccagcactttgggaggtcaaggtgggcggatcacctgaggtcaggagttcaagaccagcctggccaacatggtgaaaccccgtctctactaaaaatacaaaaattagctgggcatgatggtgggtgcctgtaatcccagctactcgggaggctgaggcaggagaatcacttgaacccgggagccggaggttgcagtgagccgagatcgcgtcattgcactccagcctgggtgacagagcgagacaccatctcaaaataataataataataataataataatgtaaattttttttttttttgtagagacagggtctcgccatgttgcccaggctgatctcaaactcctggcttcaagtgatcctctttctttggcctcccaaagagttgggattactggtgtgagccactgcactggccccattgatttatttgtctatctttataccattgttttcatcattgtaatattataatgaatcttgaaatcagctcgtataagtcttccacctttgttctgactactgtaggttctttgcatttacattttcagttttacaattgctttgccaatttatgcaaaaaaaaactggcttgaactttaaatggtattgcatctcatctgtagagcaatttgggaaagaattgtactgccaacaattttgtttctttcaacccataagcatagtatacttctctatttactgaagtctttaatttttctcaccaatgttttgtagttttcatagtgtaggtctttcacatttttttgtcagattttatccccaagtatttatattttgatgctattgtaagtgatattttaaaatttcagcttctggttgctcatggttagtatatagaaaaattgtggctatgtgaattttcaccttgaattctgtaactcttctaaactcatttattagttctggttgtttctttgtagattctattggattttctatatagataatcatgttgtctgttaataaagtcaggtttagttattcttttccaatctggacactatctgtctatctctatcctctctctctctcatctattttctctcttcatccctccctcccttcctcctttttctccttcccttccttccttcctttcttgtttccttattgcactggctcaaacctctagaacagtgttgtctagaagtggtgagagtgtgcatccttgccttatttctgatcatagagggaaagtattctctttcagttacatatgatgtcaactagttgttttgtacatgtccctatcagtttgaatgtactcccttttattcatagtttgctgagagttttttaaaaatcatgaatgaatgttagattttgttaaatgccttttcccatttattgaaatgatcatgtgtggtttttttattctgttaatatggtggattttgtcagttgattttcaaatattagaacagccttgcattcctgggataaacttcacttgatcataatatattattccctttgtataatttggaattatatcagctaaagttgtgttaggaatttttgcatctatgtttatgagggttattgatctgaactttttttattataatatctttgtatgggtttggtatcagggtaattctggcttcatagaacaaattgggaaatgttcatttctcatcaattttctggaagacttcgtgtaaaaattgacattattccttaaatgtttgctagaattgactagtgaagctgtcttggcctgaaattttctttgtgggaagatttgaaattttaaataaaatctacttagtaaatatagggctattctgattttctattaatctttgagtgacttttgatagcttgtgcctttcaagaaatttgtccatttcatcaaagttgtccaattttttggcataaagttttttgtaatgttatttttaaaaatctgtataatctgtggtgataccacctcatttctctcagtgctgatattggtgatttttgtcttctctgttttttactctgatcagtctagctagaggcttataaactttattgatcaagtatcagattttcattttattgtcttttactctttcttttctttttacagaactcattgatttcttttcctatcttatttcctttctttcacaaaaaccttgaatttaattttctttttctagtttcttaaagtgtaagctgaggtcatagttttgagacttttattcttttccgattatagatgttcaatactattgatttttctctaggtatttcagctgcactacccaagctgttgatatattgcattttcattttcattcagttcaaaatactttctgatttccttttggtttcttcctgatccatgatttatttagaagtgtgctcgttaggttccaaacacttgggaacttttcagatgcctctttgttattttttctaattcaattccattgtggtcacagtacatacattgtatatttgaattcttttaaatttatttagatttttttgatgttttaaaatatggtctatcttggtaaatgttctgtgtgcactgaaaagaacgtgtgttctgtggttgttgggtgcagtgttctataaatgtcaattacgtcaagttggttgatagtgttatttaaattttctatatcctttctgttttttctgtctattctataagagctgtgctatactttgaacgtatgtatccctccaaaatttatatgttggaacttaaaccccaaagggatggtattagggggtgggggcacataaggggtagattacgtcatgagggctccacctttgttagtgtagttaatgcctttataaaagggctggagggaacaaggtgggcccttttttactcttccatctcttctgccatgtgaggacaagcaagaaggtgcaagccctcaccagacactgaatctgctggcacctcaatcttggacttcccaccatccagaaatgggagaagtaaatatctattatttataaattgcccagtctaaggtattttgtcctagcagcaggaatgcactaagacaaggcttgcaatttgtgtctctaagagtggatttgtctacttcctttttcagttctgttagttttcctgcatttattttgaagttgttaccaggtgcatacacagttaggattatcatgttctcctaatgaattgattcttttatcattgtgaaaggaccctcttttttttttttcttttttttgaaacagagtctcactgggttgcccaggctggtctcaaattcctgagctcaagtgatcctcctgcctcggcctcctaaagtgctaggattacaggcatgagccactgtgcccagccatgaaaagaccctctttatccctttattctttactctgaaatctactttggtattaatatagacattcctggcttattttaattattgttagcatggcatatcttttttactttttttttttttttgagacagagtctcgctctgtggcccaggcaggagtgcagtggcgcaatctcggctcactgcaagctccgcctcccgggttcacgccattctcctgcctcagcctcccaagtagctgggactacaggcgcccgccaccacgcccggctaatttttttgtatttttagtagagatggggtttcaccgtgttagccaggatggtctcgatctcctgacctcgtgatccgcccgcctcggcctcccaaagtgctgggattacaagcgtgagccaccgcgcccggcccttttttacttttaacctatttgtatctttatatttaaagtttgtttattttaggcagcatatagctggatcttgcttctttattttaaacctgtctaacaatctcttctttcgaactaggttatttgtcctgttttaatttattatgattattgatatggttgggtttaaatctgctaccttgctatttttttttatttgttccatctcttctcccccatccatttttttcacttggattaatttagtatttttatgatttcatcttaatcttttttgttgctttatcatctgtggcattgtgctgtggggtttgtttttttaaaatgattgtctgcatttaagtcacattatatctctttttctgtaagaaccttagagcagtattcagattttcagtttctcccctcagggtctttgtgctattactgtcatacatttttcactcttacttatgttacaatctccaacattgttattatttttgctggaagtagccaataattttaaaaatattttaataataaaaagatattatctattttcctacatatgtattatttctattgcttttcatttttgggtgtaaatttagatctggtatcattttctttgtgccttaaggacttcctttaacatttcctgtatttttggtctgctagtgataaattatttcagcttttatttgcccaaaaaaatctttagtttgtcttttgtctaaaagatatttatgctaggtaaagaatttggggttgatgatttttttctcttccagtactttaaacatgtcactcaattgtcactagtttgctctgtttccaatgagaagtctgctgtatttctcatctttgcttttctgtatataatgcatcttttctctgtctgctttttaagatttttctctttaccattggcttcaagcaatttaaacaatgggccttggtgtaatttttctctatgtttcttaggctttgtttagtttcttttatctgtgagtttatagttttaatcaatgtattatagtcttttatctgtgggtttacagtttaatcaaatttggaaaatttttgctcgtagttttttcaattttgtttgtccccgaaaccccacccctcatctccctgtctcacttacattcatattcagggtttttggatttattccatagctcactgatcctctgttcttccatatcttcaaatttagtaatcatatcttatgcaatttttaatctattaatagcggggcattgttttatatcacttctacatgtttgatttgggtctttaaaagatatctttcatgtgtattatccttaacattctcatactgtccgctaccttcttgagcatacagtatatagtcataactgatttattgttcttttctatttattattattattatttttgagactgagtctcactctgtcacccaggctggagtgcagtggcctaatcttggctcactgcaacctctgcctcctgggttcaagcaattttgcctcagcatccttagtagctggaattacaggcgcatgccaccacaccttgctttttttttttttttttttgtatttttagtagaaatggggcttcatcatgtttgccaggctgttcttgagcttctgacctcaggtgatccacctgcctcagcctcccaaagttccggtattacagatgtgagccaccacgcccaacctcttttctatttattctatcatttgtgtcactcatgggtctgtttctattgacagattttttttttttcattatgggaagcattttcttacctctttccaggtctggtaacttttgattggatgccagacattgtgaattttactttttgggtattcagtattttgttgtgctttacatattttgagagattttttggatgcggttgtattgcttgataacggtttgatttttcagaggcttgctgttaggctttgtttggtggaacaaaaacagcctttagactagggccaattttgcctcatttctgaggttatactcttgtgagtactctatccaatgccatgtgtatttcaaggttttccccctctgactggtgggaaaatgaatgattcctagctctgtgtgaaacttggcaattgttttgcttattctcttttggtggttcctttcccggtttgtgtagtttcctcacatgaatgcactgattaatatttgtgttacttattataaagaaaggagtgttaatatctccaggtaaaatcgtggacttgtatggtttctcctttcaattccatcagtttttgcttcatgtattttgaaagtctgttattaggtatatacatatttaaggttgttatgtctgctagatgaattgacacttgtacgttttcattgtattcctcttattcctggcggttttccttgttctgaagtctactttgcctgctattaatatggtcacttcagccctcatttggttatttttaatatggtatatttttttatccttttacttataagctatgtattttattatatttaaggtggctgtcttgtagactagatacagttggatctttttaaatgttaatctgaaagccaattggacaatctgtcttttagttggagattttagacaatttatatttaatgtaattactgctatggttgactttggcctgtcatgttattattttattatttgtctctgttttttttttttttaaaggagatgggatctcactctgtcacccaggctgaagtgcagttgtatgatcatagatcactgcagccttgaccttctgggctcaagcagtcctcccacttcagcttcccaagtagccaggaccacaggcatgagccactgcacctgacatatctccgggttttttttttttttttttttttttatgagacggagtctcgctctgtcgcccaggctggagtgcagtggcacaatctcggctcactgcaagtcccgcctccagggttcacgccattctcctgcctcacgcctggctaattttttgtatttttagtagagatggggtttcaccgtgttagccaggatggtctggatctcttgacctcatgatccacccgcctcggcctcccaaagctcctctgtttttattccacttgctcttttcctgccttctttggattattttaacatttttattatatcatattattttatctattagctttttggttatgtctctttgtattatacctttaaattgttgctgtaaggactacaatatacatgcctaatttttcacaattctacttattgttaatattttaccacttcaagtaaaacatatgattcttctaggccaggtgtggtggctcacgcctgtaatcctagcactttgggaggccaaggcaggaggatcacctgaggtcagaagttcgagagcagcctgaccaacatggagaaaccccatctctactaaaaatacaaaaattagccgggcgtggtggcacgcgcctgtagtcccagctgctcctggggctgaggcaggagaatcacttggacccaggaaggggaggttgcagtgagctgaggttgcaccactgcactgcagcctgggcaacagagcaagacgccgtctcaaacaaacaaacaaaacaaacaaaacaaacatgattcttctaaccagataagcctttttaccccctaccctgtaagttaaaattgtgttatggattacatctacatacattgaagatccccttcccagacaatgctatatatttttttcaagagtcatacgtatttcatataacttaagtgaaaaaatgattttttatatctacctaatcatttaccgttttttgctgctgttccttcatccctgaagctccaagttttcctctggcattatttcctgtcagcctgaggaacttcctttagcatttgttttagatagatcaggtctgttcatgacaaattcacttagttcttcttcatttgtaaaggccttcatttcctctttattcctgaaagatatttttgctgtctgtaaaattttggattgatgctaatttaccactttcagtatgttccgctgttttctggtctccatagtttctgatgatacatttatggtatttcaaattgttctcctctgtgtaattcttcatttttttttttcctgggcactgtcaaggttttttctttgaggtttttagcagtttgattgggatatgcagaacatggtttgtattgtgttttttctttttaatttatcctctttgtggttgcagagtctcttgactttttaaccaaatttgggaacagtttactcaatatttccttaaatattctttcttttgggtactgctgtcttcaccttctcctttaagaactctgttgatggccagctgcggtggctcacacctgtaatcctagcactttgggaggccaaggcgggcagattgtctgagctcaggagttcaagaccagcctgggcaacatggtgacaccccgtctctactaaaatacaaaaaattagccaggcattgcaacgtgcgcctgtagtcccagctagaggacgggaggctgaggcagaagaatcgcttgaacctgggaggcggaagttgcagtgagccaagatcgtgccactgcatgccagcctgggggacagagcgagacttcatctctaaaaaaaaaaaaaaggactctgttgacaaaaatatttaagcttttgatattatctcatagatccccaaagctctgtttatttttttcttcagcttgatcatttgggcagaatgagggatttatttcagaatgtttggtgtccatgcccactatgtactgccttaatccagtcagtctttgggtcaacagcaggagttaaaacacaaaagtgaataccaactgggaacctcatctgccatactggtctttattcaaattttgacttcctttcccaacccacctgctattattgacttttcagagtcttcaggtagttgcttttaaaattttgtccagagtttttttttgtgtgtgtgtgtaatttataggggggagagagagagagagagagagagatgcatagtgggtttactccatttcaggtttacattagatttgttcattttaaaatttagaatttttttctatctggtacatgttgcataattttaattgctatgtcttctagtttactaacggtttcttttgcagtgtctcatctgctgttaatcccatctaatgtatttttcatctcaaacattgcatacttcatctcttgaagtgtgatttggatcatatatgtatatatgattcattaaaagttattataactccataacatatgtttaagaaggtagaggagagactgaccatggtaagtagagatatggaagactatctctatatctatatatagtctttgtatcatatatgtagtctatatatatacacatatagtctatatataacatataatcatctatatatagtatatatagtgtatatatactatatatagtgtatatatagtatatatatagtgtgtatatatagtatatatatagtatatatactatactatatgtatatatgtatatatgtatactatatgtatatatagtatatatactatatatgctatatatatactatatatacactatatgtatatatgtatatatgtatactagatgtatatatagtatatatactatatatacactatagtataaatacagtgtgtatatagtatatatatggtatatatagtatatatagtgtgtatatatatgtacactatatatatacacattgatcatttgggcgtgtacatatatatgtacatatgtgtgtgtgtgtgtgtgcatatatatatatagtgtatatatatatatagtcttggtctattatctatgtcacttctggccagtttagctgggtttaagaactataatccaggtgttgagtttgctgattgtttccacactccttctgtggacagagctgggaaatatttttcttgtggagacaaaatatattattgtttatactgatttttccaattcaaatttaggattacagaattttctttacttttttgtttttatattttaaaaatctcttttatgctaacatttttaaacttccatctgccttaccttaacacatttcttttatatatattgacactaacaatgaaacgactgaaaacactttaagatttcttgcagttctctttgttcacaatgtatatctaattaggatttaccaccatattgccagttttctattaataatgtatattcaactaaggattgaccatgtaaatgtcagctgcttttgatagccaccatcctatgtgattggcgacttctgcttttgcgactttaaaccaaagcagtgggccctgtgctacctttccactttgccttgcatcttggcactggaagaagacaatgcatttattactgagagttgcccaagaactcacagctccatcctagggactctagctctggctggctggggaggagaaggtttacaagcatcgggctcgtatgtgtcaggcatttagctgggcacagcacccttagttcctcaggtggaggtcctgttgttacccctactttacaggtatggagactgaagaacagacggaagttacttgcccaaagtaactgtgcttcaggtcttttaaaagaaaccttatttgtgcagttaagctacgaaatcaatacatggttaattttgtttgcctaattttgctttcacattttagagattgctttttaagttaattttgttgcataatttaataaaatgtgtatatgagtccagagaaaggattggcaaactacagttgatgggtcttatcttgcctgtgacctgtttttatatggtctttgaggtgagaatggtttttacatttttaaccagctccaacaaacacacagacacacacatagacacacacacacacacacacacacagagagagagagagacagagagagaattatatataacagtgactacatatggcctacaaaacctaaaatatttactgactggctctttacagaaaaactttgtaacccttgttctagagtcaaatctgcaaaacaaggtacatttcgagaaatcatccatgttccacctctaaccctgtctcccccattctgctcccctcccttcctcttaaggcagtcttatttatttgcttattttagtttctagtttgtcttcttattgcttcttagtggaaacacacacatgttcacgtcccctcttctttacacagttttttctcccactttgaattttttttcactgaacaatgtgtcctggagatcgcttcatagcaggataggttcctcattcttttttacaactgcgtagtggtccagagtattaatgtactagagtttattcagccagtcctttctcgatgaacattgggttgttccctgttttttatttttacaaatagtgctgttttcagtggcattgtgcttatatctctttgggattttgccagtgtaagtttaggattagttcttagaagtggggttgctgggtcatgcatattgccgagtaacgatgcatatgttattttgctcaaagttgtctaaatcctttctgcacagggcttgtaccatttgcatttctggcagccatatgtagatacctaacacccccagagccacctaacaagggtgttgcaaaactttgggattttgttaatttgataggcaagtaatggtatctctgtgtgatttaaatttgcattgcttttgttaggagcaaagtggaaggaccatttcatttttttctgagctctgtttccttgcccgtttttctgtagagctattggtctttttcatctatttttagggaccatctgtgtattacagatagtgacctttgcctgtaatagaagttgtaaatatttctcctacttgtcttttttactttatttatttatttacttgcttgctttctgccatcccaaagtatttttttttaattattattgtttttatatagtccagtttattcaacttttcacttattgcttctgggtttggagtcatagctgggaaagttttccctagtcccaggttgtagagaaattcaatcatgttttttctcatagttatgttatactttgtttaatgtaaatgtcagttgcttttgatagccaccatcctatgtgattggcgacttctgcttttgcgactttaaaccaaagcagtgggtcctgtgctacctttccactttgccttgcatcttggcactggaagaagacaatgcatttattattgagagttgcccaagaactcacagctccatcctagggactctagctctagctggctggggaggagaaggtttacaagcatcgggcttgtatgtgtcaggcatttagctgggcacagcacccttagttcctcagctggaggtcctgttgttacccctactttacagatatggagactgaagaacagacggaagttacttgcccaaaattatgcagccagtaataggctgccacgctcaggtccccagggtgtctgcctaagtgcttgggccctcccacttggcatctcacccctgctcatccaagggccaggagaggccccacccacctctgggctcttgtgaggctgcagcgtggagcacagtcctgctgtgctcccacctcccaccaaggtcttggagcagctttcctttgtctccacgtctgaggcacagggcaggggctggctcaatcagggccaggggaaggacctgtgagtgaatgtcatctcacccgggggtcctgggagagccagtggcaaaggcttttgtgtgttgcctcagccctgcatgccaggatgttgctgggagccggaggaccctggattgctacttttaaagtagtcgaccttttgttcattcactcattcatttatgcatttactcacttatccagcatcaatttgacacaccttactnnnnnnnnnnnnnnnnnnnngcagacccagtgctagccaagggtgacccagaaatgtgggcagcagggcgtctgtgccaggagctcacagtcctgtggcgtaggcaggtggctgatgtgggcagctaagggagcacagggttgcgtgtgagcccagagcagtgcctccccaccccctgtccttcaggtctgggtgcagaggactggcagcatggggtgagggatagctgggtgcatccgccagtccttcttctttctgaggaccaggagtacttagaggctcagaggtgtggttggggccctcgtgttgatgactcaaaaactagacctaggaagggaacgaaccttccccaggcacatagtaaatctgtagtgggccaagattggagcccagtgaccacccccaaccccgtgcactctggaagtggcaggaacccaaggctgctctggacgagtcagcagcggcccagcatcccccaggtttgctggtgggccgagtggtgggcagattgtagggacataacccctgcatgtgtcatgatcgatcttctgctttccccaagaccatgtccctgcatctctaccaggggcccgcagttgccagaagagtctgagtgagactcccttttggatccagctcgttaggctcgggtagcagcgtcccatgccagctgttggtgtaattaaggttgccataaaacccaccagctagacacacaaatggctcctttgctctttcctggggcatgagcagttgtgaaggcgagtaaatcatgttcggtggcgatcacttcaaaggccagccttccacttgcagccacattattggcagggatcgcccataacacggcttgtttcccagccattcacttttatgacaccctaatgaattgggccatttccatccattctcagaaaatgtacggaacaactgttttggttctcctcaaaaagtttgtcttgggaggcaggtggtgtgttggcaggggcatgtaggtagttcttggctcctgggcaagttgcctgtctctgagacttcatgcccaccgagagaagctacctatggggctcttgtcatgagataacttatgtgaaccccccagccaaggcccagcacctaacgggcactcagcgagtggcagggagggccgtcatcttcctcatcctttccctgggtcagcctcttagggatcaaagtgttgaggctggtgggggctgtgatatcaaggccatgtgggaggatagagcaggcacaggcatgcagaatccagtgcgtggaggaaggcaggcagccgtgccgtgaggggcagcttgtctccctgttctgcattcagaaggctttttttttccacccctggatcattctttaggcttcagggggcccactctgaaatctccctggttgagggttgctttggaagaggctcagagaagagcggtcatctgttgcctaccctcccccaggaattacagaggcaggaattgaccagcaggagaatgaaccgtgggtcccagggaagccgtggaggtcggaagaggctccaccatgccctggccctgtgaccttgagcaaatccgtacctcttcctgggcctcagtgaacctcatccagagaatgggcctcaacctcctcctcctctaacctaaactgaaattatggagtgacacatttaatgtgaatttgatgtatacattttaaggaggatgacagaaaatatgtctgcaaaatttgaaaggtatgaactccaattaaaaagtcaaggtggctcattttgagctggcggggcccagggactgaactgtttatgctgcagccacatggtggcgscccaggaactggtaaagggaccggccggcccctgcgaccaacttgagaccttgctgcgcttccatggctgcgcgtgggtgcccagcatgttatttccatattgtcattaaagtcctgtcctctgtgagtttgttaagtggagctacttgctggtcctggtactgggacccttctccatcccctcaccagagctggatacttgagagcagaagctgaatgtgataaaatcctctaagaaagcaaaacaactgctcaatacttaataaagtcagtttatgagacagcagactgtgaagtatcggtgatgatgctaaaacaatacaaagtgtcgttaaagctaaaatatgtcctgtgattctggctttatggtctgtccccaagcacacttgctcctgcattactgtggctcctctgggacaacaatctgggactttgcaagctgtgaattatgtgacgtcttcagaagcaggacccactcaaagcatgaccccagtgttgatggatgtcaatatgctctcgaggtgcccttggcgagtcaaggcccttccctttgcgctttcccctgnnnnnnnnnnnnnnnnnnnnnnnnnnnnnnnnnnnnnnnnnnnnnnnnnnnnnnnnnnnnnnnnnnctttcccctgggatcctgctgctctcaaggggtgatagggatgcctctctggacccatgtggcaatagagcaggggggctgagaagctgacagacactggactgggcatggggcaggagggtccatgattccatatatggcttgtgggtgctgctcagcctgggtgtgtgtggcccagcataaacttcactaaacctgcctgccccctgggtccttggccttccctgcataggcgcctgtccgtgctgccaggcctgccagcatgaccggtgtccgctcttgcaggtgatgagaagctacaaggcgaccatccagcagaccttggacatcctgttcctccgggaaggctccgagttcctgagcagcacagacgcttccacccgggactcagctgaccgcaccattattgcctgggatttccggacctctgccaaaatctccaaccagattttccacgtaagaaatcccatttggcattgctgtcagtttcagccacagagcgtatccatgtagttctggtctgtctgaggtcccaggtcccttctgtgggaggaggctcactggactgaaatctccaggatgagggtagtcaggtctcagcctgccgcacacatggagagcttgctgtgggcttccagatgcaacctccttactgctcttcttgtgccagcacagcaaccccacagggtaagggtctggtggggggcggttcagtccagatcaatggggaacgtggcagtgcaacctgagaaaccccaccctcccactgccaccacaaccagctactcagaaggggtttctgaccctcagtggcattggcagttgatgtagcccaggagttcagagcaggggccccacagttagaacacctgcattaaggttttggattcactaggaccttataaggcggagagccttgggcctgctatttagcctctttgattctcactttcttcattagaaaatagttttgagaattaagagagagagagaatgtttgtaaagggtatagcacagtgtcaggcacggggaatgcttctgtgctttaactgtcattaccaccaccaccatcaacatcactaccaccaccagtgtcatcactgccaccatcatcgtcaccatcagtaccaccatcagcatcactgtgtctatagccaccacaaccactgttgtcattgtcactaccaccactactatcatcaccaccatcatcaccagcaccagcaccatcagcatcactaccaccaccagtgtcatcaccgccaccatcaccagtaccaccatcagcatcactatctttatacccaccacctccactgtcatcattgtcactactaccactcctgtcatcaccaccaccaccaccattatcaccaggaccagcaccatcagcatcactattctgctatacccaccaccaccaccactgtnnnnnnnnnnnnnnnnnnnnnnnnnnnnnnnnnnnnnnnnnnnnnnnnnnnnnnnnnnnnnnnnnnnnnnnnnnnnnnnnnnnnnnnnnnnnnnnnnnnnnnnnnnnnnnnnnnnnnnnnnnnnnnnnnnnnnnnnnnnnnnnnnnnnnnnnnnnnnnnnnnnnnnnnnnnnnnnnnnnnnnnnnnnnnnnnnnnnnnnnnnnnnnnnnnnnnnnnnnnnnnnnnnnnnnnnnnnnnnnnnnnnnnnnnnnnnnnnnnnnnnnnnnnnnnnnnnnnnnnnnnnnnnnnnnnnnnnnnnnnnnnnnnnnnnnnnnnnnnnnnnnnnnnnnnnnnnnnnnnnnnnnnnnnnnnnnnnnnnnnnnnnnnnnnnnnnnnnnnnnnnnnnnnnnnnnnnnnnnnnnnnnnnnnnnnnnnnnnnnnnnnnnnnnnnnnnnnnnnnnnnnnnnnnnnnnnnnnnnnnnnnnnnnnnnnnnnnnnnnnnnnnnnnnnnnnnnnnnnnnnnnnnnnnnnnnnnnnnnnnnnnnnnnnnnnnnnnnnnnnnnnnnnnnnnnnnnnnnnnnnnnnnnnnnnnnnnnnnnnnnnnnnnnnnnnnnnnnnnnnnnnnnnnnnnnnnnnnnnnnnnnnnnnnnnnnnnnnnnnnnnnnnnnnnnnnnnnnnnnnnnnnnnnnnnnnnnnnnnnnnnnnnnnnnnnnnnnnnnnnnnnnnnnnnnnnnnnnnnnnnnnnnnnnnnnnnnnnnnnnnnnnnnnnnnnnnnnnnnnnnnnnnnnnnnnnnnnnnnnnnnnnnnnnnnnnnnnnnnnnnnnnnnnnnnnnnnnnnnnnnnnnnnnnnnnnnnnnnnnnnnnnnnnnnnnnnnnnnnnnnnnnnnnnnnnnnnnnnnnnnnnnnnnnnnnnnnnnnnnnnnnnnnnnnnnnnnnnnnnnnnnnnnnnnnnnnnnnnnnnnnnnnnnnnnnnnnnnnnnnnnnnnnnnnnnnnnnnnnnnnnnnnnnnnnnnnnnnnnnnnnnnnnnnnnnnnnnnnnnnnnnnnnnnnnnnnnnnnnnnnnnnnnnnnnnnnnnnnnnnnnnnnnnnnnnnnnnnnnnnnnnnnnnnnnnnnnnnnnnnnnnnnnnnnnnnnnnnnnnnnnnnnnnnnnnnnnnnnnnnnnnnnnnnnnnnnnnnnnnnnnnnnnnnnnnnnnnnnnnnnnnnnnnnnnnnnnnnnnnnnnnnnnnnnnnnnnnnnnnnnnnnnnnnnnnnnnnnnnnnnnnnnnnnnnnnnnnnnnnnnnnnnnnnnnnnnnnnnnnnnnnnnnnnnnnnnnnnnnnnnnnnnnnnnnnnnnnnnnnnnnnnnnnnnnnnnnnnnnnnnnnnnnnnnnnnnnnnnnnnnnnnnnnnnnnnnnnnnnnnnnnnnnnnnnnnnnnnnnnnnnnnnnnnnnnnnnnnnnnnnnnnnnnnnnnnnnnnnnnnnnnnnnnnnnnnnnnnnnnnnnnnnnnnnnnnnnnnnnnnnnnnnnnnnnnnnnnnnnnnnnnnnnnnnnnnnnnnnnnnnnnnnnnnnnnnnnnnnnnnnnnnnnnnnnnnnnnnnnnnnnnnnnnnnnnnnnnnnnnnnnnnnnnnnnnnnnnnnnnnnnnnnnnnnctcgcgccccctgtgttttgaggtttgtgcctgcatttcttttctcatttggccacttacctcctcacttactgtgcattttggctgtgtgggtccctgggctgggctgggctgtccctgagggctcattgtggaggtggggagatgggcatgtagattccttttctatccttgtgtgataaattacacaaacttggtggctggaagaacacaaacttattccctcacagttctggaggcccgaagttcataatcaatattaagtatgattgggctgaaatcaagatgttggcagggtgtgctccctctggagtgtcaaggggagaatccttcctgccctcttctggcttttggtgacagccagcattcctgacttgtggctgcatctctccagccctccaagccagcatcttcacaccaccttcactgtttgtcacatctctgcgccttccctttgtttctttctttctttttttttttttttttgtagagatggggttttgccatgttgcccaggctggtctcgaactcctgggctcaagagatccgcccgcctcagcatcccagagtgctgggatacaggcgtgagccaccacacccagccttggctttctttctatgaggctgcacgtgactgcatttagtgtaatataggatcatctccttatctcagaatccttagttatgtctgcagagacccttggttttgaccctgtaaggtaacattcacaggtttcaggaattagaacatgggtatattttggggggcattttcctgcctgccacagggacacaggcaggttgtagaagctgggaaacatggaggaaactggattcccctccagcctccagaaagaagtgcggctccgccaacatcttgacttcagcccagcgaggcctttttcagacttccgactcgcaggactgtgtgatgtgaaatgtgtgtgtcttgagccaccaagcttgtggtgatttgtcacagcagtgataggaaaccaatggagacacccagctagggtctgggagcaggccccaggccccagagcagagtgccaggttgggggtgtcttctctgacccatttgtggctctgctgttctcaggagaggttcacctgccccagcctcgccttgcacccgagagagcccgtrttcctggcacagaccaatggcaactacctggcccttttctccactgtgtggccctaccggatgagcagacggcggcgctatgaagggcacaaggtacttctgtcctygtcccccaggcgaatgctgagccccagccccaagcctcctggcagtcctggacatgggccctggggtgcatggagcctctgtctgggtggatcctgctttctgtttcctgggtgagcgcatgccatgtggctcactgtctcttcaagtccctgaaccacatctggtcctcaccccaggccccacgtactgggcaggaagcagtagttggctcacacagacaggtctcagaagtsgggggcaggaacaggacaaaatggtcatgggtgtcatttctgcatccttccctttcctcactgaggccaagccttgctggggtggaaggggctgggtgcttagtgactgtcactgaggccagacccctcagctgggctggagctggtcccgctggatctgctgaactggccttgggatgtgggcccgcatcagggctctacagcctcatgggcgggacctgggctttggcctcagggacacgaggtgcgaagcccagctctgctccgtcagctcggggcttcagcctgctcctctgtagaatgggcatactcaccccggcttgacaggtgcggcttgctcacccactgtgtccctctctgcaggtggagggctactcagtgggctgcgagtgctccccaggcggtgacttgctggtgacgggcagcgccgatggccgggtcctgatgtacagcttccgcacagccagccgagcatgcacactgcaggggcacacacaggcctgtgtcggcaccacctaycaccccgtgctgccctccgtcctcgccacctgctcctggggaggggacatgaagatctggcactgagctttttgtcactgaaccttcccratgccagctgggctcttggactcccctcttcctcaagggtagatgagaggaacgagcacagaggttggctgtgggtcctgggtaccaccttytgagcctcagtttcctcatctgtaaagtggggagaaaagtctgtttgcctcaggagtgtgaggactacactagtgaaagcgcctggcgggcagccggcgatscccaataaatgtgtgttttgctgtttgttaagtgatttcagcaacaagtgtgcattagcagcttcttctcgccctccctcctcccaagcctgctggacctctggagactgagagaactgtgcgagcttgagatggggtcagccccgctctgcgggtcccagcaagggagtcctgaagtgggggtggtctgggtctttggtctgccctcagggattctgttggagctcagcgccccaccagcctcacaggccccagccgcttgcactccccaggactgtggccagctgggcccctggttggcccaagccttgggccccttgggcagcccttgccccgccagtgtgcatgctgcccatgcaggtgtgcccgcctggtgagggagccgcgtggagaagtgagggacccttgaggagcctggaggagctgggctgggaggaggcctggctcctcaggtgcctgtacaggctgattagatggaacccccaccagaattgtaactgaggggctactccaggagcccagggatctgctgacaggcgagggtggggcccactggtaccttggaaggcttcctggaggaggcagacctcaacttggtgaagacagtgtccctggcaggggagtcagtggagaagggcagagaatgtgaggaggctgcccatgggccaaagcagtgggggacgcaggaggaggtgggcacttggctccccctccccactattctgtccctgctccactgtcgctgtagctgaggcgaggcaaggcaccactcctctcccaggttcatctctgcatctataaagccaggcattggaagagccagcctgtaggctcacagctagggtcagagaaggtcaagtctgtgggggtgtcctggagggggctggagctggcctggggctggtgggtgaagacctgtgtatcagtgtgtccagggggtcactgggatccctgggctccgtgggaggggtatcccagacagagggaggagctgtgcaaaggccccaaggtggggcttctgagggctgagtcttcctgccccacagtcactgcagagcctgacacatggcaggcatctggtctacagcacctactgtgtgcctgtctgtgggtggggaagctggagttgagcactgagggtgctgagtgcacggccccagtgtccccctactgtgtcctgaggacagggtgagtgggatcccctggcccatgtgggggcagggtcctcatgacccacagtgggagcaccttctatgtatttcttttaggctcaagaatggctgttttggtgaaaagagttgcaccccgtgctcggcgagcttggtcactgtcgaaagtgaagattgccactggcctgagcaaggcggttgggggtggtggtactgaggctggtgcgggagatgggcagcccccaccctctgccccatgtggctgctggggcctccctctcgtcacgcctctggcctttgccctttctcctcctgttctgacaggggagctcctatgacctctggggcccaccccatcacccccacccagcaggctgatggtgcctcagggcctttgcgcccaccatccccctcctgcagcctccttccctcagggcttgcttggatagtatcttcgtggaagctcctgtcaccctcagccccctttccccacagatcccccggccccaccgatgccccacacctgcatttgtggtggagcacatgccccaggctggggttcctgctccctgctggtgcctggccccggcacagagtgggccttccacaagtgactgcaggcgtggcctggtgaccagatgtgggcctgtctgtgtccttcattgctgtgtgactttgggcaagctgcctagctcccagttcctcagtttctccttctgtgaaacaagaacacataatgcccatctcgtggggatcatgaggctgggtgtgtgtgtctcccggtagggcccgtgtgtcataggcactcaggaagtggtgctgggacttagtgtcaggctgaccacttgatgcaggagctgagccagtttagagcagagtgcgaatgtggctcccttctcagacctcgcctcagtgggccatgggatggtgggccttgctcctacccttgctgtccctgtcactctctgggcattggccttttccaggttcaatctcacggcagaagccaccagctggggctgccgccctcattcattcccactggacaagtccagaactcagattgactgacttctgtcacacgcatgctccacacccaggctccttgggcaggtgtggtgggaactgtgatttgtagcagggaaagtaatctcctccccaagtgcaggaccctcctacaagtattttcacgagggtgtgtctccccagctccaggcctgagcaggcctcagcacatgtttgtggaatgaatggatgctgtgcgaatgaacccagacacatgggggagggaaagctgcagtggtcggggtggagggaggcccgggcttctcaggccgtttcttatttgcctttcccatccccacacctcactgccagccccagaccttggagtccagatgctctgcttcctgacccagtacaaaccccagtggttttccaccttcctgatggtgattttgtgatggagaatttcattgcagcgtttgctgattgttccctaccgtgtgatatgttcgtgttaccactgatttaacatgaccatcagtcacagatgacactgtgtcaggcttctgagggctgggatatagctgttgaaaggcttcctgtctgcctgggctcctggccccactcctgtgctgggcacacatcactgcctgccacctgtgggactcggagccaggagaccagctcatgtcccagggccatttcctgctggtctgaggcctttgcaggggccttgcttctctgagctttgttttctcatctgtaaagtgggcctgtggggataaggagagacgaggcaaaggaaaggactttgcagattgtcacccaacttcacttgggacaaacgccatccacttctgtgcgcctgaagtccatttattttcaagttggtggccttgaaccaacccaaagctctgacccttctggggcgggggggccacccagggctccacagaaaacccactgtggcggttacttagctccaccctctgtgggtttgatttctcaacacaggcgcctgtgggagccagctggctgccagccccttccctttttaggtcattttattgggaagaatagcaggtgtgcaccatgcttttatctatttctttttccaaacactttcttccaaagaacattcttaaagactgactttgatccttggcaaggtgtcagggagttcaccgtttgcagttttaaaataagaaagctaaatttagaaaatgtggagcaggaatgaaaaaggagtatggtctcttccctccacccaccttcctggggctgagtgttcaccttcatcctctcctagaaaatctgggatgccagatccgaagccatcgtggagaaaaacggcttcacctccagatgctgtgcaggctgtgtgtgctggctgcagtgctgtgtgccgggcgtggccgtggcttttttctgagtgcagctgatgctcgcagcttctgacagggtgtccatgatccccactgtccagcagaggaaactgctgccctgagggcagggagccatgcccaaggccctctgaccccaagcctgagctctttttgcacctgggatcccttcccaaatggcctcccgtaggcgccacctccacctcactttggctgtctgtacagtgggagacccagctgcctagagggtccctggaaattgcattgatgaatgtcctcaggctccagcaagggaagctggccagggggcctgggtcttgcccaaggtgacactgtcaactggtggcagagcccaaccctgcgctgccctgccgagagctgaggagaaacatacatggatgtgtgggcgggtggcggatgtgcagacagggcctccctgacggcaaggcaggatctcagtgcagggagagggcaggggtggagcagggaaccctgtgccaaggccggctgcctgggtagatggggactgtccaggacttcccgttcagctgtggggacagtccaagtgcagaaggtcgaagggcagatccagagggaaactgccagctccagagctcagccccttgggagccccacaggagcactgaacagtttctagaactctccagctgtcacagatctgtgccttttcatggctgtgttccatttgcctaaaatacctgttgaactcctattcatccttcaacacccattgtgatcctctcctctgacccctttcattcgtcctcctggagcagtgagggccctcccctctgagaggcccacaggccctgtgttctggaagccctgagctgagtgttacactgtctgccttcctcccccacctctgagttccttgtgggcagggccaggtccccgaggccagcatgaggctgccagctgacaacagcaccagggaaaggaggggggcaccgagacccagcccaagggatcccgcgagagaagagtcactggtcagagccacaggtgctcctaagtctcagggccctgctgagccagctttgagccatgagaattggggatagtgaaccaaggttccccagcctcagcaccacaaggagcagtgtcctgactgccgtgcacagcaggcaggcccccaccccgggggtgtcagcctgaccctgccgctgcaagccatgtggaccctctccttcctcttctctcctgcgcctgaaggctgcctggctctgcagccaaagtcaccgtccctacccagtcctaggcagggacctaatggtcctggctgctccgggaacaagacaccttggaggcccggctgtggcaggcattgcagcccaggcaggagagccctgtgaggtgtggaggccatcttgggggccgcaggctctgaggtggcaatttggggccaacaccctgggtctggcccccccagatctgggccaaggctgccgcccagggcaggtatgtctgattcagtagcccccaggagtgagacctgggtggggcctttgtcacctagaagtggcagagccagggcgcccctctttttggcctcagctttcccacgtctgggtgacagaaatctcacagttgacactggggtagctgaagcttgggttcccctctgggaatgcctctgcccaccgggtgccagttatttctctctcccaccctcttggctgcccccagctcagtgagggctgtagcccctgttctgcccacaggccccagagaggagaacagaatcccaaacctctccaagcttcccccggctcagggaggctgcttcctgggacggcagctatggctggagaagacacagcctggctggctctggcttcttctgcagaggaagggggagggcagggatgcagggagccacggctgatgcccactctccttggagtggtctgaccataggcagagccacgctagagctacacacaaagccaggcatgccagggaacctccagacacgaacctgggtgaggtgctccccactgggacatgccccaggcacctacagggacagctataaaggccctcttagggaggggcctccatcctcagccttgaacccacacatgcacctcttcaagggcagggatgagcatgtgtccaagatgagcaggcgtccagagaaacagggccgccggagcgggaaccacgaggaggcctgcacagaccacatggtccggtcccagaccagcttgtgaaatggttgtgcccactgttttgatagaaataagagatgagctggaaaatatctccagggaatgggaagctaagaaagtggcactgtggatttgtaaaacaaccaagtagaacctccagaaatgaaaaacatgaataactgaaatgaaaacctcagcggctgtgtgtggcggctgaatagacataggagggaattagtgagttggaagacagatgatgtgca

SEQ ID NO: 96700 - DNA, 201452 bp, Homo sapiens
  misc_feature (1)...(201452): n = A,T,C or G
cagtgtaatttatttatgttgataatagatatcaaagactagacattgaaggtggaaataacaagatgataaaattctttcaaatccctggtcttggaagaatatccctgtgatacatttagcagttcagcagctttaaggcagacatttctatagctctaattgcagccattttagttcctaacaaacaggtccagcccaggcccccaatctgcatcagttacttctggaaaaggagtcaggatctgcttcttggagggtagagtcacacacatacaaatgcacacgtgaatctctccatggcgtttagtctagttctgtggttctcaaccatcccctcccaacgaacccaaccccagtgcagttttacactcctcccactggactccaccctcaccctgtacacaccggatatttggcaatgcctggagatacttttggttgtcacaactgttggggagctgctactggcctctagaggccaaggatgctgctaaaagtcctacaatgccccctacaacaaaaaaattacgtggcccaaaatgtcaatagtgctgaggttgaggagccttggtctagtgaatgctgttaaacacacacacaactgaaattacttaggattgaattgaccttggagattatggcaaagtaatgaaattgaaggtattctctagagtggactgtttatctaccaatatacatttacaagttatatctgacccatttccaattatgattttggcttaccacaaatgcacacacaagacagttacagtgaagatttttcaaaaagatcagaaaccatcgagacagtggggagaaagaaagtacattcaacttctgctagtcactggggattttctgtcataattctttaaaaatcacattgatatgtcttctctacttacttaagcactttgttggtacaagccaggttttcatttattccagcccaataagaattagaaaaagaagacttgatgaattctaatatttaccttcctgcctcagtgaagaaatagaactcccaggttttcagacagagttcaaatcttctttgggctgaccttttaagagataatgaggttacttttcagcctggagcagaaaacaggacagtggttgagtgaagtgggaagggtggccgggttggatgagaaagccatcaatcagtcctttccagggggggtttcattgctttatttgaaatactgtcaagttccagaacatcagagaaaatcatatacatgtacaaaaataccttaatatccatgggtgtggttatgtgctgtgctagtataaaactgtaaaataagaaaaattcattctctattatagtatataaggactctataataatataatatgtaatgcctattaccttttttctatatttacagtgtatctgcattagactaatagtgcaaataggaaggaagctattttactattttgagtggcattttacattgtcccatagaaccccaatattaatattaattaaatcctttttttttttttttttggagatggagtctcgctctgttgcccaggctgtagtgcagtggcgcaatctcagctcactgcaacttctgcctcctgggttccagcgattttcttgcctcagcctcccgagtagttgggaccacaggtgcctgctgctacacccgactaattttttgtattttagtagagatggggtttcaccatgttgcccaggctggtcttgaactcccaagctcaggcaatttgcccgcctcagcctccaagtgctaggattacaggcgtgagccaccgcgcccggcctaattaaatactttttattgaacaaaagttatttagattcctacctcatatctcgcaccaaaaaaaattttaaagataaatgtagcaaagtaaatggaaaaaatagaaaccataaaaatacaagaagaaaattgtaagtagttttctaatcttggagtttggataacttcttgaagcatagaacaggaggcaggaatatgtaagaaaatactaatttgagtacttttacaaaaatttaaaactgcacatttgatatttaataacattcaagatttgggttttaacctttgttcagcagtttttgttttttcgttttgaggcagggtctcgttctgttgtccaggctggagtgcagtggtccaattgtggctcactgcagtagcctttaacactttggttcaagtgatcctcccacctcagctccccactagtagcttggatggggtcttgctatgttgcccagactggtgttgaattcctgacctcaggtgatcttcctgcctctgtctcccaaagtactaggattataggcctgagccactgcgcctggactgttcaacagggttttgatggcaattaaatgggttggaagggtaactaggtggcaggagagcaaattttaagttattgtgcacctgctatgattatgtcattcatgtctaaaagttgaatgtctcaaagcagcttttgacagtaaactttcaatttctagcttatttctggaatttccgctaacatactaattgttatcttttttcctttaacacttaagccatttagcccttacaacaatctcacaaggtattatctttatgtttaaggaacaccagggttcagaaagcctaggtattttgtataaggccacagagctagtgtgtgcccacagagtgcctgtgtcaagcacacagagatgctgagagcttgagaaagacccaccaaagcttataatgccaacctcacaatcttcaatcaacacgagagtccctgaatcccacatgcacatctgcaccatcaaaatactgggatgccacctgttcaccttcttgagttatgttaactaagaaaatgaatttaagggcacagtgaaaatgcattatacagttctatgtgccaggactgtgctaagcacgttacatgaattattttattcagtcttctcgagagccctacttagtagggtttttgttgttgtttttgagacagggcctcactctgtcacccagctggagtgcagtggagcaatctcagcttactgcagcctcaaccccttgggctcaagtgatcctcccacatcagtctccagagtagcagggactacaggtgcgtggcaccatgcccagctaatttttgcacattttgtagagatagggtttcaccatgttgaccaggctggtcttgaacacctgagctcaagggatccgccagcctcggtctcccgaagtgctgggattacaggcatgcaacaccttgcccggggctggaagtaggtattctaagctgcaatttacaagataggaaaactgaggctgttaacagagattaagcagcctgccccaaagtgccttagttgaaggagcaatacttccagagtattttttttccattaagtttggtagttacaggagtgttagacactcttatattcagctaaaaatattttaattaaatatctagacaatgactttgcataacattgatttttggttgctaccacacatcttaataaccaagcaccctttggtacaagttcagtggttagtccaccttaagtctttttttatagcaaggattggtaaatgacagcccgtgggccccatccagctcactgcctggttttgtgaagtccccaaactgggaatgtggtgctttttaaaaaatttttcttaatgactgaaaaaaatcaaaagaatatttcaagacatgtgaaaagtacattaaatccaaatgtcaaggcctataaatacaaattgtattagaacatagccagattcattcatttacatgttgtcgtatagatgcttttgggttataacagcatagagtggagaagttgtgacagggactgtatgggatgcaaaatctacgatatttactatctgggcttttacagaaaaagtttgctaaccccagttctatagcatgatacaattagaggttctggatttttttctatgaaattccaaaaaaaattttaccttctttttccagaaagaacaccaaagcagtcttcctatgaaaaaaggttgatagcctgggatgatttgaaatcacaccattaggttatagttccagtgactggccagtgggtccagcttgaaagaccccctccctcattttaaatacattacagttagctctagatggtaaagctgggtcttactacccaacctgtcctcccgttattcatcttgactgcgttatgggtttagtttcacaacattatgagttcatctaggcttcttgaatcatttataggaattttcattttcactctcaaactcttacactttcgctgctgtgaattttttttaacataaagctcagactactaaatggcctacacatgtaccataaagtccatattttattttttaagaaatcagaatttttaaaaattgctttttcttgagaaactaaacttaattttgcaggtcacgaaagtaaaaaaataccttcatatccaatgatctcaaagcacctcttgtgaaaatacataacaaggtaatagaaatattatttaatggaaaagatgtgactagtaaagtccaaggctatttctggttctgcgaatgactcactttgactttgggcaaatcatctcaccactgttgctctttatctgcaaaaactggacttcatgcctatgggagttgcatggctaatcaatgcctggaaaatgcgtagtggcagttgctacaaaagtgctgagctttaaaaacaaaacccccccacccccccatttgtattcagttgaggttggggtttattgttatttaacattcgaaggccaacactatgttaagtccagagtgctgcacagatcagataatatcactgtccagtagggattttttttaatctaagattttttacttttaaaaaatttattgtggttgggggtttagaatccggtaatacatccatacaaaaacgttaagcttcaagttgaaaactatcgattcgaaaatctaaataaaccccctccaaaaaaaaaaaaaaaggccctcccccgccccgccaagaaatctctcaaaacaagaattcttctgatgtttttctcctccctgcaattctccatgttacagtccttggaggtagaataggcataaaatactttcactaataaaatatgacaaaccgccggattatacgtggccgattcccagtgattgccctgctacacaaagcagaaaagtaaatgccatcatcccccttagaacaaaagaacttaggaataaaaaacatggagaggggggagaaagcagcaataaataaaggtgagcgaaggcccccgtcccccgcccctcccgggagcgagtgctggactaagtactgctaataaagtggttcaagggtagttatttggaaagggggcggggtggcgaggggagggagcgggcgagcggcggccggggattgcatgttgcattcgacttgaggttgcatctttctcctgttgcctggaccacgctcccccattgcagtgcttccccatcacttctcctcgctcctgcccctcacggctttcccccccccccttcaaactgctgttgcactggagggagttggggccgctctggagcccctttgcagctcccgccggcgggaggggggagttgggctcgggccgcggagttggggggggccgccgcgggctccggcctcgcctcggctgcggctgcacgggagccgagctgcggcgctgcacgggccccggagtttggctgccttcgccgccgctcggtgctcggccccatcaccgccgccgccgccgccgctgcactggagtttggctgccgctgccctacttcactctagtttagtttcactcactttacatccgggttttttccctaggcaatgggtgccgcagcacaccccgttccttaggcaaagtgaaataaattcgccgcaccgacacgtcaagtagtccgcccgcccgagcgccgccgcgggcccccgtcgccccccccgccgacgccccaccgcccccggtggggggacccgagcgtcccgggagccgcgggccgaggcgcgggggcccgggccggccgccgtaccactccgcccggcggccccctccctccccgccgcggcccgctctcccccggcgcctcctctcccctcgccctcgtccccgctttcccagccccagtccctctcgcccggctctcgggagcggcgggggcgcgcacggcggcggcggcggcgggccggcggggccgcgcggcgggctcccgcgcgggcgagtgtgtctgggcctgggcggagggatccccgggctgaggcggcggaggtgctgcggcccggggccgggtggtgaatgggctggtggtgctcgctgctgctgctgagaggaggaggaggatgaagagttgggcttgtttgtctcctacagtttctctcctgctgctctgattcccccctcccgattccggcccggggcctgtgtgtgtccctcctggaggaggaggaggatccagttcctccccccaaccccctcctccccacccccccttgcctggggaagaggaggaaagaaacagcccagagagagagagagagagagagtgagtgagagagagaggagaggagaggaggaggaggaggagggagaagggaacaacctaccatcttaacacactaatatctaaaaagtgcgagaggcccagagcagcagcagaagcagcagcagcagctccagcttcttccctccctccccatgaagaagagttccctcctcctcctcctcctgcttctcctgctcagagttcctgcctccagctgccaggggggacagccagccagcagcaggagggtgcagtatcccagcttttccattctctcttcttctcactctcctctctctctttttttctggagtagctctatttcccctccctcccccttccccctctgcctctctcctctctccctctgtcttgtcgctggtgtttgtctctgggaggatcaggggctgcctgcttggagtttgttgtggggggaggtagggggaggggaggggtgtgtgggagggaggagggaaaggggggtgttctcgtcaggacccctcagtcaacttgagatttgagcaataacttccccttcggccgcccccctgcgtgcccttcccatacctcccccccgaaaaaaaagacaatgggaaaaccttggctcccccccctcccctctgccctccacccctccccaggataaattggaagtaagtttatgagcagcctcggaagcctgggccagagnnnnnnnnnnnnnnnnnnnnnnnnnnnnnnnnnnnnnnnnnnnnnnnnnnnnnnnnnnnnnnnnnnnnnnnnnnnnnnnnnnnnnnnnnnnnnnnnnnnnnnnnnnnnnnnnnnnnnnnnnnnnnnnnnnnnnnnnnnnnnnnnnnnnnnnnnnnnnnnnnnnnnnnnnnnnnnnnnnnnnnnnnnnnnnnnnnnnnnnnnnnnnnnnnnnnnnnnnnnnnnnnnnnnnnnnnnnnnnnnnnnnngaggggccgcggccgcccctcccccatgcccgcgcccccgccggggggaggggcgcgcggagtgggactctttccgtttggtccagccccgtcgtgcacgcagttcccaacacttctcgtcatcctctctttggtctctttattctgctgagcggtgctgttaggatttctttttttttttttttcccctgaccacgttcgcgatggtgggtagcagcaaggtggccctggtaggggaggggttggtatcgagattgggcaccggaggagaacgccttctttcaactttgtctgtggcttgcacccccggagaaggccacaggccggttgtcgggtgcagatgtgccgagagtgatttctaagtagttgagttgttgtgatgagggtacgactgctaatggtcggcaggttttgttttcattggtgaatctggtgtcatcatattccggtcatatgttgaaatattctttgtttaggtctggaagtagaggatctcactctgcacgtccacattgtgttgtttttaaaatgatgtctctgggagtmtggatttctagamtttcaaatctgagtgaaggtccgggcatgtgtgggcctcatcacctggccttgacagtgaactttgtggctgtgtttcagatttcaaagatttgccccatagctggggaaggagttgtgcatttttgctaatagtcggtgtcaggaatgtagatgctcgagctgggaaagttagagagggaagaacatttatatataaataatggatagttgaatattagaatcagattaatttgggctgatgaaagtttttttttttttaaagcagttgtgcactctgggaaggaagtcttttcacaggttcacttgatagggattctttaaggcgaggggctggaattatctcctttttgagcgagttctcaccaacatctgtagctttattgagggcctggtaagggtactgaaattgaggctaaaccatgtaagcgtacttttcagtgtttatgatatttgtttacatctggtgttcactctaagcaatagaaataaataggtcagctttgcttttggtctttgaagactggccccctccttccttttttaagtttcacaatttatttggtttacagcattgttggaaactgttactacatttttactggaaatactattattcattttaattttggtaagttccttcttattctcttcttctgtctttacttgtttatggaatcggtgttgtgggcttaaaactagtttattttagggggtcattaaaaatgtctgaaaaatacattttcaaatcccaggacctatcttttcatggcaaagaggaaattttgtgtacagttatgctaatgtttataaaaaaatttctgtacttaaaacgtttgtagatgtacaactatccttaagtgaagagcatagtaatagtgcacaaagttctcaaaacacaaacatctggctaacatgttacgaatattccaggggctttttttttttttttttaacatcagacttttgcttttggtaacataatagtatttacagtttgactgacattgcttggctgcccataataaagtgttttgcttgggtgctattgaatgctttttaacttagtttttagacaattttgcaggctttatttaagcatgttgtattttggactgaggcaagtctttgtggaactggagtagtaatagatgaaaaagacacctacctgggctaaattgtatttttagaaggtataagtgatggatggggcctatttcttttagctttgaagggtccatcctttttcctattcagtcttctggaaggagctgcctctgaaatactcttcttctgcttacatgaagatctctaaatgctatccagcaggaggtgctacagcaagataaaggaaatttttgaattttgagggtcttgctacttattacagctctgcttagcttcagctaagcaacaggattaacaccttaaagttccagaaagattttgagtaagtccatttaaaaattccattcataaataatgtttgctacttgaaagtgaagtctttgactgtacaaagtagatgtgcgattgcggatagtataaggattctggcccttggtacagagcactgtttagaattattttatttggaaggggaattagtcttgtgttgatgagtgggatgttgagcaygtattttaaaaaattatttgtaattgttataaacaaaagtagttggtatgatttagggctttaagccttgttatcatccctataatattaatacaaataggatatagagtagttgagattttggaaaggggtatagtgtgttgaaaaaattttagacttcttgtagttttttcccctcggatttacagactatgattctaatatagatcaatttttaggcactcggctttataaatacatatggttgatgtacttaagttagcctgcaaagactgagattcttgaactgtaagtcaagttgtatcagtggtaggtcattgttgatgtaacagtaactgcataaagatgaatatagctactttaacagtttcatagcatttatagcacatggtcctttgaaactctgttagtgttaggtgaattgattatcactgaaaatatcatgccactgtggttgcttgtaaagttttgtgtcgaagttttaaaaatttggggatgctagaaagtttgataaatctgctttgaattttgtctattttgtaggcaaaatactgttttctcagtaagaccaaatgagataatacatataaaagttcttcataaatggtaagaaagcatgcagatattaagttgttgagataggtaactaattaatacatggacagaagcttctgtctttaaatgctaactttttccatatcagttgagaaagtaatacatttaaagtgcaccctggacactatagtttttttatttttttattttttgagacggagtctcgctctgtttcccaggctggagtgcaacggcgtgatctcggctcactgcaacctctgcctcccaggttcaagcgattctcctgcctctcagcctcctgagtagctgtgattatagaggtgtccgccactacgcccggctaagttttgtattttgagtagagacggggtatcaccatgttggtcaggctggtcttgaactcctgactcaggtgatccacctgccttggcctcccaaagtgctgggattataggcgtgagccaccacgcccggcctaaatttttgttttttaaatactgctgtggttaccaaaaatgtctttgttatagttttgaagctgcttttgaaaaaatgctgcctagtcagtttctcataatttaaaaaaaaaaaaaagatcattttcccttttgaagatcctgtgaattgtatgtcccctattacagtttttcttcatttctccattgatgtgatgtgatagtagttgattttagtgagtatgtaagttccctgattcttctatagactcttattgacagagtaacagatgtcatggttcaagttttgaatgttttgactgactctgctaactttctgaaaaattcttactgcctaaagctttcaagcttgtttcacagtgaaaaagatgtatatctgtatgtgttagtattaggtatatatggatatatcatttttgtttttctattttagaaggatgcacaaggaaatgactactcaaatctagaggagtgcactgaaatatttttgtgtaaaaataacccaaaagtttaaagccttgagtttcagctttcttataaactctgctcacaaatttggaatagaaacattttaaagtaaaatatagataattaggaaccctgtgtttatgagcctatcaaaaggtatagtatcttaaattttagaagtgactattcttttgaaattgccccctttagaaagtaaatatagaaacttgcttctgtgaacggtgagaaaaacacttaactgtttagataaaaatgaaacctctcagggtgttattaactttttcatcctacagacagtgaatagtaaagctttctgtgaagwcatactgaagttaagcttatattaatgtgcttttaaattttgtatccttagtattttattgctgaaggcttttgtatttaattactattcaaacagagaagggaaggaattaaagttttaggtctctgacctttaatggaattcttttatatctatatctagaactgatttcttgaaacatgtttgaattttcatattattttgtgctgggaaatattaatgatttatgttgacttctcaggagcttttgtacatgggctttttttataggcctaagaattctttaacgttttgatcacattaattttctcaggtgtatgtttttgctgctttgcgattttttaaaaaagagataatatgttaacrttgcattgaatttattgtagataattatttcttaaatagcttatgttttctactttgtatgtttgtgtgtatatgtggccatactattttgtaggctttcgtataattcttatatgtgtgttaaatttttgaatagttatcttttgtaaaaatgttgaagtagactttatgaataacttttctattacttgtccctcaattcagtcttaaaattatggtgaactcttccaaagcttttagaaattatatgtgaggttcagccatcctttggactcttctaaagcaactttcttacactagacttgtgtggcaatttgaatactcctccacttctccctttcagtaccctgcaagtctctcccctctccctgccttaaaaaaaaagtaaataaaaaagactttggtgaaaatatctcagttgaaggcaactattcttttctatactttggaatcagttacagaaatgttttctgccttttctaagtagtcaagaaagtgaaccagtatggaggggataggaaggggatgaggcctaacaggttgatgatctaggctttattttgactctgtttgtgggcctaggggaaaaataacttaaacacagaagccaaaaagatgggttttgttttattgttttggctgcattgagaatacaaactgtcagtacttgaggagaaggagcagcagaaaggaattgattttttttctgctgcagatccaagtattgttaaccatgtgcatctccaaagcgacatacttacaaatcaaacagtagttgattatttcactcaattaacagtcagaaccctaaattgtgtgtgttttttttaaattttaaataagtacccaaaactttggggtaatgacagtaatttcctgataaaagtgggtatagtaaccatggcaactgctatctctggccttatggacagtatgttgtattgacgaagcttcaaatcctttatagtagcccgtcacttttatggtgaaatgtagtagcatgtgttgcagatgatttttagctggattgcgttaaatttgtgtgccagcttatctttccttgttaggaatttcttggactatattccaaaacatgtttgtgaaggtgctgttgcctgaaaataacccaccacctgtgttaggcctcctgatgcagattgcacttagttctttcccagcctccttccacagacttgcagaaaataggagggtgtgtagcaactgtatatatgtaaattctagctcaaacttatcagcttgtgtttggacgtgttactgatagcttaaaaaatcttttgtgttttcagaagaggtcagtggatgagagaagtgggcttgtagttggaatactgtttttctaagtgttctttgtagaagcgtgtgtgtgtggggatgtgtgcrtgtgtgtgtgtgtgtgtagggaattagaggtgaggaatggagggcataaatattgagtaaggacttgacaaaagcagaacttcagtgttttttgtttgtttttgtgatggggtgtgtgcgtattactataaaaattatttcctggtgggcaatattagaatatggggaatgtttgcttctgagaattttcttcaagaaaaattatttataaaatacatcttgaataattgttaaaaagcaacctgttaaaacaattaaactttttttttttttttttttgagaatgaatctcacactgtcaccaggctggagtgcagtggtgcgatattagctcactgcagcctccacctcccaggttcaagcaattctcctgtctcagcctcctgagtagctgggactacaggcgtgcgccaccacgcccaactaatttttgtatttttagtagagatggtttcaccatgttggccaggatggtctcgatctcttgatctcgtaattcacccgcctcagcctcctaaagtgttgggattacaggcgtgagccaccgcgcccggccaaaacaattaaactttttgtgggggaggattagagaatgttgaaatggatccattcaaactttaaaaaactatttcaaaaattatattttttattcatcaagtttttttgctttttcagcatttttttctgtgcttctcctacgtaagatttttctaatgtgaaaatgttggtctaaatattgatactttttccggtatgtgctagagaaactgtgtgccacatcagagaacatacaaatttgatttaaatttgattagactctgataataagatatagtcaaattgtgctagatagttcagactttcttgaaacttgctgtgataacgtggtttacttactacaagtcccagtatgcattgcagtttttgcttaacttcagattagagcactgcatgctgggacctgtagttgatttaaacagtayggaaaacccttccttcttgtctgctccattttattatacacagcttcccagccctctaagaactttctgctaagtagtttgattactaatattatgattattatgctgctcaaattctaaagtgagtcttcagaaacaacctagtgttttagtttaccttagattagtttattgtattttttatcagctactataaggtttacacacaaaataatatattgaaaacttgacttagcagatgtaaattatttttatgcatgtggcgatacaggtctctttataattatggcatcattcattgctagtgtgggcatgagaagcctcttattatcaagcctgatatatatgctgttcctttttttttaaaatggggatagttgttccgtaaggttggatggaaggttttctgtgccagtatttaatttcagagttctgtgattcttctgtaataattgtcaacatcttgaatatctgtacgctttaactggaattcctgaaaataaatgtggttttagtgtaaatttaatacttgaaaatgtagtctgaggcagagaaagaggtgaaatgtctttaataatttatttatatttttatttggaaagtttaaatttttttggtgaggattctactttaattttattaactaatatcagagggttgttacagggattaattgttaaaatctatgaccgtacctagcacggtgcttggcacataataagggctcagtaaacgtttagaattagcagcagcagcagtagtagtagttactgttattttaaaaaatagcacgcttcacatttttttcctctctttttacaatataatttgatcagaagctcaggctgttctaagaccttgagatttttggcttatggtaatgatgtgacaaattcctgagaatgtttttgctgtgtgtaaaatgtccttgcacctcagtttctccctaagtgatgtatgcccccaaaaggactatcacaccagtaactgaatattttgactagtattcagctctgcctgtctagtactcattgcatccataccacaagcctttggttgacttcagaaagttcaaaaggtaatgaaaatttattgtttacaatgtttgcactgttagaatatccaaactagttgattaaggaaaataagatgctgcaaaatgccccttttgttacagtrtatgtaaccttggaaaaattctgttgtgtttagaagcatgtaccaatctatcactgtagttcacagtgttacaggattgatgtattggaggccagtaaacagccccagaaagaaagtgtagtttcaraaaatcttaattctttacattaattttctcttttaggacactgacttcttttaggctcttgaacttgtatttttatttgcatggctggttccttttggctgtttgagaagggaaagggatgcctggggatattggaaaatgtaagtgtaagctgcaatgtatatgtcttagtttgaatgtatgcagaagcagggcagtgcctttcttacttgcttagccagtatcttattccagctttttctcttgcgaggagttcttacaatattgttgctgagggctaccatgtttatttaagaaaactctgcctttagttttatttatttatttatttatttatttgagacggagtcttgccatgttgcccaggctggatatggagtgcagtggcgcaatatcagctcactgcaacctctgcctcccaggatccagcagttctcatgcctcagcctctcgagcagctggaattacaggcatgcacctccatgcctggctaattgttatatttttagtagagatggggtttcaccatgttggccaggctggtctcttaactcttggcctcaagtgatctgcccacctcggcctcccaaagtgctgggattacaggcgtcagcacccgccctggcgccaagaaacaaattcttagcacttgtttacatagcgaactaatgtggtggtcctaacaagactcccatggcacctttggggggataataaaaataaaaatggactggcgcggtggctttgggagccaaaaatttaaataagcgctttgtgggtttaaaaattttattttnnnnnnnnnnnnnnnnnnnngtacaatatttgcagttgcgaggtggtccctgtggagtctcccaatatgagggtagggaatttctgatgttgtcaagtcgcccttttgtatcagggcccgaccgggggaataatttcatctgagtgcagagggcaagtcccattagtttaagttgttcacagagtccccggagcgttgtaaaggagtcccgtaaacagccccagtaatggacgtgtagcttttaacactaggaattttttcccttgacgagtccttgaagaacctgccttcacaccagaatatagatatttgtataaataataccacgcctgactcagtgcaatcggcgggaaggataccagcatccccgcccctcaatagttaaaaataaaaatttgttaatatggccaggcgcggtggctgacgcctgtaatcccagctctttggtaggctgaggcgggtggatcacctgaggtcaagagttcgagaccagcctggccaacatggcaaaacctcatctctactgaaaatagaaaattagctgggcgtggtggcaggtgcctgtaatcccagctactcgggaggctgaggcaggagaatcgcttgaacccagaaggcggaggttgcagtgagctgcggttgtgccattgcactccagcctgggagacagagcaagactctgtctcaaaaaaaaaaaaaaattgttaatatgtagattagacattaaatagattccttagatgtgtccaaaatgtatggaatctggtctgatatgcttctactttataagctgttttatttatatgacatcaatttgtcttttcaagacctaatattaaaatgaaataaattcagcagttacaaaggagttaatacaaagggctaaatataaggagaaaaatagtccctggtgttaatgggccaatatagaaaatatcaggtttgtaggaattctcattccatatttttatcattatatgtacccatgtgattactgaaatactaaagttggaaatcaggagaggaaataaggagagtaaaactgggcagccatgtagattcagtatagagacctttgacacacctaaattattgaacacagttttcttttttaatgaaatgccccaggccagtataaaggaaacagttgtgatgatgtcagaagacttggtcttaagtgtactcctgtcacgtagctgtacactcttgggaagttcatccttgctgggctttagtttacccagtggtaaaatggggataataataagggcctgcttcactatgatattaaaaggattagataagataatactcatgaatgtactttatattactaaagttgtgtatgtaaattgaatttttaatcagcaataaggggctgggttttaagatatttatctgtatcatgttaataatattaatattatacaattttaaataatgagttagaaccaaaaaattagtgatccaccctgctcccaatagaccagtactttttttttttttttttgacacggagtcttgccctgttgcccaggctggagtgcaggggggccatctcagctcactgcaaccactacctcctaggttcaagtgattctccttcctcagccttcccgagtagttgggactacaggcatgtgccaccacacccggctaatttttgtattttcagtagagacggtttcaccatgttgggtagactggtctctaactcctgatctcaagtgatccacctgcctcaccttcccaaagtgctgggattacaggcctaaaccaccacgcctggcccaatagacaaattcttgacatgtgtttacgtgtgtgtttatggtgtagttcttaacagtatacacattggtacatttgtgtgtatattataaatataaatgtactggtgtgtkgtcatgggaatgaaaaattttaattatgagcttttgtgttttaaaaattttattttactaactatacaaattttatttttatgtgttaatatacaaacttacataaatatatatatttgtgtttggagaagtgacatacacacattttggagaaatgacatagattttaaatgtttgacaagttgtgaacggtttttgtaccttaggtttatctgttgtcatcaataataaagagtgtttattatgtatagtgctaagcctttttacacataggatcttatttagttttaatcctcacagcaatattctgaggatttactattattatcctacctccattttacaaatgaggaagtagaggtttccctcggatcacataggtaacaaatgatacaacctggattcaagcccaggtttgattcctragcccttgctcttaaatgtccaaaatgctatactaaactatgtaattcccatagatacctagaaatgaattactaaagaagttttcaatttactgaaatggccacagctacagtgtatcgttttgaggctgtttcatgttgattttggttgggttaggttgagtagtttgaaaatagtaaacattggaatgggatggaaatgaagacatttgggacagtgcctgctttgtttatccttgtatatccattgccaagcatagtgcgtagcatggggtggggtctaatagctatttcttaaagtttggaagttgggcactttataaagcacagtgtaagttagtttaatactttttttagtaggtgcaaatggtttacattcactatttcagtcagtccttatataacgatcaacgttttagagtgttagataagtgtcctttcaagaaatattacaaaagctgtgcatctaagttagaaagtcattcyagcaatatagatacgtataaagtagaaaattagtcattccgttcccatcctacttttaaacttttcctgtgcatttacatatgtattatatatatatatatatatatatwcacacacacacatttttaaagaagtttaattataccataatactctcaaagtttacttttttccaggtgactatttaaaaaacttgtttatttttgaaaatagggctcatgtgggaagtgggagtaaggttggaggaagagaggtgggtaagatttatacattaagattccaaacctaatgccttagattgattgtacctcatgctttaggaaatggtcattgttattttttaaacttaaaaaaaaatcagtttaaaatgacaacattgttttctgtcctatataagtaatttaggaggcatcatttctgaattaaatgattctagtttattctagtagctacttataaagagagcaattgtgttttcaaataacatttaaaaaaactggtaatctctcttcttggttgttaggacacatttatttcacatttacaaagtaaataggcaagaattggggcaaacctgtaaaaaagaaaaaataaaaagtaggattttaaaaccaagataatacatgtaatattttaattaatagaaactcaaagtagtactgcttaatcagcgtaaagataccctacataggaattagtcctggtcttcacaacttcatgtgagtagtgtgggctgacctcatccccatcacctatccctactcactcaaccactaccaaatgctatgctgataactcagtattttttaacgcagttaaaaaaaaaaagtaagttatttgagtgctgttcattttttctggcattatatttagaaagacatactaaaggccttataatctacattaaatagaactcttgattccagctttgagagttttaacttgttgctgagattattagtgataattcactgttgtaatttttaaattaaaaaattttgttacacaggtaataaaaagttttcgttataaaagtttttaaaaaagcctttctaatcctagaatacactccttgcatctaaggtgctttatgcttctttagatccacgaagtgctaaagccttgcygtaaaattctaagaattggacctggtagaatgtagcagtttatttaaactatagagtastcarcgttttttaccagccaagtttagtttttctcattggtagcattcataaatatgcttttccttttgagtggctcagaccatgtcctacagagtattttattcttgttcattctagtctaatagtgtacagagggctcaattaatgttatggatggtgaaactgagagacaagaatttgactaagttagtggtagagcctagttttccttttttattctagactcagtcatcttgaccagtactctctacacttttaaaaattatggttaccagttaaatgtatgatagtctaaactagtgttttatgcatgttgtcaaacatataggaaatttgaaatttttaaaaggatgagattttaaaatataagttgtaataatttcttcccagtggctcccttcctcagggtacccacacccacttggagatgagtgctcaagataggccattcttcctgcagaagaggcagccgtggggacagctggaggacagttggtaaaaggtgtgggacttttaagttggagtgatcttttgcagctttttaattttaaagaaacagcctttctttctgtgaaaggctgaaggattcaaagtataggcctggagagaggtgagctttaaaagacagaaatataaaccttacttgttttcctcagagttgaccaaaagggaaagggctgcctgccctgatagcttctactcccattgagatggcagtgcctttttctgttgttaggcagtttatagaacgcaggatagcttggtaagcgtcttctctgtgcctgatgtgacgtaacattgtggagtatgcagcatgcatgttaagtacaagtggttgtatttggcttgttgctacagcatttttgaagatgtcttaaaaagcaattatcagtggatggagttggatatgtgcaaattattgaaatcatcatatctcgaagaccaaactttgtaacttgaattattctatttagtatttgtttacttcccccaacccccaacacctcagagcagaattctttttctgaaaggaacagatgccgttaacttatcaggacttgatactaaaaagcctacaaaaatctttgtgctgtttattttctttatttaatctatatgcaaaacatattgtaattattgctgttagagagttttaagctgatggttcccccccacccttttgtgctcaggggagatagattaggaatgccaaattgacaacttggtataaagaaataatgaccattgaaataaaacaggagttcaaataaaaagcaaatcagatacaaatgtagaatgaaaatatcttttagtaaaatgttagcatgctgtacttggaacagatgccacattaattcaaaagagagcccagaaaatgtggcaactttacgatgtcaatggagggagctgcaatagttcctgttttcattgtgtcaggttctcagtacctttaggtccagtcctgttccttgtatttattttctgtatattacatgttagtatacaaatattaaatccgtgcctaatacttatatttgtgtaattaaatacattgtcatgctattagatattagtataaaaagcccaataacttatactgcaatagtcatgttttttgttttaaatacacctatcaagatattcagaatctgaagcaaaaattctctgcatccttcaaggcacatttatgataagaaggtagtctaagaattgagtctttcaaagaggcctagtgctttttaaatgtaaaatttggacaagttacaaaattatgagaattttgcttttttctcatttaaatttgtagttatcattggacatttgttatgatttttaagtagcttagactcattcattccttttgtgtttttttttatggtgtttgggaagaagaaggggtgatggaagggtactgtacacactgggatattttcagagtgacattcattttatagaagattgcacagggacgtctctgaattgcccatttcttgcagttcctggttagtgtgggtctgagtgtggagaaaggtgggctgggggctcttaaccagatttacagttgtgctacttcctgagtcgtgcagtgatctaatcatcaggggcatgtcctgtgtgcctgtaaagacgtctggcacacatgcttggaaagcactactagttttctctcagtgaagcttacaatttagtaatttggtaaaaaggttaaaagttttgttttcatgtaattcgagtgaaggggagtttatagcgtgtcagtagaacacagaggttaagaatgttagtgcaggagccactttgcatgggcccaaatcctagctttgccacgtattagctctgactgtggccaaatgacttcctgctctgcctctgcctcagtttcttcacctgtaaaatttgaataaaatgaagtggttatgaggaataagtgagttaatgtgtaaactagtagaagtgcctgacacatagtaagtactaaataaatggtactgaagcttagttttctgctcctttcttctcttctcaaggattgagacaagtattagtataagagcctgagctttggcatctgactccagtatttgaatctcagtataaccacttaaagtttaatgtgtgaccttggactaattatttaagctcactccaataaagatgtatcacatacrtgctgcataccactgtgctggtcactgggacttcagtttcttcatctgtgatacagagatggtaataccagcctcctagggttcatgtgacaataaaatgaggaaatcttgagacactcaatcatgatagctgctcttatcattattattgttattattacagtcccactaaaagttcatgggaaaagagtaaatttggaacaatttagctggagaggttttttttctcccttgaaatgcgtggtgagaaagagtatagatgataaaagtgttatctaatgagttcttatttgtgaatacctctgggaaaaatagaaaatacatgggaatatgtcagttttaacagagcctgctaaatattttaggggatttaatgtttattaaaacccatagtgatataagcttttctttttttttctcaacagctggtgagaccagcaccaagatattgatgcagtttatagtaggtctcttagaatcaagtcagtagtagactaggcattgtaactctcaagtcttaaatactcatcagctggtcagtccattgggtctggcaaattatgtgtatttaacccttgagaactcatgcttgggtgtaacaactagtggaaacaattgtagaaccccagagatataaaagtggcatacaaatgctttctaataatgatgggcacagtttatttgctttctgattttgggcattttgcctttgtgaaatttcctctcatttggtgcctgatgttttcttatggtagttgttattttctttctatatttaattgtcataagctacctatrttgagcctagaaactgagcctgagaacaagttgattatgagaaaaggtacaatgatctcctcagatttgaggagttttggggtaaataattgagttaatatatccattagaatgtatatatgtatctgkcttacgaatgtctctatcttataagtgaaaccagtaaatgaggtaaggggaaagatcattaagtgtaaaatataattaactttgttcattcactactgatcaggatctgaacgtttttggtctttgatccttgatatgtttttttctgtgattcaacaaatgtatttgtaatagcttaccaaaacattctgaatatggtatatgttacccttagcaagaatttaagttaaagtagcataatggctcctattaactttttgttctcactaacccagctgtaccatttgataaaggtctagtaggtgaataggtgtgtttactataggtgaattggtgtatattttattttgtccctgttcctaaaacattgtatctcatttctgaggagaaattccaacgagttttttaaaaaataaagtggtgtactttggctcgacaaatatttttaaaactaagcaattttataatgggttgtatagttatctttcaattaaataattgtaatcttactttgcaatagagtgaccagtaggtaaagcattatagttttaaaattagcatagcaaatatatagtattaagttttctttactttagctctttgcagaatctgtaaaagttgtttcagttggttgaatggaattgtggaaactttagaagtatatttcattttgataaatatgtgttagaaagagattctacaagcgtttgggggttgagttaaagaattatacaattttgaaaatcagtttgtccctgcttaatttgtaaaaagtggtgctgtatgtgacgggggtgcagtcccatttcagctctgcaggaccctgtccagccggtggtgctcctgtgtagagatgccgccggtgattgcccagactccctgtgttgcctttcctctcctgcttctctgcttacyctcttgatggtctctttccgtcccctgcctgttattcatccttcccttcaagccaccactgttttatttctatttctcttaaaaacaaaacaccgttgtaattattagtttttaaacagggagatactgagctattatcaaaaccttaagctttaacagtttgtggggataccccctactttgggccctcagctggaatttggagaatggatagcttaaaatcacttgcacagtaactgaatatttgtaaaatactttatatctggactaagagagagaatagaaaaatacctttttacctcagaaattgctgtattttctggttggggtgagatagaggcaaagttgaggaagaggcaggcatgttacttaactaaaataagcattaatttattagactgctctctagtctcatggacctaattggagaattaaaaaatggaaattttggtgttgtgaattgctaaaatattttgatttattaattgagaagactaggctttctttccttgatttgtaaatacagaataccactgatgccttattatatattgatcttttacatgtcattggttgatagttgcaaagtagcagaccctttcctttttagatttctcctagtggttttaaattgttaacataattgtttggtaagaaaaataaaacttggaaattaattatggttacatgttgagttaatgtctctgctggatttaaaatcagtagctcctggttaggtgtagtggctcatgcctgtaatcccagcactgtgggaggccgaggctggtgtatcacttgagctcaggagtttgataccagcacagggacaggcgtggtggctcgcgcctgtaatcccagcactttgggaggccgaggcgggtggatcacaaggtcaggagtttgagaccatcctggccaacatgatgaaaccctgtctctactaaaaatacaaaaattagctgggcgtggtggcacatgcctgtaatccccgctactcaggaggctgaggcaggagaatcgcttgaacacaggaatcagaggttgtagtgagccgagattgcgccactgcttccagcctggcgacagagcgagactccgtatttaaaaaaaaaaaaaaaaagagggagaccagcacgggcaacatggtgaaaccctgtttctacaaaaaatacaaaaattagccgagtgtggtggcatgtgcctgtagtcccagctattagggaggctgagttgggtggattgattaagcctggtaggtcgaggctgcgaggctgtgattgtgccatgccactgcactccagcctgggcaacaaagcgagacactgtctcaatcagtcaatcagttcagtagcttctaagatctataccaggcatttcatctattatttaattatacttagagaaaaacatttgagacaagagcctttataggattttaaataacttcttcttatggaaatttaaaaacatttataaaaatagagtgaataatataaccccacgtacctattccctaactaacaattaccagcattttgccaatctttatttatagtgtgtaaaacataacaggaaagtaactttgtgttttcaaaacatgcactacagttagatacattggtatactcaaaggaaaaatgtgtatgagaatgttcttttcatacattgttagtttaatactggtaatcccttttaggataatattttcatttgtcttttaacttactgaagatgtctgagccaccactaacttagtgaagaacgatgcctgctggacagattttagcttttcttactcctgcttttagaagttctgagattattagttttgagcttgtgttcttaggagttgcattttattttatgtacactttcctrtctgtgatggttgtatggaccaccatttcttagcataagcaggacaatatataagtcagcttaaagttgcaggtcacaagtcttgttccgcacttccttcttgtgcatattctatttctatttaacccaaatgtgtgtattggttaaggaatgcttgtttcacttataaaatggtttgtcaaggagggacttttgactacctgctatctttagacgtggtaacagtggttagaaacttgctatgtgctcccttgtttgctcttctttgcactgtaagttgtacatatgtctgcagttgtggggcgtgttcattaggagtcactacaaggtaatggtagacttatttctgaatttatttggttgcattagtttaaattagacccacaggtgtaattattccatctcaatgcatggggaagcatagtcagtgaaagttgtgcatgtaaacccctgtgcattgaaaatgtgtctttaatgttatgatgttatttggcatctatcatttagtgcaaggagtatacttacttaacaggacctttaataagttccctctacaccaaagatatatattttaaaaattatacttaagaagactttgtggtattccccagaagagttcgcctatagcarcaaaacctttctaaaataaaacttattcttttaaccggtattcatttaagtgggtttctctctacttggtttccatggaaatagcaaatagctaacgttatttataaggtggaagtaaaatagggtgcctaatgggaccccatgctgctctgatgaagagacttaggaaaaaagtccatgctcatgggatttttttttttttaaacaaggttaatggaagccctgatttcagtcttctgtaacataacatatttttggtcttaaaggctagcattaatatcaagcaaacaacttctttttgaggtctgtattgctttcactttcaagttttaggactacttacttatcagcgtgattgaggcatgtttcagactcctgtttctttgtggtttttgtttcaaaagttaaaattcccagtgtattgtagctgtttccacttctcattgacatttcaaagtactgataaaaagataaatgttcattaaggatagcagtggtgagaaaggatcaatatgttggactacaaagattttttaaaaaatgtaaattgtatggaaccatttttagtttttaggcctaaagtcagggttcttttttatttgtgttgtggagctaaacctgtatagtcagagagaagagattctaattttctttcaggctggaaacagggaaaatcttaatttctctttcctttttaaaaaatggattgttgccaaaaccttttaactgaaataaatgttaattcttttagtgcttgaaatgtggatttggaataaagcttggcttttttctcacttcttcggtaaggcctactctgagttttctaggcctgcagcaaagccttgcattttttaagccccttcaagtgaaagagtatcattccctttgtgtttgtgtttgtgtttaggktgtgtgtgtgtgtgtgtgtgtgtgtgtgtgtgtgtgtgtgtgtgtctaatttttctatagcctgaaaggcacctgctcattttccagcctagtgagtacagcagtgctatattgagaagtgaggcaggatggaacacaataaggtgctataatttttatttagttagttttgctcatcctcggcagcttgtgatcactgtccatttatctggaagtactctgattattcttggctatcgatgcagcaggagttttcttctgtgtttaaagcaaggactgtagtatactgagggctccatcagggaggagttgagttttgttttgtgtgcatgtgtttctctggataagcttctggctatagttgggtttactgtgctttaattttttaaaatttggttgttttaatcttgttgaatttatttttgtgtgagatatttttctctagcaattcactaatttcttctgtgtatgttgatgctattttataaaattttcttaatgtgttgttcttttagtttaacttcttcttgtttatttttaaaatctggtatctagcattgacctttcttagtgacttttatttgaattatcttgtgctttagagacataggaatttgggtctattatcccatttctgagcgaacaactcccagtagttacagttagtgcaatagaaagggttctcacagatgcagtgctgggcgttgatcctcctccttggtgcttatggtttacacccagaactcccattagtgttaataggaggcacttccttaaatccctgtacaccaaaataagctcaractcttttataatgccttatagatacctgagttgtttttttgttgttaatgacaagagttttagtcctgaggttaactgattattaagatagagtttgagttgtcttgggataaggagtgatttactaagtctgatctataattaagaagttttcgttatgatcattagactcagaaaacagcttcgtgagagctatggaagcttgtgaataaggatttttgtactttatagagtgaggaagcaagatttcttctttctatttatttctgctatttcttctcaaccataaaaaatggttctaacagtttttgtttatattgtaagaagacttagaaaaattgttttgttttttattctacttaaaagccttcctgtaattaccctctggcctcaaagtcttttattagctagtgtggctcacatttttcaagcatatagaagttaatatgcactgttttagaacttagacactacaaccactggtcaagtaatagataatcagtgtttactacacccatctgtgaattgtggatttttattacttccatttatttatgtacagtytaaatctttgtagattttagctagtcatctggacttcttggacctctgttcctccatgaaatgaaggtatggatctgccctctgaggtgtccattctagttttaggctgtttgaaggcctactttcctaggtactgaaggaaatagagtactgtaaggcaggcagtggtttctaatcctggctccctattagaatcttttgggggaacttaaatacagatctatgggttctaaataagacataatatattcaatatctttaagggtagggcctgtgaacctgtattttttgaagttttatgtgttatcctgatctaggattgagaactacttgtacaaggtattctattcttttgtgtatgtgtgtgtgtgtgttctagttagggagatgtcatataggtcagattaaaatgtgaggcagtgtgtggttaaacttgaaaatgaatgagaaagaggataaacactttaggagtttaaacaaaggaagaattgggaattaggatggtttgagcagatctctgttaatcagtgagtctttatctggaccctagtgtgtgggtgagatttggatagttagagagagggtaaaaaggtattattcttgttataaggaagagcataagtaaaagttggggagcggaacaattctgattatagttttagtctttattttagtattcttttgctcctgaaactgctgtagatttcctcaataatttgagggagtgagccatgaagatatttggaggaaaagagtgttccagagccccaagaagggaacttgcctggagggtctgaagtacggaaaagaggccagtgttgctggaamggattgagcgatagggagatgggacggcttcgagtggcagaggcccaaatcactcagtgcctgtgggccattgaaaggaacttcatcttttctcggagtatgatgggaagccactggagggttttgagcagaggagtaacaagatctgtcttggattttgaaaagcttactctggcttgcgagagaatataccttagcggggctagggtagaattggggaggccagttaggaggctgttgcaattatctaggtgaaaggtgaaggtgacttggaccagggaggtggtaggagagttgaggcaagggggtcatggtggatatattttgaaggtagaggcacatggttggctgtcggagtagatgtggagtgtggtaaaagaagagtcttaagatgacttttaggattttttcttctgagggggtggagttaccatttactgagatgggaatgactctgaggaggaagttaggggagaggtagtcaggagtttagttttggatgtgttgagcttgagatacctatttgaccagtgttgagtgggcagttgggtatatgagtttggaattcaggggaaggatatgtgctagagataaacattgggaattgccagtgtgtagatccttctatagccatgagactgtgtgagatcacctaaggggaagagttccaagaactgagtcctgggacagttccacattttaaggtgttggaggcaaggaggaaccagcaaaagaaaccaaggagagtagccagagagttgggaaagaaaatcaagagaggatggtctcctggaagtcaagagaaaaaaaattttgaggaggaagaaatgagcagtgggtcaaaagatactggtcaaggaagtgaagactattttctgttggatttaacaactgttaaatcattggtgatcttcacaagaatggagggaggcaaaggccctaatgggttgtgttcaatagagattgggaggagaggaattagagggagtatggttacctctttcagggagttttgctataaacgtgagcctagacggggacaataactagagaaggatatggagtcaagagggtttttttttttaattattattttttaagatagaaggaacaaaatgatccagtaatgatgaggggaaaattgatgctccatgagagtaaaaggaaaagagctagaggaatgtccaggagagggtaagagaggtgggtacaagagggatggttattaagatgttggggccccaaggactaagcctatcaagcgggattctgctttttcttctaaccacttatctgcatttaaatttatttcaaacttacttgctttctgttggaagttaggaagggtagataaaaagcagtaaagccagtggtgtataaaactcagtttgggggcctctatcagcttggtatagtaaggggaagagaagagattgaatcttctgggtaaggtgacattttaaagtgtctttgaatgacaattatctgtgctattctagtcccttatcaaaatttatgattgagcacaggctataaacttaatcatttgaaatttgtagtagggtgaattaaattttagcctaatttaaaacatgatctagtattaaactttttctctgcaagttttgtttaatacagattcttcatatcgcaagggtttcagatattttacaaaaggtatttaaataattattaattgctttagatttatttataatatttaaaatattataaccatatkagaaatctggatgatttgtttctttaccagctctaattagagcagttacctgtgaagttctggagaggtgaacaatcttccgtttgcaaaaaattgtatgacattatattagcaagatagtataacacctctaaaagcaaaaataatttcatttactctaacttaggtgttttggatatatttttcaagaacaaatctatcttttaaaaatttaagcaaatatggttaaaattttgaagtaccttagttagaagtgtgaaatgtatgtgagaaacaaactaagtggcttttaaccagcttaacatgaagaaatcaaacttgcatttcagacttaaatatgttttacatatggatagtgtaaaaagcacaaacgtgtgtatagatcttgctttttgctgctcagttttcttaaattatagaaatagaatatttgcttttttttttgacaatttccaaatggtagtcaattaatattcaatcttcagaagaaacactttgggatttctgatgtgcacagtgtttaagaatcattagtctaaaaataatttcctctttttgggtatgtgaacctcattgtgaaaccaattaaagccgtggaccctcttccaagaaaggtgtacctatgctgatatgtatagaatttagcatatagtaggaagcagttgacagacccctctgaagcccattcatggggatcccttaggtttaaaggatttcatgatttgtctttttttgggacggagactcactctgtcgccaggctggagtgtagtggcgcgatctcagttcactgcagtctctgcctcccgggttcaagtgattctcctgtcacagcctcccgagtagctgagattacaggtgcacaccaccatacccagctaattttttttttgtatttttagtagagacttctacgaaataattattattcaccatgttggccaggacggtctcgatctcctgayctcgtgatccaccyactttggcctcccagagtgcaggcatgagccactgtgcacggccaggatttcatgttttaagatggcttatgtgatttttctttaaaactttatgtgcagacttttccaaaaatatttcgctagtgtttattgtagtttgttttttagaagagtaactcctgcagcgggttaagagaaagtgaggtctagtggaaaatgaactcagccaaggaatctcgggcccataagctcttctccagcttcactatcagctagctgagtgacctttggggaaatcacttaacttttccgggtttgattttctatgcgatttctgcagtccctacaaatagtcttatgagcagtttcatgacatcatgatttcaggatatcatggcaaaattctttatcagttcaggattggccctgctcctcatttttggagaaaatgccttggagataagatatatgtacattgtgctgccttttgttgaatatgacttttcagcagcatttattaatactttctcaaatgctgtataagttaaaatcccagtcccatcctcatcactttgaatttcaacatattttatatattgtgggtataagcctgtgttgattatacgtaatataattatcacctccgattctgtggtttaccttttcactttcttaatggtgtttttttgatgagcagaagttcttaattttaattttgtccaatttatcagtcttttcctttttactatattttaaaatggtaatattttacttcctaatcaacaacttggatgaaaacagttccagaaagtcattcatttaacaaataatgctgctggaaatcgatgcataagaaattatccccagcctaaaagagctaacatgaaagccctaatagggaagataagccctcaacagacagcttaagtgtctgtttagtcaattcattgacttaacaaacatttattgagcatttactatgtgcctggtactgtttgaggcaaccttttgagtggcacagagtcctgtagatatcagtagtgttaagaatccactttttaataactgcattgttctacagattgttgcatgatttctcttttggttgagagtcatcctaaccttggtgattaaaattgttatttgcatgggcctgagaactttaaaaaggacagctgctaaagaaaaggcagaatagaatagcacattgactttctttggaaatgagtgctaactgcatgaactggggcccttttaaataattttatcgtatgtttggtataactgtacatggttaaacaaagatttacaatctgggagacatgaagctcttttgaaatattccctgaggcaatgagacactattggagtaatatcagtcaacaaacaccatatttaaggcaaaaggaagacatgtagttttagagcatagcatatagtggagtttaaataatttaatactaaaatattaagggaaaagttttaatttttgtttcctaatattggattgggatcccaaaacctaaattttctttctggcttcatcactgattagatatgtggcatagaaacaaatagcttttgtgtatgtggtttacaatctaaagtggtaagatgtggccaggcacagtggctcacacctgtaatcccagcactttgggaggttgaggcagggaggattgcttgagcccaggggtttgataccagcttgggcaacacagtgaggcctgactctacaaaaaaataaagtaatagccaggcatggtggcacacttgaagtcctagctattcaggaggctgaggtgggaggattgcttgagcctgggaggttgaggctgcagtgagctgtgattgtgccactgcacttgagcctggacaacagagtaagacattgtttcaaaaaaaaaaaaaaaaaaggtgagacacatctaagaatgtgaaaaaaagtttaattaaaattctgactatacattattataaaatgctgtgattttaaagccttatataaggcaaatacatttcaagattaattgaaaaaaatgccttttatgaggaccaaactaagaactagtgatgttaccttaatttgttaatgtaaaacaactgacagtagaggtcacttgttggggatgaaggagtagttgtatgttatttaaatgaggtgcatttcatttctatgtgtctcttaggaaaggaaaattatcaactacttacttttgcttgtcttgaaaaactatggaaaagtagcaatttaactgctcttgagttcttttctttgctgtaaaaattacctattgcttctttttttcttttgggttttaaaactttggaaacttgtgtgtgttttgttttttcttcttaaaatcagtaatctttgagtcttcagcttttaatgacatgtcataaatatgtgtgtgttgtctaattccattttcccgttcttctgttatagggggctagagagctgaaggagagccagtttccccaaaattggtaagtactttgactaggtagacatcgtgtgcctgatcctgatgctagctggatagttattcaaatattgtgattttttttttttttggcaaataggctctctctcagaaatggggctttgctatttgcactaagtggaaatgaattgtctaatttcacgtagctatacttcaaacgcatttgtgtttctgctaatacagctaggcctgcatgttccaccattcgataacctgttaaaatgtaaaagtcccgttttccaaaaatgtccttaatgcaatggttctggttgagaattcaaacgtcaagaaattcaaaagttcagattcccagccaggcccagtggtgtgtgcctatagctccagttacttaggaagctgaggcaggaggatggcttgagccaattcaagtcatccagcttgaagctggcaacaaaacgagaccctcatctcttaaaaaaagattaagattcctatagtgttttgtgttacttaatatgctgttctatttgatggccttagtatatgtgcagagtggcttaggttaatttaactgtggaaacttgactttgaaatttgggactcgtgtttatttgcattcttaaaattaatattggattrgttagcttcatgtctgatagtacatttttagcatgtgttgttttatataattcttcaaaaggaaaaagagagaaaaagagagagaaatgtaattgtggggcatacaggcaaacattttttcctaatatctactttgagagrtttttttaatggctcttcatcattcttaaacatttctttgaatgcacagggcaatctagtgactagccatcaaacaaatattaactttattaggagagtgtgtattatgaaaaaaattacactcaaataagatagctggaatagggtagtcgcctagtgcaagactactcctttttaaaaaaatttttaaatcctctctcaaatagtaattaacttggtgggtggagtagatatagtagatatttggccaaggtttccttttgatagtttatggtgcttgtggtgtctctcttccttttggggactgggatttgaacatgtttaatggaggcacttgaactagttaatccttgcatttactacctttttattctacttgcctttctctcattaaaccttttaaaataaataatcaagatcctatagctctttactttgacatgggatggaatcttagagaagcgaccttaacccatttataccagaggttgcaaattttttttgtgaaaaatcagactttggcaatgaacttgagcagtaggatataaataactcccacaagcttagtgttccaataatggaacactaggtataaatgggttaagggccttctcctccagtattttaccttgtgtggcagtttcttctagatccctgacaggttgttattcaggtacatattgaataccacatttaaaaaaaatgtagctcattttctataatgtattctgaggaattctacttccacaaaaaataagtattattgaggtggggtgggggtgggaaaaggcttctgtggtcaagtaatttgggaaatgctgcattaaacaaagttaaacaggtttctttactgcaggacttctcagaacctttaatatgctaatgtgcattgtgaatctccaagagggggatatgatatgcagcattcttgaatacttctaatgacagggagcccactacctcataaggtaacccattccttttttgtacgactcttatccttagttcttccttttccttatattgatctgaaatctatctcccataacttccacttctattaagtatttattggttatgctgagactaccacacccacttgcattatcctttgtgtggtatatatttgtaagattctggccaggcttgtctggacagtttttttttaaatagtcattaaatattaataacattctggtaaatgtgacaactagttctaaaaccttggcctcattgtcactatgctctcataccttactccccaacctcctccattttcaatttctgtgtattttaaaatttactcagttttccttttgttggatgtggttgggataatctagtagacgtgcctgatttttgtaaagaaagttaggaaatagaagaatgtgtatattyagacagcctggaccccaggaagcagaggtagaaactgtatattgggctgagcactgatgatggtagggaggggtccaggacactacacagacttgtgaaggagggtgctatggggaaccctggcctggcccaaggcaccataatagcctgcacgttgcagtggaggtatgacctgtgtagagattccttttttaaaaaatgaggacccgccccccaccccctccaaaacaaatagagattagaaagatattttatactcacatacattcagacatttagatatcataaatgtaatgatatgtatgcatatttttttatttcataggaaacaacattattaaatataatttaatagtatagaaacatccaactagctaaggaggtcaatagctgtcacaccagaattttaacatagcagccttaccacattcagagggttcgcctcgaaaatcagggttgccaagctctttgtgcagtagtattttctgttcacctgtggagtgtcataaaagaaacactgtgatgaaaataaatcaagatgtgttgaaaatttgctaaatgataagaaaatagacattacattatgttttttaatgttgtcatttgtattgattcatgttaataaatgttaaagtttttaataaatagtattaaaagaattttattattttttgcattcatggtaattttagcactactgctaataaagatattattttatctacctacatattagatacatagtaggaagtattttgtacaaattgaaacctgatattcaaatattaagcatggtacaagaagtaaagatacgtagatgactgtcaagacctactttttcctatttaaaaaaatgaattaaacctactttaaacattgtgtctgagaatatagataaaaagcagaggagtttcacaccaaataaatgcatggtatagagaacatggagttgtcctttttagggacagtttgggggcacactgtgtcatggacttatcgttagttaaagaaatgttggttgatgagtcaagttttgattggaaaaaggtttctgtcaactcagtaacagcaaaatatttcttagcagtaaaattggagttatagctttccttcgagttattagaatcgtaatgaaagacctgcaggtcacatatcttcaagcagaagtatacccagagaaatagttagaagaacctccttagagaatttgagaacagaaaagcctacagtcttctagatatatactatgtagagaagttctattaaaaagtctgtatagagaaaagaattaagtgtattaaaactatcataaaactttacagtttgcaaagggcttttcatataattttgccttatttaaaccacaacagtcttatgaagtaggtgatattgtttccattttcctgatttacaagcaaacaaacaaatgaaccctggggatgagagtagtcacacagtgagtaagtagaattagcattttttgttttttgggatggtgaatgtgctttccagataccatggctgacctttttagtgggattttattattgtttttgtgtgtttggtttgtgtgtttggtttttatgttttgttgttgttgttgttgttgttgttgttattggaaagttagaggccattagatatcagaatggtttgacatgtaccgtttggaagattgcaaatgctaatattttgggctaggcaagtggccttgctgatagtgacttgtagagctgttggatggtgagagtcactcattatggtggaatgcagtgtgttactgtcttgtgagtctgatggtattcactttgcagcaactgatttgttatttataacttgttagaattggtcaaaatatgttaaatcatcttttacaaatgtagccaataattcttttgatgctataaactgcctcccagtggtattcagatgactgcatgagatgtccaagacctcaaaatattttttcagctgggtgcagtggctcacacctgtaatcccacactttgggaggctgaaggtggatgggtcactttagcccaggagctcaagaccagmctaggcaacatggcgaaaccctgtcactacaaaaaaatacaaaaattagccaggtatggtggggcacacctgtagtcacagctactcaagatgctaaggcaggaggatcacttgagcccagcaagttgaggctgcagtgagccgtgatcgcaccactgcactttagcctgggtgacacagtaagaccctatctcaggaaaaaaattttttcaaaatattcagcatgtattcgtgaccagcctgggcaacatatgagaccccttctctacaagaaaaaataaaattaaacaaacaagattcaacatgtacctgccttgtttttgtaaactataaatacatgtctrtaatttgtttctttccgcacagaccagtctcttaaaattactatccagaaagagatctttctgaagaaaagaaaaagaatttcaaatgaatcttctaatccttcatatgtttttctacaactagtcctaacttttttaacccttttagttttattttgaaataaaatgagtaaytggcatttagagtccttgctgaataaaacttcatgcctttgtgtatctctgagaagcagacaacaatcygatggagaaagtaaaagccatcggctcctcattaacttgagttgcaggcttattattgtgcgaggcactctttgacatttacagtcttcaagttaaaccctggttttaactttttcttttcctgagcattttgtttgatagtataatgttttctgatgctttatctacaaatccttggttaatgtcttcttgtttaaaaagatgtgcatattttttatggaaaattttgaaaatatcaataccccaaaaagaagaaagtaaataactgacagtgctactacctagagataaccatcagcaaattgcgaagtggcacctgacacaaattctagacagctcagagtattattatcttataggtcttcagtttgatagacaaagcatataatcttagttatatttctgtgtcttaaaagatggaagtttttcatgtttgttggtcattcttatttcttctgtaaattgttttttcatagattttkgttatcartttttgagggccctaaatatataaactgtatyagccctttgttatgtataatgttaagttctttgtgttttaacctgccgttcatttccagagtttatgtgaattgaattgaactatggttttatgttactgtcagtagaatgaagtacgaatatttgaaaaatacaccttcaacttcaaagtgattcttgacaaaaattataaggaatcattttggacacattttctggtagagccttgtaaaaattaaaaccaagtgttgttttcaagaagaactgtaatacataatcaggaatttgagtagggagattattttgttatttaaaattaaagtggctgtgtagttttaactttagtattgcaggtagagtaagcttacatgataacaaaaatcttggtcttagtgacttaatgattctgatatttattgattgattggttatcattccaaatattttaaaagataatagctggctgggtgcggtggctcatgcctgtaatcccagcactttgggaggccaggacgggcggatcacgaggtcaggagatcaagaccatcctggctaacacggtgaaaccccgtctctactaaaaatacaaaaaaattagccgggtgtagtggcgggcacctgtagtcccagctactcaggaggctgaggcaggagaatggcatgaacctgggaggcggagcttgcagtgagctgagatcgtgccactgcactccagcctgggcgacagagcgagactctttctcaaaaaaaaaaaaagatagtagctaaaactacccagatttgttcaccatagtatgtctccctttctaaattgttaataactcccttaaatatactgccttttaaaatgttttgtttaacattatcattatacagtaaatttttcctatcctttgcaaatgtgaatttaaaggaattttgcacttttggaatttattcttttttaggtttgagtattttgatgttatataatctagtatataagccctgagagagagatttctgctgatgttttatgcctaatgagaataagcaaatatattgaaaactcatattcacaagaatatactccctagttaatgattccattataactctgttaaaccagttttcaaaggactcttagaaaacttaggttgaatatagactgtacccataggtaaataatatttagaaatatgaagatcatgaatcttattgtattggtttaaggagtagtggttcctctaacttcctgattgttccattccccaatttatatgaatgctaaaaagctgctctagctacaagctttataggtgcaaagaagaaaagaaatttgaagtaaaatttaaatttattcaggcaaaaacagacttttgctttgacagagtacctaaaatcatgtctaaggccacattcaagaaaagaaaacaacaataaaggataaattagccatcgaaataatttaaattagagcagtgatgactgagggagataggaaggtcaagctgggtgtcatattaacagatttagacttttgacattatctccacatgccattatatgtatagtcaaagagatgactggcaagcttgaaagaagatgattttcattgtaaagctggacatgtgttccattactagaccacctcaattacacacgatagatacattttaaaatatccacatcataagttcgtggatagtacagttatattgcattgtatttgtctgttttgagtattaatttgttaaatgtaaatgtttaagttataccagaatttccccattttgagtttctctgttttttatgtagagtaagaacccatccaaataaaactaccctggcattcgttaacctccgagaaaccctgaactctccagtccactctgtgtgaagtttaaaaatgtatgattttggctcagcgcagtggctcacgcctgtaatcccagcactttgggaggctgagatgggtggatcacgaggtcaggagatcaagaccatcctggctaacacggtgaaaccccgtctctattaaaaatataaaaaaatgagccgggcgtagtggcaggtgcctgtagtcccagctactctggaggctgaggcaggagaatggcgtgaacctgggaggcagagcttgcagtgagctgagattgcaccactgcactccagcctgggcgacagagcgagactccatctcaaaaaaaaaaaaaaaattatgattctgttgttatatgtctctttctgaggacagtgtgtcctggatggttatagtctcattgaagacagaagtggtcttactcagctctgtatcctcagtatgtagtgattaacacagtgctgagcatgtagtgggtgcttagatgtttccatgaccagattaaaccctttttttggtttttcatttcttagttatttgaagtgttctttagaggaatacttgaagaattgttttgagggaaaaaaaatctctttgggaaatttcttgccctgcgttagagaatcagatattcttttactaacataatttatttaacataaatattatatttattccaaatgtaatgatccaaaacattttatgatctttacagctgcagtgagaagaggagtttgttactttaaacagaggctgaagaaactatagaattagcagagaaagtggagaaggtagaggatggagttgcagactctacaggaggctcttaaagtggaaattcaggttcaccaggtaagttgtattattggcttctcccacaytgttgttaagtaatggctaagattagtaaacaagtccatctctggtgtttagtatagtttttaataatctttaagacaattttgtccaagagtcatgtcgtttgccttttaccactactcgacaaagtcatagatactgcttttaagaacttaaagtattcctgacttcctttctagagaaaagaactgaaaagatttttttcatataccaaaggtgttaacaaaaaagaaagaaatcttttttctgctttttggttcatctgaaggactttattcatgtgatttaacttgcatgttttaaataacaacatgtctaactcaactaccatatgtactaaagtttttacagatcatatgactcagctttatgcgttgattccaatcttaaagaaaatgtgattatcttcacagatgtttaaatttcagatttcacaattcttatattttacaaaaagctatctttatataattacataattaaaatttgttatgtaaacagagtaccactgttttatatctttctagactttagctggacatcaggcggaagacacacatacacatgcatgtatctaatccttggtactcaaaagtgataaaggatgatgcattgactacttttgaatttgtaacaattggggatatgggagcggagagaaggataagtaaaactactttctaaagatgtttgttcttaggtatagtttcctttgtttatctgagtagtctgaggtaacattaacttttgaaatcgttgggagaatatcttgggcctttggtaactactagatttgcacattgctcagaattagtgtgggtgagaacttaaaggaagcttcaaaagcacctgttcagaaatccctgctgctgctccggatctcgttaaactcttgttccgctgcagagttggccctatgcacgtgggcttctttaagtaggtaataagctgtgtacttttttttttttttaactttgcttctgttactaattgaggagagcagaaatttgttacaaaaacaagctcgtctttttctgagtgaaattagtttaacatagaggtgtgttgaatacccagtttggctgaatggcaagtgataaaaattaaattcacattttattcaaagctgacatcatcatagaatgaattttgggagtacagtaatcaatctgaaatttgtgtggatcaaggataattttatgatgttgtgtgtgatttttggagtttttcctcctctgaagaagtattgagatggcaaagttaacattctgctttagttcctcttcacaagatatgagcaaatcccaaataatcctttcttgaaaggctcatgacctaaattaattgaagttaattactaaatattttgtttcatattctgaattcaagcataccaattttataaacatcacaattatgaaaatacttaatatttattattctattttaaatctaattaaaattttaaatttacatttgttgactcaaaagggatatagttcttaaagttattctaaacactctcttactattcatattaactgtcagctttgagcataaaattaatagcttttatattcatcctttatacaacattttgcttgtgtgattataaacatttatttatatgtcaataatattttaacagagaaagcatatatttcactccagttatatctgtaatactttactatttttgaaaaaataatttatatggtgtcacctacacgattgttgatcatgacaaattgaggcatgccagaaatgacatcaaggtaggggtgttggttactaggctgagaccaaagccagaacatacatttgacgaaatagtgggacaaaagccacgctttgttgcatttccagttagggaatgagattagggctgaaattgagcttactggatagaaaatgtgttctgaaactatctggtattgtggagtgaaaacatatttttgttctttgtgttttctttatgaatggtgagatagttatgaaagtagcaatgtacacatagttgatgttcagtaaatatttaaataataatgtcctgtgatggacatctcatctttttggggaaattgccttttttcctcctcccttttttgatcttatttagatttgatggaagtcacatttaaattttcagggtatttactccatatggaatggagaatagtataaagcagaagttagcaaatttttttgtaaagggacacacagtaaaatatttctggctttgtgggtaatttatggtttctgtcacaactactctgctctgctgttgcacagagaaaacagccacggacaatatataaatgaatgagtatggcttttttccataaaactttatttgcaaaaacaggtggtgggccagatttggcctatgggttgttttgcttacctttggcatgaagtatatcctcaagaaatattgccgcattctggcggaaagtaacctaactttgttaacacaatgtcagcttaaagttactagggatttggatggtccagtaagttggccagctcgtcctgtcctacccctgattgtctgaaatgcagtttaactgcttacagatagaaaaattggcttatttatttcctctagaggtgaagacttcatgtggttatcagtgaatttttaaattccagtgtctggaagaaaacctttttcagcttctaaaacgttacagcgtagtagccaaccctctggtaaccaaatcaaaaaggaaaatcaagagcttttttcattgaagactgtggctagcattaatgtaaaaatgtatgtgtataaaaccttgtgtttcagtcccctttaaactcttggaatatgtattgtttctattttgtaggttaagactaggatatagaagagctactaccattaagtatgaagtcatatagtgacacataccttgtgtatttggaggtcccatggttggcaacttcagttatctaaaatgtgtcttagcatcagggagaaagacttttgattaattagaataaatgtctgaagtgatacaccaaagattatacattttactaaaggagggtttcttagattattacaacctattcactcgtctttttaaaattagtccagtgagcgtaccacacagcaggtctgaaacagcaaatttgagctgggtttcagggttgttagaatagtagcaagagctgcgcatggtggcttacgcctgtaatctcagctactctggaggctgaggtgggaggattgcttgaggtcaggattttgagatcagcctggataacatagtgagacctcatctcttaaaaaaaaaaaaatgctggatatggtggtgtgcacctgtagtcccaactacttaggaggctaaggtgggaagattgcagaagcccaggagttggaggctgcagtgagctatgattgtgccactgcactccagcctgggtgacagaacaagaccccatctttaaaaaacaaaaaacaaaaaaagaatagtagcaaaatgtgctggctgactacttgacgttaaggagtggactggaaaactacaatgtggatttaagaactttaacacatagtagtttgggaccttttttgtaaggaacctattgtttatagtttagtatattaatataatcattcctctaagtatcaataaaagcttgatttttaaattttttttcttctttttaagaagttagggcgggtggctcacaccttaatctcagcactttgggaggctgaggcgggaggattccttgagcctaggagttcaagaccagcctgggcaacataacaagaccctgtctctacaaaaaattaaaaaattaaccaggtgtgctggtgtgcacctggggtcctagccactcgggaggctgaggtggaaggataacttaagcccaggaggttaaggctgcagtgagccatgatcacaccactgtactccagcctaggtgacagagcaagaccctgtctcaaaaaaaaagtagtagttagataaatatatagtatattttagaaaggttttattttacaactaaacaatttaaaagtgccttgtcaccaaaagagagtgacaaatttttccattagatgaaaaattgacttgggtaatagcttattcccagatactttaggacttctgatgttcctttatccttcatattcttctgtctatggttattgttaactttgggcagcgatgtctttagaagttgggttaggtcaaaagacattyatttttcttcctttcctttcctttcttttcctttcctttcctctttcctttcctttcctttcctctttcctttcctttcctttccatttgtttgggcttctgttttccctagtaaagatcttttccattcagtattgggtagcactctttcccagaggaatcgagttagatagagttttgtattgttcctgcacttccttgttctcaaaaactgagcatcactgccccactgaacttatcctcccctgcaccgaactccttcttgagagaagacagtggcaaagtcacatgggacactaagctccttctgtggtaagaaacaaaccaatagacctgccaaatctgtactttgctctgtgtatgaacaggccggttttgtgtggggccagcttctttccaggccttgtttgggactctagacattgacaacatttgaaagggatgcttggcttttggagcatccagcttgcttaaattcctttcggagccactgtcacccgtctctgtccagatttaaaaatcaggcactttttcatttcaaatataaagtggtggtttgatttttttattaaaggaagtgtctcctgagcctattacatggatcacagaaggttttagtctgttctgattgtggtgttgctcttttttttgtgttaacttaaaatcctagattttttggtccaaacctgattagccatagggagttaatatgtaagactgatggctctttttctctctttattaccagaaactggttgctcaaatgaagcaggatccacaggtaaaactactattgttattcatttaattgttaaatttaaaaataatttaaaataaaatcaccataaaatacttaaatatagatggtacttaacttttaagaaytatttcatttctaatagcaattatttttaatacattgatcttcaggttataagggtttagaaaaattcattctattttaatatagctattatttcatctttgttactattattttggtgtcatattaattggtttgagtattttagagaaaaatattgagttaatacttgtcatatagcttaaattcatttccatgaacccacttattcaaaatcagagtttttgaggctttctgtcatcccaatattatgaaaagagaccccaaaccatttttatttacttggagtttatattatagaacatttgaatagtactgaattctccatgttcagggtaagaattttagagtattttttaaaagaagcattttagaaaattttatttttgaaagaacccttaaaggagggttaaaaagtaccttatgttactttctaacagaaaaattaacagagaatgttaacttttctttaaattctcataggcatttttcacttaggcattttattctstatttctgaagagatgttttcctaaaaacttaccttgtcttctgataattatatttattattgggcattgtctcttttgtaaccattagatactaggtcataagtatggagagtgtttatcaaatatcaaatatatctttatctatatctatatctatatctgggttgataaacagtacatacaggcttcactgtaaagtaaaatcaagtttttgattgaagaatggtactgaggcacattgatttttggaagtaaaaaaataacacttatctctacaaattgagaactcaggtctaactattgtgttttgactctgagagctggcattggtagcccatacttattccttttgaatgatcctacttccgtgagaaacttctccttttttttcttcttttttttggtatagtcacaatttaaattggatttagatacaaaaattagccaggcatggtgatgggtgccttgtaaggccagctactcaggaggctgaggcaggagaatcacttgaacctgggaggcagaggttgcagtgagccaagatcttgtcactgcactccagcctggacgacagagtgagactgcatctcaaaataaataaataaataataaattagatttagggaaccaagaggtggtagactttagattaacaggtcctttcctatttaatgtggtaaactacattatcagcaactgtgaaatgttactagaaactatcatttctgttatagttggtgatcatgtaacagaattgtcttaacctgaagaatctgaggtaggcaggacagtaacttgttggacaacaggtgtgggtgatctcattggagaagccttatgtcaaatacactaataaaaaagtccacacggagtaaaccaaatttaatagacgaggaagatgtgttccctaaccctgacagaagaccaagcagggtaaattgaaagaattgtatgtgagacaaatcaagtaaaagcagtctctcattagggtggtgttcagtctgctagtaggctgtcctgctacattaagcatttgaaaactttaattttggaattttttgcctactttagtaaaaggcaatcatgctctgtgtatctcatctaaaatagtattctttttttgattcctagaattttagaactgagaaaatgccctggtagtcagtgtgttaatttgaatgatgtagtgttaaggcagttgcagtactgacagcttttcagatctaggctaaaataacaaatgtactttgctaaataagggagagggcaagtggagaaaacctcttatctttgttgataatgctgtaaagcatgtagtgtgtgcatacttataacctccattttcctacttttgtgtgattagtggagctttgggttttctgtcaatggatactttctataaagaataagaatattttagtggacaggtactcttaccgtacaagatgctcaaatataaaacttcatgtaatttaaaacagttgcagaggagctgctcctgttttggtgcaaggagcctgtatttaggatctgtgcattaggtgatggtattatggccacagtgtaatgcatgacagatttgattggctaaatgcttcgggttgcttcatcatttgtaatgcagtatgcatagtcttcctgctactattctgttaacaaatgaaatatctttctcacagatattttttctttccaatcagaatgctgacttaaagaaacagcttcatgaactccaagccaaaatcacagctttgagtgagaaacaggtaggggaaaaggggaggggggcatatttttaacgttgtgttctaaagatatgtctgctcgaggcttctaagagaactgctatttttcctcatgtgtgaaaataagtgtgggcagccagacttggttttaattttgtttgagctctgtttatctatttttatttttggttgaaatcagtctctagagtatcccatggttatatgttactggcaaatacctaaaagcaatgtggcaggctgccgttaactgtgttaattaaactctatagtttacctataggggatggggtaaaggcagttagtgagaataggtgatagagaatcttgtaggtgctgcgtgtaccttgttacctgtcttaaagccttgagctgacattaaacttactgtggagagaatcttcttgtaagtagattgctctaaatgtaggtttcccattctaagtatggtcatgcctttatgttaatctctattagatattgacctactattacgtgaaaaaacttcggtgaaatgttattagacttattctatatagggcaggagaagaacatcttgcttttttccaaggacacctggaaaatattctttggaattttttgtatgatgacctccactttaccaattcaggcagtgcctgccaccaggtggagtgtggcaattgatagagctataagtaaatgtttatggtaatcccacaaagcatttgttwtcttgtttcttccccaccactctccctctggttagaaagagtggttttctgtcttggagtaggtgaatatattaatcaaaagaataaggtgatttgcagttgatatttcatgccagtgacattttattgaggatttttgactaaatagttctcaataactgatttttatgttgttayttaatgttatttagtgaaataataacaatgagaataattcatttctggagattttttattgtgtttctattgtgttttcatttaactgaggggagaaataaactttgagaattatgtggaagagatatgaatcattaatgtttcagaatagaatcatcttccaagctgagtgaacaactgctttatattcttccctcctattcttatgcgtccccatcttgtcttctccacagacaggaggtattttagattagggaattgccaaactaaaattgggaggaggtgggatggtggagaacaatttgtaagaaaaaatataaacagagtcggttagtatgtatttggctctgaatgtgattcagttctctaaagtcaacatgatgtgtgttagtgaaagtgttctagctttagaattctgttagcgctgagcctccttatagtttcagggttagtttgacaagacgccaatgaatgagtcacatttgctgaaaaattcacgtgttccagcaggggaagaaggtgagaactgattagtggagtaggggttgggggatgctgttgcaaagttaagataacttaagactacatttggggaaagtgggacaatttttggaaatttacatctactcgaaatttttgtttgtgagaactaacatagatttggtttatttgtaactttttattctttaatcttttttctgttagggaccttactgaatagaaaattgcaactatctatgttaagacatttcatcaagtggcaagctctaattgttctctgaactaagtttgcatttcaraaactggaattttaaaaaatgtctaacatcaggaaaactttaggtatacaaagtaagtaaaactagagttagaaactgaaatccagtcctgcaatttttatatttccttaactgttaaaacaaccttcttgatggaacagaaaaatatcatttttaggtaggctaatacttgaaggaagcacagctgtaaagttcaaaagctcatccgtcctcagacttattttcaacatgtgatattactctttagtttagaatagttttattggccaggcacggtggctcacgcctgtaatcccagcactttgggaggccaaggtgggtggatcacctgaggtcaggggttcgagactagcctggccaacgtggcaaaaccccgtctctactaaaaatacaaaaattaaccgggtgtagtggcacatgccagtagtcccagctacttgggaggctgaggcaggagaattgcttgaacccaggaggtggaggttgcagtgagccaagaccatgccactgcactccagcctgggcgacagagcaagactccatctcaaaaaaataaaatagttttattttagaacagtttcctaatgctatatgccttccccccycccgccaaaagagccacttatcctctggcagaacctaaccaattttccttccactttaataactaaaatctgaattaccttatccgtatgactgatattttaagttaacattaattttttgttagaaaaatttaaaatacagaaaagtttgaagaataatgtcatatttcacacttaaccctttgtcatatttgcttctattctttttctttgtgcatttttctgtaatcatttttttcaatatttattagaaaactttaattatacaaataatggactcatatattctcttcttttgttttattaaaaaaagttgcatctgacaactttttttttttttgcatctgacaaaaccattgcagatagtcactatttcttgcggtagacactagttcttattcactgttgccacttcaatctttgatacttactcagtttctcccttraaactatgtaatcgtatgctccatttgggaaaatacagcctttagtgagcatccttcatgactaaaactcagtgaatttcactgaattcttggttggaagggtctagtgcttttaaagtgtaacttgagatttctgaaagaaactctggcagatttcaaagtcagcttcttgacctgcagggcttcaatttgtggctgacagttttaactcagaaaatccctgacttgattggctacataaattatatgttatatagccattaagatcatggttttggaaagtattttaatgatacaggaatgtgctctgaaataataagtgagagtatacacaactttatgtgcattacagtcccatttttatgtttattttgtgtatatatgtatgtgggcgtgtaaacgtatgcaaaaacagtgtcagtataaaatattggaaggtggttaagtttacaggtggtttattttttctgtatactcttatgtatattttctaaatgctccacaataaattacgtttcgcttttaggatcagaaatagacaagaaataagatttaaaaaatttttttaacatcaagctcttgtctgtttcaggcatagttcacatttaaaaatctaatgacattcttctcatggtattaaatatatgaaccactctaatcagagaatccaacttttttttttttttttgagacggggtctcgctttgttgcccaggctggagtgcagtggcgctgtcttggctcactgcaagctccgcctcctgggttcacgccattctcccacttcagcctcccaagtagctgggactacaggcgcccgccaccacgcctggccaattttttgtatttttagtagagaccgggtttcatcatgttagccaggatggtctagatctcctgaccttgtgatcctcccacctcggcctcccaaagtgctgggattacaggcgtgatgtaatgctgaagtgtggaagcaactattaatttatttaacaggattcactctcattctcactccccayaccctgattttttgataggcatatgtgatcttttatggagatattctgatatggagccaaagcacttagttgctctagttctctgctttcattttgctttcttgtagaggcaatcttaacattccgaagtttgttgcttgttactgtggtgcttcagggttaagccatcgtggttgcagcttcrgtttccccagcctgaacagtttgctgccctatctccctttacctggtggcctcctggtgaggtttcatgtcatagcttaaatgtcacttcctcagaggagctatccctgacactccttccactagtcaaaatcaactgtttctattattatctcacattgaaccatacttttccttcatagttattccatttagacattcagttgtgaatgactgaaaacccaaaatgaaagtaatgtaaacagggaaaacttaatttctgtctcatctaaaagttctataggtccccctagggctagggctgctgagagtggttccacgatgtcagggaacccaggttcctcctattctgttgctctgccattctcagcatgcagctttcacatcatagtccaaaatagctgctccatctggtaagaagggggagaagcaacaaagagcaagccctttattttttaaggatgtttactagaagttgcatgcaccacttccagttagatcccatgggcctgaacttagtcatgtggcccctgctaggagcaaggaagtctggaaaatgtaggtagtttattgctggtagtcatggccagataaaattcaaggactattactgagtaagaattgggaaataaatactgggaataattagcattttctattacagtagcatatctgtatctgtaggattactattttttaaatatctgtcttccttattagattgttagtttcaggaagtcagggaacgtgtttgttttatttgcttttttattcctagtataatatttagtataatatttaacatagaatattaacacagaagaggcacttatattctttaaatgaattattttatccacccgatcttttgctctgcttatattgtaatttttttatagaacggtgtgtcttgctttttatgctttttaaactaacttatgaaaatcttcttagatttttgagtgttctttgagaacatgatttttaacagctttaaatattagcataattggctatatcatgattttttaaaactattcttctcttgatgatagggtgtttccagttttttttttggctattatcaatattgctttgatagatatacccttttatatgaatgcgtgtttctctctgatggtcttaggagaaattcctagatgtgtgatgactggatgtgttggtcacctattaccctaacaattctgcatcagaaactagtgttttattgagtggctttcaacactgccagtacttatacctaactggtcaaagatttgattatctctttaagaaaaataagcttgatgaagtaacttacactttaataatgtgccatattattatagggcattttacctaagtgtttattttcacactaggtctgtaggtcatctggggttctcctaatctaggctgtacttggccaggcacctctgcttcagtttgtgggctggctgaacttgcctttcaggctgcaggtttggttaggtctactctaaatgtgtttattctgaggccttgcatgaagggacagcagctacctggggcgtattcattttgtagtttacctaagagcacaagaagcaggccaaactactaaaataattttaagactctgctggcatcaggtttgttaacatctcattagccaaaagaagccacatggccaagccttgcaaagttatatgacaaagggtgtgaatgtataattttaaaacagagaggatatggaaattgaaaacagtaattcatctaccgcacttagtctaaaagtataaaaaaaacttttgctacatcaaaaaaaatttttaaccatgtatctccaaataacccccagaaaaggctatatcacattaatagcatatattgataataagtgattttccccatgagataccctgtcacaggggaaaaaagcactctgctaatttggaagatgtattgatatgcatttgatgcttatcaggaagtatatttttcaaagaatttgccgtttgtccatggcacaagtctattgtagtattccataaattatcttttggttttaaattttgttgttctttcacaccttcttctatttctttttactcctttttagagagatagacccttctgtagtctttgatcttttctacaagtttccttctctgactctgtttaaaaattatagtcaccaggctgggtgcggtggctcacggctgtaatcccagcattttggtaggccaaggtaggcagatcacctgagatcaggagttcaagaccagcctggccaacatggcgaaaccctgtctctactaaaaatacaaaaattagctgggtgtggtggcgggcacctgtagtaccagctgctcaggaggctgaggcaggagaattgcttgaaccctggaggcagaggctgcagggagccaagatgktgccactgcactccagcctgggcaacacagtgagactcgtctcaaaaaaaaaaaaattatagtcaccatttcttacagatcttttcaatataatattagatgaaatacttttctgggtttagtaagttcatcttgccgtttatggaatcattctcaattttaaatttgaatatattttaatacaagattctgaagcttttgggaaagaagtttctgtccctcctataactagttatgtttctgatctataggacaacataatttaagctaattaggtaactgaaacaaaggactgggtagggatgggggaaccagaagtttgattctattcctgactctgtaatagacttgttgatagattttaattattgaataacttaatatgtctctttccatattcgtggaatgtttggattatgcattgaggagttaatgcacgtgtatccattgagtgcatggagttcttttgtaggtgagttctgtttaaaaggaaattgttggctgtagtcatggtggttaacttcatctcatatgtaacactttcatcttacgtgtaaagtactacttttctaagaagcttagaacatttaacatttaactcaatcacaagtgcatcattgtgatacataaactgagatgtgggctttatgacttaaccattattgtataatttatcagtatgagattcaatactagaatccagattgctgtactcttcattcagttttatttagtaactgtagacctttatctatcaaatattttttgaaataggacattaggcaaaataattacattgcctttaggcttcattaccttggagtcaaataagtaagttagatcctatagtccttgtgttggttacctgatatatgactatctccagcctctaataccagttactgtaaaatgttaccctccgtggttcacagccaaactagtgtgactggcacatcacattggaatttaaaattattgtcttagaaatcttctcattgtgatggaaacctgactttatccagagcctaggaatttcctaagatttagtctagttcatccctcctgtgtaatatttatgtaaagccattggtccaattgtttgttgagtttattgccacttgtgtacatcagaggacatcagctcctcgttttcatcaaatacaggaaatgtaatatttcaaatttctcctggtgaaatcctattggcttatattcagccaagatgagatgaaggaaaggctcagaaataactggctgcaagtatgaaagttctgaagatcgagaggttgtatatatgtagtgtgactgtggttcccagtgctgtattatctgctctcctttttacctgtcttcttggagtgtgattgtgtctgttgctgctagttgtacctaagtggtcaaagattttactatctctttgagaaagagatgcttgattgagtaacttatactttaataacgtgccacattattatagggcattttacctgagtatggcagaggaaatcaagtcagttggtkacttgtaccagatgcatcagtttgctgagttaaggcagagcaatcctcttgtaagtttatcctaataacgtatttttggtgctggcaaatggaatgacttttaaaattcaaattgaatttcttagcccttgtcatcaggtgttatatatgttgacactgggctactagaatctactgactggaatctactgtattttttttttccactttgctcatctattgcttagctgagagcagttgcttcaagctatgaatatcaaatcaaaggccaagtttgtggaatgtttttcaagcctgtggtatctgtcttttttcttttgcatagaacatatctgtatttcagaatgtttagggactcttccactctttggagaacgttaatttttgagtgataggcagtgtgaataacgaatgctttttaggagccaatataactgacaccacctctctactatatcatgtgctttcaaataatgtgcatatattatatatatgtatgctttcaaaaaatccattcccatttattcccttttctctaggatctgtgcttttcagacttctttatcattcagagtctgattcatctgttttattccacatatatttattgagagtttactctggtgaaaggcatgatactaggcccrtggaggatgcagagaatgaaaatcttggcagtgttacttccatgtgactggttatgacctacaaggcattcaagctcattagcactgatacctttagcaactcattctcatacataccccataaattctctgctgtcacctttactccctgggctctctcaagactgtgccttcttcacacatcctcttctctacacctggaattttcttacctttttacctgattaattcctatgtatcctttgaagactcagcttaagcaaggtcttctataagcttttcttgacttctttctaccttccaagcagagttagacactcctcttctgtgtactcatggtacttggtacttgtgcctactttatttggcgctcattgtggtacttatttgcactcatcaagttgtattgtaattatttgtaagatcctcacaggcaaggactgtgtcttgctcacatttgtacccctcaagtctagaatggtagatgagcagcaagtgtttttgaatgttattaattcattatgccctcagaaagctggtaaggtggccaaggatgtccctaccaagggttcaccatcaaaagaaaattcccatttaaatgattcaattcagttttttttttttttgtggggggtggaatattcttattattatttcctacttcagtgttttaggagagttcagtgccattattaactctattccaatttagagcagctttatcttagtttcagaaaaggacagtttttattaagtgaagttgtataaactagtaaatgagtctggggccaccagtttgaaaacttgatacatctagaaacaagtctcttctgcaatgttactacgtcacttacctcagaaaacccttcattttctcactcatgcccrcctccccattgaactcatacataccttaccctctagacttttcagatacttgttatgctgtgtcgtttcttcaacctgggatgtttttacctgtcttctttgcatagtgcaaacctagggtcaccttatacctttcttccggcagacccccttacaggacaacatagtacagaaatccccacaaaagaaaatttgaaaacaaatgtgattgaatcaaggtgcattagtaagtaatacataagtaagtaatacataaggtgcattagtaaagaatacattagctatatatgcatattatggaataacatgtagctgttaaaaaataatgaggtgcttaactgaatggaaagatgaatagaaagttaaaaaagcaaattgtaaaacagacatacrgtataattcagtattagtttaaaatgcaaaatactaaaaaactgtgtttgtatttatgcattcatggtcatttatacttgaaaatgcatgggaaaaagtctagattatctagaattgtttacacagaaccattcacagtgattgcctctaagaagtgaggttcaagagagctagcacgtttaactttatatatgcttttgttatttaaatttatttatttttattttgtttgtttattatttttagaggcaaggtcttgctctgtcgcccaagctggtgtgcggtggtacaatcatagctcgctggagtcttgaactcctgggctcaagtaatcctaccacctgagcctcccaagtggctggggctacaggcatgcactgtcacgcctggctaatttatttttatttttttagaaacaggttctcattttgttgcccaggctggtcttgaattcctggcaagtgatccttctgactcagccttccaggtaactgggattataggttcaagccacaatggctggctgaatttattttttataaggaacacatattaatttttaaaaactgttgaggtataccatacagataaatatctaatatatatttatatgtatgtacatatggctcaaatatattattacacactgaaaccactaggtaactaatacctatatcagtaatcagaatatcactgtcacaacataaatcccttcgtccttccccagttcactacctcctctaccagagaaactacctttgttacctctaacagcatagactaatgttgcctgtgtatcaaataaaatagagcctacttttttctgtctggcttattttgttcaacatgtttatgagactatatccctttcttttgaagtagtaaaaaactttttacttggaaataattacagattcacaggaagctgtcttttgaaattttaaatcactaaagaaaaaaagtttgtcatctcttggatgtgcccgccctaacatctcatggcatagtcaggtggtttctcttctgtgagccagtagctccttgctctgtgacttttgtgtagctcttaccacatatcttttaactatttgtttgtgtgtcatttcttcctctctagattgtgagcctctgtgaactgtgatcccttcacccttatacacccgctttataccctagtgcttcacacacagtggcgcttaaacaacttttgttaaagaaaaggagtaaattctagtcctggctgtgctagtcactgacaggctttgtgtccattgaatttctctgagctggtttcctcaactgtaatatagatgttataattgtatcagtacagatgcttttrgctgtagtttagttgtagttagaaagtccaactaaaagtggctaagatagtaagtgaatttattgattcaaataaggagaatttgctagaattgctcagttcagcagctcagcaacactatcaggacccatattcattctggtcatctttcagcactgccatgctcagcatgtcggcaaccactgctgtwgtcatgggatggctgctgtggtgccaggctttacatcttcacacatcaacatcctggggcaaaaaaggaccatttcttattaaatatctctttttatgattatggaaaactttaattagaagcctttcaacagactttgcatctcattgaccacagttctgtcatatgccaatgcctagttcctggcaagaaggaggagtccaagactgatttgtgtcctggagctggagattttytccttgagcatttggaagctagatacctaaacaaaactgttttttgttatcagggaagagaaagggtggagaagaatggatattcaagaaagttaacaatgtctgtctctataacactttcctctactaatgtaaattaaggataatgtatatctaaaggtatatgcatgctgaaataccatgaagttataatacatcattagtgcttgttactggctctgtggattattttagaaaagtctccctttgccaccctagctagcagcctgctttagggctaggagtacaaaaataattttactctttgccaaagcaatacattattagaagggtaaatccattacagaaaataatgtaatttatttcaaatgtgaattataaattattttttaattttttggtatttaaaaattgtctataaactatcattatcgttgttgatattaatatggtgttttggatttctcctttttaaaatgttgaatatgttaaatgacaggccaaatcatatattccttcacttctttttttccccaacagattagggtataagaaccagacaggaaaaagaagtttactstttaactagtatctttttatggtagctggttagatgggaggctgtcctgcaaaattatgttttcagaagatatgtttcccaaagttgatttactcccaagtttaggaagcaaatgtttgtgtgaatcagcagggtttggctaacctctctcatcctagctctatctgaaaaggagagagggattcttagtttctctcagtgaagcaccaaacattcctttgctctgagaaatgaggccctacaagttttcaactaatctgttcagttgtcaccttttctcctgctcgcacctccatcgccttttaaaaaaccctcccactttgcccaaacaaattgtatcattttgaccaagaagaatattaaagatagagatcagttctgaacttaattttccctatgaacagtgaatgattattactcatctgcttttatctagtgcttctgtcatctaatataggaattggggaaaaaattaacaactcctttcctgtggagtcaagaagcacaaatgaacttaccctgaaaagttctgttacctgaaggaaaataatcaagtgaaattgggggagggtgttaatcgacagaacttgaaatttgtttttctgagtatgtgattttatttattagagattctagaagtttgtcttgaagttgagacaaattcacataagattttgagttaatccaccagtgccttttaattataacatttataaacatctgtcataaaaactgatttctgcttatcctatgtcagatgaaacagtatttgcaggttatcaaaagtgctgcccctaagcctcatcagttcctgctaatagctgataaaattatatataactctttaaatttctagtattcctttttatagcttcccttcccctagctcttacttgcttaattatatactttatgggtaaagtggttttagccattacttcagggtatccttctgaagagaaattgattagttctccaaaaatggaaagactagtatgattctgtagggcagggattggtaaaactatggcttgaacctgggcaaaatctgtcctgccacctgtttttgtaaaattattagaacacaatcacactctttacatttacatattctctatgactgactgcttttgtgccacaatgacagagttaagtagtcgtgacaaagacagtatggccttacagtagttactatctggttatttttagaaagtttgccaatcttactctagagaaatttaaccagagaggcactcaactcagagatactaggcatcatgtaacagccttgggcaggagtgagtgctacactgtatatagactgtatgtacactgaaaacagggtatatggtgtatacagaatagtaagagctccttctcttataaacatgccagcccccccggcgaattcaattcattttgaacacctcatttttttagccacttttattttttattctcttcgtctctattcctctccccacttctctcttataggtttattgagtcataattaatgtaaaataaatgatacaccttgaaagagtaatttttgatggtgtgaaaccgtcatcacgatcaagatgagcatatgcatcacctctgaagtgttcttggtcgtctcgctcatccttctgtcaatccagtccccaggcaaacactggtctgctttttgtaacccagtttttagctgttacaaataacattaatttgaacattcatgtccaagtctttgtgtggagatctgctttcatttctcttcagtaaatgccttagtatgtctgggttgtatagtaggtgtgtttttaactttttaagaaactgccaaaatgttttccaaagtgattgtactattttacattcctttcagtagtgtatgagagttctagctgctccacattcttagcgcttcaatcttaaatatgaacatagccaagaatcactagatatttaagggaagctgctaatgtgcaagtcagaacaggccaagagaattggaagggaccattcaaaataactataaatttagatccctagatccgtaaaagaagatattgcattagtgaaacaaggagaggatgctagaaataaaggaacaattagaaaacagaaacaattcttgatttaaaaaaaaaggttggaaaacaaaattggagttgtttctcaataaatagatggaagagacaaagggggatagacagtagaatagagaaaaattttaagagggtcacccagaaagtctcatgcctggctaataaaagttctgagacaagggaacagagaaaatggagaagagaaaaccagccaataactaatataaggaaatgtcccacaaccgaagggcatataattccagattaatagaatccactgagtgcctaaaactgtgaatkaaaaaaaccccacaccctcataccaaggcacaacgtggtgaaactttagcaaaacaagaataaaagatcctaaaagcttccttagaggaaaaaaaaaaacaaaacaaaaaacagttgcaaacagggattgggaatcagatgtcatcagacttctcagcagcaacaaagaaagctagcagtcattggaatgatgctttacaaattctgaaaagcagtgatttccagtatagaattctatacccaacccatctcttgatcaagtccggggatagaatagagacattttaagacatgcaaggtcacaaaacttacctcccatacatcttttttgaggaagctattggaggaggttctccatcaaacgagaaagtgaaccaataaagatgaaggcattggttccgaaaacagggaattcagtatcaaagaaaatcccatttgatgaagggaaaaacttagataattgatgtacaacaggtttagaaaacagccagtttaggttggacaggaggatggaggacttaggagaaacaaagctaagaaagtggaccaatatatcatacaatgtgttttgagccattattgagagacattgtatagtttctttggaaagtatgggaaagaattaattgtaggaatatagaaaaccaagcaaatgacaaagcaagtcaattttaagttccaggaatagcaaaatgttgtacaagaagtatagttgtctcaccaattaattaatgttatttatataataatacaagccttaaatatgggtttaatcattaaaatggcaataacgtccaaagcaatttacagattcaatgctattcctattaaacgaccattgaggttcttcacagaactagagaaaactattttaagattcatatgggatcaaaacagagcctgaatagccaaggcaattctaagcaaaaagaacaaagctggtggaggcatcatgctaaccgacttcaaactatactacagggtcacagtgaccaaaacagcatggtactggtacaaaaacagcatagactaatagaacagaatacagaacccagaaataagaccacacacctacagctacctgatctttgacaaacctgacgaaaacaagcaatggggaagggattccctattcaataagtggtgctgagataactggctagccatatgcagaaaattaaaactgtagcccttccttacaccatatacaaaaatgaactctagttggattagacttaaatgtaaaacccaaaactataaaaaccctggtagataacctcagcaataccattcaggacataagcatgggcacagatttcacgatgaaggtgcaaaagcaattgagcaaaaattgacaaatgggatccaaataaactaaagagcttctgcacagcaaatgaaactatcaacagagtaaacagacagcctacagaatgggagaaaatgtttgcaaactgtgcatctgacaaaggtctaatatccagcatctatatggaacttaaacaaatttacaagaaaaaaacagtcccattacaaagtgggcaaaggacacgaacagacacttttcaaaagaagacacacatgtggccaacaatcatatgcaaaaaagctcaacatcactgatctttagagaaatgcacatcagaaccacaatgagtggttagaatttacttagaaatagtctcttttaatatcaatgaattcttaagtaaaaaatattattttatataatataacataattttatatgagtatgtgctaagattacaacttgtttcttgcctttttttctttcttagagctgtaggaggagactagaatattggcattaggagttgaagtccatcatttctttaaacatttgtttttcaaaagtttataaaagtaattcatggttggggtgtagtggcttatgcctgtaatctcagcattttggtaggctgagatgggaggattgcttgaggccaggagtttgagaccagccaggccaacgtagcaagaccccatccatgttttgaaaaagtcatgcatgtttatttggcaaattcagcaaagagagaaatcaaatttagctgtgatcctacttccatgttttagatcctttaagtctttttttctgttccataaatttatattaaaaaataaaatgggctgggtgcagtggctcacgcctgtaatcccagcgctttggaggccgaggtgggtggatcacctgaggtcaggagtttgagaccaggctggccaacatcggcgaaaccccatctgtactaaaaatcccccaaaaataaataaataaaatcagctgggcgtggtggtgggtgcctgtaatcccagctacttgggaggctgaggcaggagaattgcttgaatctgggaggcagaagttgcagtgagccgagattgagccactgcactccagcctgggcaacagagtgagactctgtctcaaataaataaatactaaaatggaggccaggtacaatgscttatgcctgtcatcctagcactttgggaggctgaggcagaaggatcctttgaggccagtttgagaccaacctaggcaccatggcaacatcccacctctacacaaaatttaaaaagttagccaggtgtggtggcatgtgtgtagtcccagctacttgggaagctgagtcaggaggattgcttgaacccaggaattcgaggttacagtgagctatgatcataccactgcactcccatctgggcgacagtggaaccctgtcttttaaaaataaataaataaaaaaaattgagattggtattgtacttattattttagaaatacttattttgtctatatcttgagcatttctttacattctyaattattcttcaggaataatagtttttagtggcttgatagtatcctatcatttgggtagggtattatatcatacagggtttatttaatcaattcactatttttagacgtttaaattattcccagttttttactgttgtatgcctagctctgcagtgtacatccttggacgtaaatatttgtacgtaattttgattatttcctagaagtaaaaaaaatcagataaggaatacataaatagatgcttcttcataactttctttggtatgtatagtagaatctaactccaactagcttaatcatgaagaggaattattggaactgtattagggcatcttgggtgaccctggggcagttttaggggctggaactggagtctctgtctcttgtgtctcttcatctttctttgcttctgcttcatttctgctgtctagagattgactttctcagcttcttctgtactcgtagcaggcaaaaggctctggtccctgcgaagttcccatgtttgtatcttctccattctagatactgtcccagacccactggcttgttcttgttccagattttgtaaagagaatgtaataagcctgctttgagccaggggaccatattactagtacagacatggctagatcagagagcccctgtcagagaaaagagttctgaggtaggcagatagcctaacaagtttctgaagccttttatgttacctaattgctctctagaaagactgtccatgtttagggtcagtcattttattaaaggagaattatttaacatgctagatggaatttttaccttgaatctaatgaaaagttttaaacctcaattcatttggcaaataattatcaggcacttcctatgtgtcaggtacctttctagatgctgagaatatatcagtcctacaagactaagttcctgcctgccctttttagtcagctgttagaaggtgagtttcctttgaactgcccttcaaaatatcctttcaaagtcttaatcagrtttcgttttaccaacaatgtgacacagttaagcctagtgtaaaaaggaaacatctataatgtttcctctgttggacaccattcatttttttctaagtaaatgattggaagttgtgaggttataatacttgacatctaagaatattagcagtttaacctttctccttctcttacccccatggtaaggcagcagtagaatgtagggaggtgttcaggctatgactttctagtttctgttttctgcaggtttaagtgagatccttcacatttaacaaggctttgttaaaagttgagatgttaggggactagagttctccaggttggaaacttaactgacggaaaaacgtttgcaaagtaggaaaacaggtatgttttgaatttccaccagaaacaaattagactttttttcttgatttgtgcctgtcaggttggtagttaagtcacccagtgacaaagttgaaaatagtgtgtgtgagagtggagttttagaggaaaattcccttaagcaccatatttttacacttggcacctctgagtcggctctcatctagaaaatttatgatgcatttatgccaaggttagtgtggagtgccttctcatgagacccgatctcagtttcataggtcctccttcaagtgagctagggtaagttctagaacagcctagtaccttttgcacttgtgagacctcttgttgctggagttagggttttaggtgattttacttatttcagcttgagtcatattatagatgacattttaaaagagataccaactctctttcttttttcctctatttgaaaagcaaaacatggagaacagaaagtacagtttttccctttataagtcaagacatttcattctgttttgtagtttctaaaccagcctgggttcattgggaaaattaagccctaatgctctgggcatctgttatatgtattgaattaacactcctgtgcatctagattgataattgagaaaatagtcactgaaatatttgtgttttttggtttaaatgaggaatcctggctgaggaaggctgatgggaaactctctcccataaaacttatagacatgcaaagattatagctgagttgagtgtacattgatagggcaactgcttatgtagttccaagatggaaaataaacaagtcttaagcattactagcccactggacatgacccagtaaaaactgttctgctcttagtttccttaggcacaaaatgaacttggggaaaaaaacytctcaattgtagtttttatataaaccaaaacagattaatgtcaataatattttttgtgtgctaacattttaattttttcggcacttactataaccatcttgacttttttttttactatatttaaagcaaataaaatcagttatctttaagctgaggtacttgattagttttaaaaatagataagcaaaaagtacctcagcccactgtttgtgcttgtaaataatgtaattgttttatggaactgagtcctgggggaggaggacagcatgagkattgttgactaaaagtgtcagggttttcaggaagcacaaggattctatagctaatcttaaagtttccctctctaagggtcttttaagcagcagcaaatgtgaaataaatctacattgtatttctgccgctaaatcctgattcattgattgggagagccattattggtgaagtaaacgtacaggtgaaacagtgtttcatgggtaataaaaatgacattgtctatcttgaacgagtttagatttcttgatattaacagaagctgttaatttctcctgtctccattctcccccttttagaaagacgtttacaaggacctattttttaaaagcccaatttcttgttttaaaatcttcactgtgatattagctcatactaatttgagaactatcaggatttacaggttcttaaagtaaaagttttccttttgtcatcacctccatatttaacccagacataattggagttatctttgtcatagaaactgacccacacagcccaagccagtgaaaatgtaaagtctgttttactctctgaatcccctgccaggtgtcccatggggtaagattggaattattgactctcttgagaaagacttaatgaaaacaaaattgctaaattgctatctaacttaaaaaaatttaaatagttctgttttctccttataagatgaaattcaaaaccggaggcattaaattacataaagggtattttgttactttaagataggaaacagagaagcaataactttatttaaaaaaaacaggttacatggaaaacttgtcattgagaaagtattgcttgagctataaagaagcaaaaatattttaaatttcaagactttcaataaaaggtacattaaggaacctcctggtggcagcagttctttgtcaccagtgtcctcatttgagacacctgccaaatgggaactgattctgaattagcaaaacaaaactattcaatttgccatatccttttaactccaagtaaaataatatgttgagcgtttaaaaattctgattttaggcttagatcgtattatattttcaatgaatcccctgctatgtaacttataaatgccttaaaggtaaatcagggagtctggatgtaaattgttggggcgtttatataaagagattccatgactcctgctgcctctgtgcctgacattcctttgatgatgtaatgtatagacttggtaattttgttggatctcagttcagatgacctactagtaaagggatgaattgactgctctagggaattggaaaggtcaatggaaagaaacctgtggctagcatttgtgtaacagtaaaagctctgtggagagcaaagtctcaactgactcactggtttaattgtcactcctcattctgaatgccagttctggtgggttactgtgtactctacacttttcccatcagttgtagaacagttatcaagagtgagttgtgtttgtttccaaacttgtttctgccatttgttcttgttactgtaatttaattaactattattaaaccaatgagttttaaaaaaccaagttgttttcatgaaatccataatttaatgctttggaaatgataaaaaaaattactaaaaatttgctgcttwgttatatttgggtaagagatctataacagaatgggataaattattaatgtccagaaggattctacattcagattgcttcaaagtatcttaagttctcgccataatttaaaagtccaaaatggaaatggtagaggatgcattataattatggtttatgaaagaaagacgttttggcgctctaacctgtagatccatataaacagaaagcctggtcctgtattacaagattagcaaatgaaggttcatttaaactaaamtaaaatgcttaggtatgcttatcaaatgatttcctgctttgtatgactttttttccttatctgatcaactgctggtcctagtcgttactggttaaaagagcttctactgtattgcttcaaggtgtagagctgaaaaggtaatctttcaacatttaattcattcagtcacaaatatttatggagtatctattatttggaggcattccactcagcctcagtgatgaacaaggctgaaaaagcttctcttcttaaggaacttaccttctagtggcatattagtgagagtatagtgatttgaatagtaatgatttttctcaacagttgtagagtaataagatctagtctttgatttgaaggccagtgccacatctacgtgtaaactgctggttctcagccctagctggtaccctaataaaatgaaaagcttttgaaaaatcctgcatacagggctgcaccttagaccagttgaatcagaatcttcgagaatggcgcccaggcataaaaagatgtgtaggagtaggtaagtggattttaaagttgtttgatattgcccaaactaaattggataaccccaagccaatttgacatagcatttttattcctgaatcatctggggacaaatctgtatgttgttagtttgtcagagttaatgatttgtttgaatcttgctagagaagaaactttatgtgatataattttcaagggttactatcatattaatactctgactttcagcttttccttttagaaaaaaatttttttaaatgagttggttgaaattcttctctgactatagttagaggaatacaacttttactagtgtattttagttttcagaaacattttggtgggtgagaagcctcaagaaaagcatcacatattttatttgcttaaaatattaatgttcaactttcttcctccactgccacgacgttgcttgtgaaaaagcttgtggcgaagtgggggcaaaagaagaaaggtccaaatggaatcgtggatgctgccaatttttagcaggttctccaagagaaagtgaatggaaaagcctggaatctcattggaggggttgtaatcatcacatgcagcagagcaaggtcatagtaacttttgaggtgcctttttccaaaaggtttttgaaatatgtcacaaaaaaatacttgaagaagaataatttatgtgattgattgcacatagttgctaacagcaaagggagttacaaattatgttactgccaaattaaccaggaagaagaacgggaggaagatgaggattgaaactcatctatctggaatattttgtatgagttattgaataagatgagaaacaaacaaaaattaatgttcagcctgtatgaaacactgattaaggttagaaccccatgmtgagccatggggttctttttaccagtcatggtatacatataattatatatataatgaagaaaaactaattgatgtcaaagatgttgataacatcttaaaataaaatatcctcttaagaatgatttcatttatacttaatatttaggcccagcaactttggaggttgaaagtatagcacatttatgatttttcttcctagctcttgcaaaatattagttgtgcatttcttgcttttatttatacacttatatcaaaagaggactagaagttagtaccctttacttttaggtatttgtttcactaataattctttcatattgatattttgtaaatcagttacatatattataaaaagtgttttattctgctatccatgagagatgtgatctagtgttctgtgaaaccaaacatttatcaggacactaaatcaacttctaaaatacacattacatttaattacaaattttgaattgaaaatgtaatcctaatagttcagttctgcccttagaataataatgctttgggagggggcacattactcgaggcccttagattttcaccttgttgtgtagaggtagcttcttttcatccctgatttgccttcatgtgagaattattcttctacttcatcttgtagcacatgtgtatctgcatgggcactcacacacacacatgccccttgaagatggaactgttaattttccctttctgtgatgcctttgcttattcatcatggtaagcctggtaagatggcttggtcagagatgtccaagaaggtggaaaaggcttgttaactggaagtaaaagggaaaatatttaaagacttactaggtgattaactgctttgataaagatttcagaggctccaccagggcacatggtgaaaaactggtagaaatataatgttttcttatcagcactagcagctaggagcaatttagcttcatgaatatctttcttcttctatccctaccttctgttttagttaaaatattgttagctcctgtgtagtacttagcagttttcaattctgtaaagtaaacatggttttttttttttcttctcagagttcagaaaactgataggcagtgaggttgaatggctagtgcagaggtattcagtaggtatatgagtgaagactcttctgctttccagtgatagaaactcaattcaatgttgttgaaggaaaagagatttattggtatatataagtagtaagttcagggatatagctgctttcaggcatggatggatttaggagcttcaggacactttctccctcttttggcttcatttgcttacaggctgtcctgtactggcagaggttgcctctggcagctctaggtttacagcctgccatttaatcaactccattgaagagggaaagttttttttatttgtttgttttttcctggaagtaccagcatagagcatgggcacaagttttaggtccattcttgaatcagtcatccttttgtggccagggaactggagtcccctcattaggcctgggtcatatgctactcctggatcatctcaaccttgactattgactattcctttgactgttttcataggagtaaactttgggaggctaccttatatttggaattctactagtagtttgaaacacatatgggggaaagaaggcttgatagaaaagctatttttggatattttaactgttccaaccattgcaagaggctcctggtttctgtacagaagaatttttgtcccagtttatcttttcttcttctgcatgtttccccacccccatcacctttgtttctgcttcttagcttaagtccattccttcatccaatcctttgtcttcctctaatatcttccttcgtggtagcagagaccagtgtcctcacccccttgagttgaggcatgatgaccattctcttccttcaaggaaagtactacagaatggaattgcacattggcatgcttaaaaacagctggttaatgagaactcagtttttcttgtgtagacaagaagctttgtgtttctgaagaccaaagttagagtactctgtttgaggtttccttaggcaatttcaacccatttatctctcgaggccccagaaggagtctggacactggaaatgaaggcctagtaaactcttttgtgcccaagatggtatgagaatggaggtgggaggtaatgstaaatgctctggttttcattccggctgtcacaagaataaaaatgacctaactgtattttgggcccccaggcagcactgaaatgacatgccacctgctgacctaatccatttcatttctggtactaggatagccaaagcaatttgctcaatttgcaattgactatttactctttaaagcagcaatgattagatctagtataagaaaccacatactttatttatcaagaattaaaacttgaaaggtggaaagttatcctttttggaagaagccatttaaatgtggtgtattttacctcagagagactaactatgcttttagaaagctactttttgctgctgtttcccaggaaggagtacaatctgctgatgaaatttaagataacagaagtgtttctcagcagcagctgaatggcacagagaactcggagactgctatatttatctttaggtaaatttttgcaatttactagaaaaaaatctgtgtagcatacaagcagattaactcatgttaatccagcagctgcctctctggcaaatagtagagaggggtgtatgccatagctgtagtcctgcacacatactcagttgctggacatacttcctttgtctcgaacaatgccaagagccacataggctgatgtgttcctgtttcctcaattttaatttttaaaaatcgtattaattcccattctttctcttctccatcaaattgaagtaattaaaaattgtaaattatagtttcaggatcttggactatgctcttgaacattgtgcttaatagttttatgtatagtactgcaattgatgaattaaaattatagaagtacctacttcattcccctcccagagatgcttatatcagtaagtaacatgctggcagaattaaggtgtctgcttccagttcagccctcttttatttcttgttgctttctgtgattcggcagctatggaatttgcctccctgcatgggcctctcaaaagccagctctcctgctctccccaacatgctcacagtcagcagaacagggaaatcacactgatcagcacaccactcagttgatcaaagtaagccggccacttttcttcaacaagacccagtggtattagtccctatgcctttctcctgccgtgagcaaggccactggaatgctgctggcaacattagtctgtgtgtaaaaaagctgcttatgttccctttactgtagctttggcctaggccaaattaaggggggaaaaaaggaggcaaatgtcccaacagctagtatctcttctttctaaaacttggcgtgaagcatttcctttcagtggcaatccctagtggcaatcgctaactctgctggggaaagacttgctaattttcttttaattgcataagagcagagccctacagcaaattgaacatgtggtgactacatgaaatatatgatagaatatggtcctactttgattgagttaatcacaggtctgacaaatatacaaaattaaaataagccacattttttagtacttaatctcttgattctgttgctttttactgtttgctggatagtcttacgttgtttttaggaacctatggttctcagtgctaatttgttggatatagacagcagtttgctattcgtgactctaatgggtgtgtaattccctttcttgtatgcaattggcatttcagtatagtttacaatatggaacgtggaggggacccccygagtaggacagcggctgctctttgtcacttgcagctgtgtttgcaagggagcatgctggcaaccagcaaggagagtgctgtgacaggtgggaagagcaaaaccagaaatatgcttctcctttctcctatcctctttctatccctccttcccccgccacaccctcttctacctgaccttctgtttttcttctcttccccttttagaagccatctgtttccctctaccagttctatttggcttgcagatgccactgtacaggaatacactgtgttgaagctagcctatgcttgacctactgaacgtatgtatttgggccgggttcaacctaatggatcaaaaggaatggtgagggcataagaaatttcataacttttatacagcaattatggagactcagaaggacaacataccttactatcaggatttgagaaatgatagaggactttttaaagcctggctctgacagttctgtattactttctcttagagatgggaacaacattagtttgtgtgtaaaaagctgtttatattgccttggcctggaccaggcctaggcaagtggggagaaaaggaggaaaatgccccaacaatgataatctctcctttctaaaacttggtgtgaagcattgtcatccctgttgtcagtaacacaagctgtcattctgcagagctagtttagccattccctaacagacagctagttaatagtctcccttctgtggtctagcttcaattatctattcctcagacattgctggtgggaatgtaaaatgttacagccacttgaaaaacagtctgatagtttctcaaaatattaaacatagacttaccatgtgactgagcagttattcctaggtatatgtatttccaggtatagatcctaaagaaatgaaagcatacgttcaaacaaaaaaaaaattattttttttttgagatggagtcttgctctgtygcccaagctggagtgcagtggcgccatcttgactccctgcagcctctgcctcccgggttcaagcgattctcctgcctcagcctcccgagtagctgggattacaggtgtatgccaccatgccyggctaatttttgtatttttagtagagatggggtttcaccatgttggccaggctggtctcaaactcctgacctcaggtgacctgcctgcctcggcctcccaaattgctgggattacaggtatgagccaccactcccagccctcaaacaaaaatttctacatggatgttcatagcattattcatggtacctaaaaagtggaaacaacccataaactgatggatagttaaataaagtgtggtatatccatacagtagaatattatttgacaataaaaaggaatgaagtactacatatagaatgatacatgctacaacatggatgaatcttaaaaacatgctaagtaaaagaagccaatgacaaaaggccttatactgtatgattctgtttataaaaaatgtttagaatatgcacctccctggagacagaaagtcaattaatggttgcccagggctgggggaattgtggatatgtgtgggtagttggggaatggggagtgactactaatgtcacagagttcctttttggggcagtggcaatgttctggaattaattctggagttgtgcaactgtgaatatgttaaaagccattgaattctacacttcagatggatgaattgtgtgatatatgaattgtatctcaataaatctgtttaaaaaagtattacatatttcatttggtctcagggcactgaattgtcttttaattcaaaattgtactggctaggagaacccatattttcaataagaataccagcctaataatggtaataacttatttgcatagtgtgccattgtttacccagagttttcacatgctttatgtaatttgatccccactggacctcaccatgcagatgaaattgacacaaagaaaaagtgacttctcttaagcttacacaaccaagaaatggtagagcaagtatttaatctcaggctttctggttgttagtcactgccttcttgtcagaacaatgtcagaacattgcaaagaaaaaataatatctttcagactcttaattatgctttaaccctttcagttcttgaatgtgactagaaaagtcattcaccttctctgtcttgctttccttacctgaaaaatggagataataatgcttcctaactaaaagtcatttacctttttgtctcggtttctttatccagaagaacaagccaggaatatttcctatctcttgggcatataataaggactaactaataaaaaaaaattataaaataccttaccagcctataaaaatgcttcatgataaaccatcaaggagtattgtttttccctttctttcatgttttcaactccagcagtgtataatagtaaccacttatgtcacttttcactaaggagttcaaagcactttacagacattatcaaattaatcctccctacacccctatgagttacatagggaactggtatcaaaagagctagagcaaagtaacctgcctgaagcctttatctcagactgggtccatactctaccaattgctcattaatttgtccctagtgatatttatttggtcaactacatttattttctaaaagtttgttacttgttaaacatgagaagaatgtttgaatagacttcctgaatcactttaaattagcttaaactttatcagaggtaaagctgtttattttgacctgcccatgtcatcctcaatctagactagcaaacaaacagctcagacttctgaatatacacttttgactcaaactttcatcatggggagcagtgccaactggtgtcttactgtgtggatgggagaaatccttgatcagtgtttggaaactactctcgtttgtccagacactcttcacagagtgaaggcaggcttccttctatgttgttgggttttatagtgtgtttacatgtagaaagctcatttgccatctgcattaccacctagatcttcaccgctgccatcatcatttaatattatttttgtcttgtggcataccattaccaacccttttgacagagaagatatatgagggaaatatatgcacaaaatgattagaaaggcctctgtgagattgccttagaatggcttctaataaccattaaaaaagcagagtgaagcctgacccaaacagtggaaaacattaaatcctggcttttctcttgccctgtatgacgagctctggtttcttgttgaggctgtcatggcaaggttttttggtttgggtttggtttgttttagtttttggtttctcttttgccatattgatctctcattttgcttgatggggaaatactttttttgcctccagaagtgggtttcccttgcatattagccttgttggtgtgctgccccataggaggatggccccagtgctattggcactgtcctgtgtacagttaattaaacctcctgctgtggacctggatttctgctgctgctattcactgatgtgtgtgaattgagtgaagcacatgtgcataagctcagggacactcttgaaaacaaaccctgaaaatagcaaaagatggagtcagggcagagccttcagctttcaaataagtttggtaatctggctagctgaatgccagagctcacaaagctgagaattgcatttctgaagataagacagactctttttgtgtttttatcttttcttcccaaaatgtattgagttttaatacggtactttatctctgtaagcaagaaaacagagccagttgtgaactcttgggctattgagtccaacccagtgaggagtttatcctcatttttctggtgaccacatctcaaggtaaaccatgagcagagtcttactaagacacctgcctgctgtggtctcataaaggggtcttggagcagaaaggggttaagaaactcacagaaggcaagagtagggcttccaaaaagtctagtaacctacgtgttttagagaacagatagtgatttcctttgaagttaggccccttctctttttcatttaactaaatattcagagagagaaacttgatttctaaccattctttttttgaatacattgtagtgctttgagtccttgtgattctgtttactaggacataaaatgctaattttagaagctctaaataaattttttccaattcctagcttgcttacttgggtaaaatatagcaagtaattagactggagtaatagtagtgtcctaaaaacatatcagccactggatcagacaacctctctgttctttctctacctttcccaactcccctcagcaagttttgactatgtatttttatatgaaattaatcagccaggaagtatattttcagcctctcctttgtgttagtacctggtataataatgtgtgctaatgcttatgatctttcatagggaaaaagaaataaacacacatggtagaccagggcagtacatagtgaagagttagcatgtggtatagataatgagaagagagaaagcaagaacagcttgggaacccaattgggactttgctccagaaacagaaagaatggaggcattctaagtcaggggaatcacacaagctaaggcagggatataggaatgaacacaaaataaagataagaactttgctgtatgtttaacacttttcataaaaagtgttgggccacaatcaaaaataggattaagtagttatgacaggacctggtactagaaggccttaaatgaccatactatccttgcctagaactagacttgctttgaaagcttcgatcagttcctatcttttgaatggaatactttagcatttgaagggtaaaatgaatttatattggaggaaataaggtttcattggcctgtctgctttttgtatatgtttgttttgctaaggcaatatattcagagaattgaatcagtgctttatcttgtagaaggaagtcaggcatatagttaagaaagcagatttttttttccttaaaaggaattttatttcctaattgtgaaattgtggcctgtttgcttagaaatgagaatgtttatgagtgaaagcacaggtttaatgtttaaaagagtttggataaccgttgcagaagcaaaatggatttctaacattgcttcctaatctgggttgcccgaaagagtaagagaagtcctgcatatccctgtgtgaaggttacacaggttgttacttgaaatgctgcttgtttggaaaataagatatgaaatccaaatgggggtggaaaggggagggggaaaaagtagtaccggggtcactggaagtgtaaagattgggaatttctgttgtaagttttcactatagatttgagtaggtcagctgaccctcaaatttctaattacttcttttaccttgcatgaattttctttttttttcctgctcatttaakgtacatttggtttaataatgtattctcaataaagccaaaaggtacctctagctgtactataggacagcttttgaatagtagtttgatttattttccagtttgttttcctgtgtcttgtgttaatagttgctattatttatctcatttaaacagtagtgcttaggttgaaacttgattctagtcaattttattatgatgagtttaccatcttctcaaatgtagtactcctctaatgcattgttactctatgaaggtaaaaacaaatttacagctgttaaccacaatcttaacctttcctcagtttgtttgatttactacaaattaaattctgtgcttgatataaatcattaagtatataatttaaagcagttgctgcgatccatcttttactgttttctgcactcacatccaaatgtggaacttcaagtctgaaaaacagtgaaatgattagaaaactgcccttctggagtccaaagtgagcattcatttcaatgtgggtatatgacagcggggtcctctcatctctgagtgggagatgcagacattgcattcaggatggaatgtttgcttcttgacttgtctgcctgatttaaatattcatacttcaccagaaggaaaaagctgctgacttctaaaagtgggtcagttttttttttaatggcccttttggcactttgtaacgtgttaatactgccttagagatggagaacagtttggcagagctcgtctttatcacttcaggggccaaagcttcactaggccagtggaaggagaggcattgcagatattaataactaatagacygtgatatgggctttacttgccattctgtttgcttttctagatatagaaggtagtatgttaaycagaaaggattaatttgaggaaaaccttgtattgataaaggtgatgatgtgggtaaacagaagtaacctgtgtcttcagatgcatggtgtttctgaacaaattccacaattgcataaatctgttttatttttctatttggacatgataactttcgaaagaagtccttggatagaataggatcattgataggttgtcagtcttattcccacatcatttatttctgcttaattattatttaaagtgtactttacattgattgaatttcttacctctaaaggacccaaatggcatttaaacatgaatgccatctttttatcctcacaaaattaaaatttcaggtatcttttatggaaaggaggggtaggacagtaggatgagaaaggaaggagagttagagtaataataggaattctagatggagagagatctggagatcctgattaccacatgtattagttcattcaggctgctataacaaaatacctcagactggatcatttataaataacagaaattcattgcttacaactctggaggctgggatgtccacgttcaaggcatcagcagattttgtgaggacctactgtctgcttcatagatagcaccttcttgctgtgaggacatagcaagaaggtgctatctatggcagaaggggaaaaacaagctttcataggcctcttttataaggacactaatctcatttgtgaaggagggccctcgtgacctaatggcctcttaaagacctcacctcataatacagttgcactggggattagatttcaacatacgtattttgagtggacacaaacattcagatctagcaccatgtcctagtcataagacatagatgagattgagagagttcaggttgcttgtttaggagacatgctatacatttcaccaatctctttcttcggttttctaggatttataaaaaccattcagtgattttagtccagtcttataacgtgtccctggcctgtcctgtacctcagcgtagaccagctcaagtggtgatgaactttccggagttgcactatcacacatactaatatggctgcttctaggatcttctggtttaccgtcaaattctagctcccagtttaaaatggccaaatacctgtccagcaatcttaaagtttggttcaagtattcrtaaaaatatggaatatgccttattgaggaatatgttttgtcatgtggctttcccacaggccccaagatgtgcttgctttttataaaaaatatttattatattaagttgcctggcaccctaaaaaataaccaggataatattgaactggtgcttctggggaattatttattcaacttcctrtagacaatggttgtgttccagaaaatgttttgtgaatctcaaatcatattaagtatagtaggaaaattgccatttttaacacttaaacagacatacaggattttaaaaatagaagagatgaatcctgtccccaggatctcatagtgtaaaattttgaggaattctgggctctgtctttactataagacacaagatccttttgtaatagaaatggctactagtgtatttaagggttaaatgtaataatgtcatctggcgtactttcagatggttcatgggagaagaaagatgtgtgatagttcagggagcgtggaagggtatataggtatctgatttatcaaagggatcactatactatgaacttttatgtatgtttgaaattttacaaaataaaaagtcttaaaaataaatgttttctttgttttaaatctgggtcttcatgtatggagtatgcttataaagcaacaaattgggtaggacctgtacctttggaatcctgacatacatacatcacttaataaatcacactaccccagaaagaagcaggttattttggcctggctataattgaaaccaagatgaagagacttctgactttcagattaccccttagtttcccaatatacatttgactcagatgactaaaaaataatcagttttcattgtctttagtagtgtgcaacaaaaaatgttattgctcgaaagaagtacgcacagtgcccaaatcatggttgacatagtaatttccttgaacatcctaaataagatctcatttgttaatgacttatcttttccaccctccttactttttatcttttctagcgacatattagtatatattctaaaaagcatttgtgtgtattgagaaaattcagttacaaaaaaaggtgactatttccgcttctgtatttgaaactgtggtggtgggctatggggaaagagagaataagaaggtggatttttatacatgtttaaaaaaagagaaagaagtccatgcatctagtgcttgccttattatattcaccatgaaaagtcagtgagggcgacctatttactgtagaggcatgttcaaatctagtgcattgacaaaggatggggccaacctgggaaattcttactgtggctagatcaagaaccttaattgtgcgtgcgtgtgtgtgtgtgtgtgtgtgtgtgtgtgtgtgtgtgtgtgtgtcttcctgtcagtgtagttctaagggtgaaatagatttatatttaaccaaagaggaaagggggagctattcctgggcttttgctatttaaataatcaattcatgagaaagaatcagtgttataagaaaaaattgcagtggtatttaaattcgaacatatacagaatcctttgctctccaacatagtatgcagtttcatgtaagctgcttcaggatagaattgtgagcaagggtttgttaccagcaggaccttttaatacagtccttcagcacatactgttatttttggtgcactagattgtattagttgctaaaccctaattttctaatgtactgcagtaatgagtaatccagtcttttactctcagagtcattttacattgtacaagggctacagagccccaagccgtcacccctccccactttttaaatatcactattcagacattttctcttctacttataattagattgctaagttattttggaattaaagaatgctaaaaaaaacttttattgtctgtgccaaatagtatttttctttgtttataactaccagtagtgtcatcactgtagtgcaggtatttccttccagcacctccccaccctgcctccatccttcctctcttttccactgaggtgagaccattatgtttaatgaaactctgtttcctatgtgacttgtattatgttctacccactaaagtataatagtagagtgaaaagtcacttgggattactgccagaggttgttcagaagaaaccacatctagtaaccctgttatatctggcacagttcatactcagaagccagcacaaaaagacttggaaggttgcattcttctactggaacattttcagttacatgtgctttaggcttataaaaggcctaatctctttttcccaaaaaatgctgtttgtatcaaataagaataaactcatttgagggtttttaaaaatagatgtattacttggaagtcttgggaagatgcagaaagctaaacagattgataagtactcagtatttttcattcatgcagatatttttaatcttagggaaatttaaaaattatttcctctgactttagtcaaggactctagaaagctgcagattgtgcagttttgactgagatcctgatagtgatctgtaattttagtttgctctttataatattgaccttttgtctttactactgagaagggtggagtgcaatatcaaacttaattcagccttcgtagatctaaaattgagcctattcctctcctgctttttaagatattattgattcataggaggaatatgactgttagggtatagaactccaggtttaagataaaattctccatgctgacacttgcaagcttcctgagaattaatattattataaagatcatggtgagctacctccttcaaggtgggccctgtacttacctgactattctcaggcttccccatgtatccactatgcctgggacaaagacttggactttttacagccacgcatatattgatttagctaaacctttatttgtaactataagcagacaagaaaaaattaccagttctatgaagagaatcagcagattgaaagtggggaatgaagctgagtaatcgaaacaaattctccaccctacctatactaaaacagcgaatgcacgaaaacaggagataactttttaaacgtttcattagtattctcagtaagatttgagagcatattatttcatcagtaaaacaaaaataggctattttcattaccttcagaataaaagtcaagtctttagagttgtctgtcagaccccacaacccatccttcttccctacttttattcagcccactcactctgctccagtaattttgggctccttgctgttctctgttcatgtcaaacttgtgcccaccttaggtctttataacactgttttctctgcttggaaagctctttgatagtgctgtggtttgaatgtgtcccccaagtttcatgcgttggaaacttaatccccaatgtggcagcactgaaagatggggcctttaagaggtgattggatcataagggctctctcctcaggaacggattaatcaatccacagattcatgggttatcatgggagtggaactagtggttttataagaaaaggaagagaaacctgagcaagtatgctagcatgcttagccacctcgccatgtgataccctgtgctgccttgggactttgcagagagtcctcatgagcaaaaaagctctcaccagatatggcccctccrccttggacttctcagcctccatacctgtaagaaataaattccttttctttataaattacctagtttcaggtattatatcataaacaacagtaaactrataaagataatcacacaactgactcctttacctccttcaagaacctagaatagtatgtagcacatggaggtgctcaataaatagttattgaaagaatgaaatgggccgggtgcagtggcacacacctgtaattccagcactttgggaggctgaggcgggtggatcacttgaggtcaggagttcaaaaccagcctggccaacatggtgaaaccccgtatctactaaaaatacaaaaattagccgggtgtggtggcacatgccttataatctcagctactcaggaggctgaggcaggagaatcgcttgaaactgggaggcagaggttgcagtgagctgagattgtgccactgcactccagcctgagtgacaaaaaaaaagcaaaactccatttaaaaaaaaaaagagagagagagagaaataggagtatacaagtaaactcaatacagggaggcagataacaaaatgggctctgcaagaaggtgaattagtaaattagaagaaacttaagaaattctataataaagcaagtgtcaaagagatggaaatttggtagagaaaataaacatggagactagatttaagatatttaaaattttatagtaggagcttcaaaagaaaagcgatcctaaaaggaatttcagaagaaaaaatttctgagctgaaaaagcctcagatcttgagataaagctcttactaagcatcaagcaagaaaatttggaggaaaaaaaagattcatactgttgctaaaattttcaagtattgttcaagttctcaagtaaagagaaaaatcccacaaacttctcaataataaacagcaaccaccaaaaaagttacttacaaaaggataagaatcagataagcaccctctttttttttttttttttttttttgagatgacgtttcactcttgtccaggctggagtgcgctggcacgatctcggctcaccgcaacagaggcggctcccggattcaagcgattgtcctgcctcagcctcccaagtagctgggattacaggcatgcgccatcatgcccagctaattttttatttttagtagagacggggtttctccatgttgaccaggctggtcttgaactcctgacctcaggtgatctgcctgccttggcctcccaaagtgctgggatcacaggcatgagccactgtgccaggccgagcactccattttttatcaataggcctgaaggctagaagagaatggaatttcatagaattctgagggtacaggattgtgacactagaattttatacttaggaaaggcaaagaaagatatatttggactcacaaaatatactacaaacatagcctttctgaaagttttttggtagggatgtgcaccgaattagtcagaattaaagaatcagtaaaataaacaaaaccaaaaaatgagtctttgagatcaacaaaataaactgttagctatactgaccaagggaaaaaagattattattctggatattctagctagtacaataacatagggcaagaaaatgaaaaatactggccaggtgcagtggcttttgcctataatcccaacactttgggaagctgaggtgagaggattgcctgaggccaggagttcaagactagcctggacaacataacaagaccctcatctctacaaaaaaaattttttttaaacataaaaaatgctatttaaacaacagatgtatatcatcattatttgcagatgacctgattatctacctagagaaaccaggaaaatcaatgacttattacaaataataatagtaagatgtccatatacaaggtaaaatcaaaaccaagaactttgctttatgtcagcagtactctgtgaggaaataacagtggaaaaaatggtcgagtcagaaaagcaagaaaccttttaaaagctagaaatgaacttcacaagaaatgtatacctgtacctttacttttacttagggacataaaagagtttaaataaatgaagatcattcataccttctttctaagtggggagattgaacgttttaaggaagtcaattatcctgaaatctataaatttactataattctcttcaaaattccagtgaatattttggggaatttgacagattgagtctaaagttcacccagatgtagccaaggaaactttgaaaaagaattaaggagaatgttacatttctagcccagctgcccactgaacaacttcacttcagtgtcgtactggcatcttagactcaggatgtcctgaactgtactcattattttctctccagtgtttccagttatgttacttatgactgtaaattttaccacagtctaccacaataaaaaagccagaatcttaaacatcattgttgactctgaaagccttccttgattcttccctttcactcatctccgaaattcagtcatcatgttctgccagtcttcttcttagatatctttttaaatctatcttctttccataagcactactttagcccatgccattattatctcttgcctggcttatttaaagagtttctttttgaatcttcttgcttccagccttcttcccttctctttactgtagctagagtgaatcttcaaaaatgcaaatttaaatggttgcttaaaacctctctgtgtcttctctttgctcttaggaccaagtccaaaatcttaacgtggctcgcaaatttgtgtgatacatacctactttctccaacctctcttttctctctctctttcttcaaactctaacttttctcacaactaaatggaccctagtctttctgcatctttgaacttactggtctcccttctgagacactgttctcctccccaccttggtgagctcatacacatccttcaagtctcagtgtaaaactacttcttcctagaggccttctctgacctatagattaggttaggtccacctgttggttgtttaccctagtgtaccttattccctttatcctaacactcattatattttatcataatgatttgtctctctttgcttctaggttttaaactcaatgagagtcaggactccacctgcctattcaagggaatattctctggctaacacaatgtagtgtactgaatatgtacattaagtgaatgaagtaaccaacagagtcaaaacatactagaaggtttagtcagtgaacggtatgatgctggcaaggaacaaacagattagcagagcaaaacaacttaaaaataaaacattcatatgaattggaatttaatataatagagataatatttcagatcagtagagaaagatggatttttttcaggaaatggtataagaacaattggctgtccacttcaggaaaaaatatcaagtgaggctcctagtcaggactgtcttgattgcaaattacacattcagctcaaactagctgaagccaaaaagagagcggacatattgggaggatgttaaggtatcacagaaaggagggaataggtgaacagtattccctcaggaatgcaagaagcagcaaacctcttcagtcctcatagactagttactctttcatttatatcatatgttctccacttcatttttaactacggtaggctaactctgtgtggcagagaatgtagcctttagcagcttccaggttttgtcaccttttgaagaaaagtgttctctggcatgttgaaaatacttgaggaagtactttgatttgtgtggccagggtcacatgcccactatccccttgtagggctcagaccaatcactatatcctgggaaactgggtcatgtaagacttcttacacatatgacatgttggtttctgcaggtgcgtgtgtctcagtgtgtggatttggggaaggatgaacgtgaaaagaaagcctccccaggaaaggaggcgagtagcacagccatagatagccactgggagacctgtcatgagctggatagtcaccgtaatttttgtctgctgttatctctgttttacatcatactaaaaaacaaatttaaagtggattagagatttaatatataacattataaaaatactaaaagaaaacagtttttttgttctttttatcttggagtgtggaagaccttccttagtatgataagaagaccagaaaccatacaggaaaggacctaataacataagaggataaaagaaagaagagaaaccttatttaaggcaaaggcagtaaaagcaaaattgcaaaaacagcaataaaaaattcaagacagatatttttaacacatgtgtgacaaagggttattagtcttacatataaagagttcttatgaatctctaagaaaagtatgagcctcccaagggaaaagtatgcaaggggggggtgggggcactaatattaaggcaactcacagcagaagtaaaaatactagtatatgttacagaataggaagcatcagtggacagtaaatatgtgaaagatgattagttttattagtaatgaggaaaatgagatttaaaaccacagtgagatatcattttacttctgacagattggcaaaaattaaaatatccaacaacaatcattggcaaggataagcagcaagaaaccttatacactgctgaatggaatataaaattgttcaacaactttggaaaacaatttttgattttctagcaaatttgaagatgtgtatactttatgacccaccagttctcctcctagatatatactctagagcagcactgtccaatagaaatagaacagaaaacacatatgtaattaaaagatttctagcagccacctacaaaaaagtaaacagagttgaaatcaattttaagtctttgaaatccggtgtttatattttacacttgcagcacatctcagcttgaggtagccatattttaagtgctcaatagccatatatggctagtggatagatagcatattggacaatgcagctttaaagacactcttacagacatacagaaggacttgcatgagaatatttgtagcagccttgttaataataacagaaaatgggctaagcatggtggctcacacctgtaatcccaacactttgggaggctgaggccggtggattgcttgagcccaggagttcaagaccagcctaggcaacatggcgaaacccatctctaccaaaaatacaaaaattagccagatgtggtggtgcacacctgtggtcccagctgtttgggaggctgaggtggaaggatccctcgagcctaggaggcagaggctgcagtgagccatgattgcaccactgcactccaatctaggcaacagagtaagactgtgcctcaacaacaacaataatactaacaacaacagaaaatggaatcagtccaaatatcctgtgataggataagtaaattatgggacactcctatggtggaataccatactatagtttttaaaaaatgaatgaactgcaggtatatgtatcaacatggagaatttcatgagacttgggaaaaaatacaagtcacaggatacataaaaactaataaaacattatatatggataattatataagtggtaaagttagaagaaattcagaatagtaactaccttttgggcagaaggagagggatgcaattagagagaggctcttagggattcagaggtaccaaaactagcctgtttattagagattatatgtacatgtatgtatacatacttatacattcatatgtacattcacacatgtacttatactcttgtatgaatcattaaacatattaaaatcattaatggccaataaatatgaagcgatgctcagtttcattaataggaattataaattagaacaataatgaaattttttcactcatgaaactgataaattttaagggtatcaagtctgtgtacttgtaagagatagacaaacaggcagtccttactctattgatgaaagtatatatagccttttcagacaacagttttggaataggaatctacattttaaattaggctaccctttaacccagcagcatgatttctaagaatttattctcaggaaggattcagataagtgaataaagatacatttataaggatgttcattacagtttttttaaataatagtggagaattgaaaaaaacatttggtgtatttgtgagtgcacttgttaagaaaaggaagtagatgatactgattttcacatggaaatgtattcgtgacatattattaaataaacgaaggacatggtagcacactatgcagtgtatgatcccagattgttatataaaatcagaaaaatattagaaagaaataacggagcttatttctggggttgagagggattacatgatattttaatttcttgaaaaaaattaaatgaaattatattacatttataaataggaaaatataatgatattttcgctttttgtgagattagcatcattttgtgtagcagggtgatcctaactaaggacacaggacattgctctaggctatctaaatcaaactctggtgtgtctccttttgagaaatttgtagggattcaaacagttttctttttaaagcagcacttaagagttgggctttgactgtgttttaaattatcagctaataaagctgtggttttcatgttagtgtggaagagaacaaaaagatgtgcattggggaaaattgggtaactgtgtggcccaatccaatccagttccttgtacctgataatgcttctgctaactttaatcaagcatttatgtctcaccccatttccatagtctcttgagtgaatgtcacccctgagtacttacagattcttccagcttttgcgtatagtgttagtaacgtctctggaaaaaaattattgcattcttttccagacactattagacctaacagacaaagccagaggaaaaaagagtctcagccaaacctttttgatttgacctgcctcggagcgcctattaatctaaagagaaaagaatccactaactaaacaatgtaaattacataactgcctaattatgcatgtttattatcaacttttaagaaaaagaatgaattcgtaccggctgcatgaactactaggttaaatcctgccagaccctcacctcatgggtcctgtgtactatctttgggttcctgttgccaggctccagctcccattaccttcccttcmtactctgggcccctccaacagtaatagtctgtgattctttgttgttgtttatccaaggaagtgacataatcaatctgagctacattttcttgctattaatctggcagtgctatatggaaaggaagaaatggggtgtgggagtatagttagaattatattattgtggcttaaggctaaggaaacaatttctgacactggtaagggacaaaaggtatggaaagaggttggaagggacattattgcagaacaatcaacaagattaggcattattgggaactgggccacaaggtagaggaagaaagaatgataagtgactctgaggctttgagcttgggtggctaaaaatgtatagcactggaacacagcttttactacgtgatcgcttgtcgtacatgaatttcctgtaaaagttcactcactggtgtaggctctagctccttatggctctgcattatttgcattttaggacatttatttatttgtgagcaaatattgatagatgctactgttttaaaatcagcaatttctctggtcagtctcctccacttcccccaaaaagtagaaattgctactggaaacacacacacacacacacacacacacacacacacacacacacacgcacacacacgcacacacacacactatgtggtttagaagaaatgatcgtcaccttcttaaagttacaaattaaaaaaaaactgaagtaaatatagttgaatgggaacataaaatatttgaatgcaaatgtgagatttagtgaaaattggttttattatgtttatgatgcagttgtttaaaagatacaaatatgtgttttaggattaaagaatctttttgaattttgtgttcaaggtgatataaaagttaaattttagtaacattcagagaacagactaatgaaaagtagcttatttatacacttgagactgaaaaagaatactttccttgttgtctctttttggatctttttaaaatgctggtattgaaatctgatattagcccccattggttcaaagaataatctcttgatcataatattagaagacaaatgatgaaaacctgggcaaatcatttggtaagaataaaagatcgtgcaggatcgtcttgttatgaaagaagcattcttgattggagcaagagaacttatggagagaaaaaataattttatattgtcttgacacccttttaaagaaatcagaatagaaactaaaaatgtaccttggtcttattctctggataagctcttttcagaggctgggattctaaacctgcagtagcttttaatgtattagcaagatattctccagatagagtcagcagtttgctctattgtttagcgttgattctttgtccaaagaccgtaatgaataacaacctactgtattagttgtatatatcagggctctcttcttgtacagagcgtaatacacttagttttgaaaataaatttgagtgaggaggatatttatcaaatcaagttataaagactatccaaattatgtcttcaattttaaaacacttttgtaagtattaaagtattttacctaccaattagggattcacattcttatcttcttctatgcctttgttattatttttactgtataactgcaggtggagtaaagttgaaatacttttaactaaaagcactctaacggacatttgttatttttaagctaggtgcactattggaaatgacatgaaatttattgctaggtttttaggttgtacatatttaaggaaatatagtttatgaagacagtttttttttttttttttgagacggaggctctagtgcagtggcacgatcttggctcaccgcaacctttgccttctgggttcaagtgattctcctgcctcagcttcccaagtagctgggattacagacatgcgctaccacgcccagctaatttttgtatttttagtagagacagggtttcaccatgttgcccaggctggtcttgaactcctgatctcaagtgatctgcccgccttggcctccccgtgtattaggattacaggcgtgagccactgcgcccagccagtgaagaattttttaatccttaaactcaaagggaatatagaataaaaacaagtctgttttcagaacagttatttagctgggcctctagaaaaaaataaaatattgttttgggaacctattatgtgaggaaaaattcaacaagtatttgttagactttgtgaaagtcagtatcaagtagaattaatcagtgaaagagcatttccacaacattaaatgcaaaaaaattgaccaaagattatgagacaagaagttatcgttgacttcttgagttaagcccttaatttccacaaggtttagcttatcatgacagataacactcttttgcaagctacattttgttttgaaaaggtaatggtcagattaataaaccatgattgcatcaatattagacttgtggtacaatttgtagatccaatagaaatgaaagaggatctaacagtctgtagtcaacttgtgttcatatagtcctttggggcatagtaatacacattgaagcaaataaaaaattagaaatgccttaaaaggcaagcctttgctgggcgtggtggctcacgcctgtaatcccagcactttgggaggccgaggcgagtggacgatgaggtcaggagttcgaaactagcctgaccaacatggtgaaaccccatctctactaaaaatacagaaattagctgggcgtggtggcgggcgcctgtaatcccagctactcaggaggctgaggcaggagaatcacttcaacttgggaggcggaggttgcagtgagccgagatcatgccactgcactccagcctgggcgacagaacgagactctgtctcaaaaaaaaaaaaaaaaaaaaggcaagcttttaaagtataaagtaatattttagcatgtaaacttaaaagtgagaattacaacagaatcaggaagtcttagagtttcaggagggaaaaactttttttcctcaaaatgcagtagattgtataattattattctaattatgaaagtaatatgtttgatcataaaaccttcagccagttcagcaaagtgagaattgcctgtaagcttaacactcaactattaacattttgatgtatagtattattatttttatagaaattaatatgagattgtttcaaaagaaccatgactttaaaagttcagggacagtcctgagtacatgtacttgaaaattgaaataattttgcatcctgacaccaaactctttggaatgttgaaatttttgggataggaatacaaatgcagtttttgcacaactttttcaattctttttttgttgtatcccctcaagcccatccttcaaaaaaaaaaaaattgtccccagagatttccaactcaagaatttagagaatcagctactagcctattaaatttcaactgtagcaaatgttaccctgtttgtattattaggctgtagtgaaatgaattccttactgacaaataaaatggtaggtgctggctgcttccctttggcatgagataggctatgtcatggatagggactgacagttctgagatgttcaaataagaattttctatgtacttactacaaataaagtaaaatattggcttaagtatttttccagtgtgaattatatgctgaaaacaggataaaaagaagatataaatyattgtttaacaggtatcccctgaatactgattcctgggacagtagcttttccatatgggaacaataggcgtcttctcatagctctgtgtgttagtcttcatgtgatggaaggtgaataaggagaatgtctttagcacttgggtattttaaagatcttaagcagtgcatttcgttgattggcttgcttcattcttgaaagagttgtgtgcattaaagactgaatcaaattgcattgtattttgtgtgtttcctgtgcaggcatctgcattcaggtgtaggtagtactgttttcccatcccagaaagggcagggtgctcagttgcctttataaaggcaatttcttggttgactgcgattgagtgcagaattataatactgaggacttaatttataacagaaaaatgcaggagtgcaaacctgttaaaccccttatacatgtataaataaggtaaacgatggcagattagcatggaatattgtttgatgtgaataatcttaaaaacaaatttccttggcctgttcatgttgtacctgttagcacggagaaaacttgtagaaatcagtgcatcatctttgaaatataataaaatcagggagaaaaagcagagtgatgtgagacagctgctgcttggattggcagcctatttataatctgggaggctcgttgctagattgctgtgctgtgtgctatgctctcacacatcagataggaatgatgatttgcgtgcatgtgtgcgtgtgtgttcctgctctcagacttttaatttttcagaaaaggattccttttcctacataaaaatggagaatgctagcaaaagcagattttctgtgttccaaacactcaacagtctctccagtggacctctgggcatttttcaatgctgggagaagacctttggtgggccaggcatttaaagatgtaaggccttctcagcattcttcgtgatgctggctctgctgagtgggtgagtcatgtgggacagaatgtcgcatttcagtaccttttggctatctgtgcacgttagacaataacgattgccaagccaacgtgtctcaggttttttaattacggatttaaaagcccacaggagctctgctcatatgttaattccactgcttgactttaaaggattttttttttgcattttctaattcagattataaaagacagtcagccattcaatatggaaacagtttaccacataaacttgtttgaggggcgaacagggtagagaagaggtagctaaagctttccacaagagaaaaagtctcaatgctctcccttaggtttattttaaagggccaaaaagaggtatattaataaaaataaccttgacacctgtttatgcaaaggatcatgaagcattggaatgatattctaagtcctattcattgtcagctttcatgtaccttgtgcatgacatctacatcatggattgtctgcacctcaatattccacctcaggcagtttccccctaaggcacattttactacaaaacatatcccatgccactgagctggggtggaattttaattttaaaacttagtcaaaacataattttatagatatatctatccccaaaggactgaaaattttaaagccaaatataacgaagttttggatattttggtattttggtttaaccttagcccaggtctctcgcctaagtacgaatagtcagaaagccaacttcctctgataccaggatatatttagataacttggcatgatctgagactctcttttacttaaaggacattcttgggacattgtcaaaatctgcataaagtctggagataatagtattgtatcagtgttgattttctgatttttcccctcaacattttattttgaaatgtcttcgcctacaataaaagttgaaaacactttaatttacaatgggctatgagcagtcacagcccatcacctatacttgctccatcacatatctgccgatgactctgtcttatgaaaagccatattatgcctatgacttgcaaataattccagagaaaaattatgtgtttgtggagagagcaagagaggagaataaaaaaaatgtggtaaagataacatttttggggaatttgggtgaaaggtatataggaattttctgtgccattacaacttttctgtaaccctgaaattgtgtcaaagtgaaaattttttaaatgagattataagagcataatcaaattggaattttcttaggataccagagaatcattttcttctcaggtaaaggaatttttcttttgtagtccagagctatacatgattaagaaaatgttcagaccaggaagatgacatctctgctaacctaatcgattatcatggaaggtctagaattggtgctaaagcaggaagaaaggggatatctacttcatcagaaagtatttgaatttgacctaaaaaccaactaaaatgttcactttcctattggtcatattgtgtgaaagggacatagtaagtttgagaaaagaagaaattcagtggggataagacagaagaagactccacctctttgtatctgtggtatgaaatcatactctgttgggagatggagaaaagttgttttttttttttaatctgtatacatatgccccagagaaaattattttctttcaacatattcctgtcactgttatctctttcagagaaagctccttgtggataggcagtgtgtgtttattttcataaagtttctagaacaccattactcagctggctaatagtgttaatgacaagattaagaagcgaggtggaacagcatagcataatgctgatcttgagtagcttcctgtgagaaattatttattggaagggatgttcaataataagggatgatggctttatagactagtctagaactaggagtcactatggtatagaaaagggaaattaagggatcatcaggatggcaggtttattcttaaagaagtccctaagtctttctttctttctttcttttttttgagatggagtctcacttggtcacccaggctggagtgcagtggcacaatcttggctcactgcaaccttcacctcctgggttctagctattctcctgcctcagcctcctgagtactgggattataggcgtgtgccaccacacctggctaattttttgtatttttagtagagatggggtttcaccattgtggtcaggctggtcttgaactcctgacctcaagtgatccacctgcctcggcctcccaaagtcctggaattacaggcatgagccaccatgccaggcccaaaagtccctaagtcttaattaaagtatagaggaaaaaatagaagagaatctaaactaggtggccacatcagagagaagcttaatattacataaaaagcaattaaaagcattgttttaatggaagaaaagtgatgttgcttaataacaagcagaaagcactttcatgggagaaaggaggctacaagaaaaagagaaggacagaggaaagagatatagggagagagggagggaaagttttgatagcctagacatgtaagtgggagaaataggaaagtcagagaagataataatttaatggaaggtagatttatgcctggatcaggttgtgatgggaaggaggagaaagaaagaggaccagcaactcarttagcccaacatataaaatcattaagctgggagatatccccagacaccaccttgccctttccttgctttcataaccaattgcaactaatccagtatttcccaaactgtgttccttagaacatcagtgttcccacatgttacaggttgctacatgctctatgccattcagtgattctttttgtttgtttgttttcgagatggtgtcttgccgtgtcgcccaggatggagtgcaatggcacgatcttggctcactgcaacctccgcctcctgggttcaagcaattttcctgccttagcctcctgagtagctgggattataggcacccgccaccacacctggctaatttttgtatttttagtagaaacagggtttcaccatgttggcgaggctggtctcaaactcctgacctcaggcgatccgcccacctctgtctccaaaagtgttgggattacaggcatgagccactgcgcctggcctccattcagtgattcttaacacacattagcaactgaggataaagaatcctttagtaaaaatctatttaagtgtgtttaacttggtatttggtaaacttactaacctctttttcaggaacacaccttttcatatctgaggggataccagtattccatatgacacagtttaggaatgctgacctaaccctttctagaaagagagcagtcttctttcttaatttccttacctggttttggaaatgggttttggcacttcccaaatggtagtctggttccgaaatgttacctaaatcccttctgctcatgacttcttactctgggcaaaatagctctgtgcaagacagactcacaaaatgttcaaaatagaaggggcctcagtaattagccatcagctgtctctctgccagatcccggcctgccttatggaaggctaagaaaccattgcttacacttaaactgcatcctttcataagtccctggcttctttcacagaccaaataatacaaattcctttaacttttcctctctttttttctaattgtttttgttccttttccagattgtccacatatcactcaaggtctgagaccttagcctaaatatactataatagaaaataacaaggccgggcgcggtggctcatgcccataatctcagcgctttgggaggccaaggcagacagatcacctgagatcaggagttcgagaccagcctggccaagatggcgaaaccctatctctactaaaaatacaaaaattacccaagtgtggtggtgcacacttgtaatcccagctactcaggaggtggaggttgcagtgagccaagatctcaccactgcactccagcctgggtaatagaccgagactccgtctcaaaaaaaaagaaaggaaactaacagtatatgagccgggcacagtggatcatgcctgtaatccctactgcttaactacttgggaggctgaggcaggagaatcgcttcagcccaggggttagagaccagcctgggtaacatagtgagaccttgtctctaaaaaaaaatattaaactacactggcatggtggcatgtgcctgtagtcccagctgcttgggagactgaggctggaggattgcttgagcccaggagtttgaggctgcagttagccatgatcatgccactgcaacctagcctaggtgacaaagggagaccctgtctttttgtttctttttctttttttttaagagacagggtctcactttgttgcccaggctggagtgcagtgatgggatcacagctcactgcagcctcaatctcctgggctaaagtgatcctcctacctcagcatcctgagtaactgggactacaggtgtgagccaccatacctggctaatttttaaatttttttgtagaaatgggggtcttgctatgttgcccacactggtcttgaactcatgatctcaagtggtcctcccaccttggcctcccaaagtgctggaattacagggatgagccaccacaaccagctcctgtctcttaaataaaaaaagaaagaaacaaacagtacatggttttgttctataatagaaaaataaccatatgattaatttttagttcttttatgtcattctcttgttcctctccttacagcatttgtgtctctttaaagaaaatattgcttagttatctctgcttcactggaacactgcacacacacagatcttttcctttcctactagtgcaatgcctgtattttctgttcccatggtggttttttcctttccaaaatgaattattctgcccctcctcaggaattcctgaaatgtgaattcaaagaagataagtggccaggcatggtggctcatgcctataataatctcagcactttgggatgctgaggtggaaggtttgcttaaagccaggagttcaagaccagcctgggcaacaaagtgggatctcatctctacaaaaaaataaaataacataaaaattagctgggcatagtggtgtgtgcctatagtctcagagacttgagaggctgaggcaggaggatcgcttgagcccaagagttcaaggcagtgagctatgatcatgccactgcactccagactggatgacagggtgagaccctgtctctgaacacacacacacacatgcacacacacatgcacgcacacacatgtgcaataagggtctctttgattgctttctgtggcacccttggtgatgcttgggcccaggatgaatactgtttctagattgacaatactgatggaggtatggtgtatacttgttmatagtttaaaatgtggtgaggttattttaaaagtctgtctaatggccaggcacagtggcttatccctgtaatcccagcactttggaaggccaaggcaggaggatcgcttgagaccacgagttcaagaccagcctgggcaacagagtgagacccccatctctacaaaaaataaaaaaaattagccaggcatagcggcttgcacctgtagttccagctgctctggaagctgaggtgggaagatcacttgagctcagaaggtcaaggctgcagtgagctatgatcctgccactgcactcccacctgagtggtagagtaagaccttgtctctcttttttttttttttaaagaatctatctaatggtcccttccatattcagatactcctcagtgtatgatggagttatggtccaataaacccatcatacattgaaactatcgtaagtggaaaatgcactttcgacttagaatattttcagtttacaatggatttttcagatggaattatcaggacataaccccatcataagttaattgagaagcttactgaatgcatatcgctttggtaccactgtaaatcaaactattgtaagttggggactgtctgtatttgaaatgcttagtttaagaataatgtttttcaaccataactatcatggctttataggacatcagcattcaaaacaggttgtttttgaatttggagtcggtacagttggtgcaggccccaaaagataacttaaaatatagagaactctgggtcatgttcatatttgagaaatttcataacttatagagctaaataggaccgaagaggatagtattttatattctagatcatcagatggtgttagacgcaagggaagcagaaaagtgaaagtgggagctagttgtatccagggcctgctttaaaagatacagcagtaatccacaagcctggtaagcacttccatccgctgcgtatgtacacggtgcttccctcctgctgctgcgcaaagacccatcgaacagtgtcagagcaggcgctcctggttcttggtggcagttctgatgaaaaattggtttgctgcaggatactagcagccacttcagggaattctagtgttgtccccaaacatgtcataggatcttactctgcagatgtgtgaatgaaatgccatgtctgagaatgtcaatagggaacaaaagaaggcattaggaaatgacaccactgatgccacaaagtagggatcaaatccaagaaaaagtaatcatattcccagcctgattacttttgagtggtagagttgcccatttactggtggtcattaaccaggataaataaaatggagtggtgagaaacctgccttcacaatagtatctttgttttagtatcatcattcaggtctcttcataatgatggctaaaaaaaaaaagagtcaaaatgtagaaaatagcaaaatgcccttaaaagaacacaatttgaaatgagatgacatgatgattaagattattaggaaccctgaaagttaagcatatgggctttcctgcttcttaatggttgtgtggtccttttctacctaggagatgtaactcacagatgtaatatttcttacttgcttctgtgttgcaatgttgtgttatcatttttagagcagagctactgtttaactgtcaagcagaaatataaaaacaaaggaaccagttaaatctaaccggagactaatacgactaaatttcattgctaagattggaatgccgtctgattgcttaagttaatataaaagtaaagcatttggatcttggaaaaattggtcacaggtgaatagagtgcaatttatagcatcagaaagaacatagtactccataatatctactccagaacttgttcaggggtatggtagagtatgtttaactaaattcctctgatccctgcttttagccagctttgcctggattggccacatcttagggctgtgtggacctggttcattcccacttagtttataaaagcccatcttattttttggcgtggtgtacatgcttaccaatgaaagttagcttctggattagttctcaagtgaaaaaaattaagatgattcatttgacatgrtacttaattttgatgtgactttatttggaactcagatcccaagctaatcaaaaagtaccattaaaagcgacattcttttcccmtatcttctagaaagaattaaaaagcagtttcttcttttcctctttagagaagataaagcgaaaaaccaataactgagaaattaacagccacaaaagtttgcaaatggagtctgtgagtttcaaaggctccaaattaaaaaaaaaaaaaaattagattaggcttccagaatgagaaaggcttattttcttccccctttctttttcttgccttattttgaccaaatgagtttgtctttaaacacagttttagcttcttacatgatgtgtgtgttcttgctgcttacggtatgatacattgattttgtcataaaaagtcttgcattggattgcattactctgagatgttattttagaaattggtgatgtgcatctgtgagagcgtgtcatggtatgcagtaagcagtgccattaagtgagttatcaccatctgctcctacctacagttattcttggtacagcatcatcattttttctacaactatcaattgctatctctgttttcttgaatttaaaaaaaaaaatgtgttgtccatatcaggattttgttcatgtttaccaaattatcttttgccaagtcatgtgacatatgtacctgtatggaatctcttccatatgaaattgagtcaaataggttagtgggatttaaaaggcatttaaatggacacataaattatgcacagacggctatttcaggatagctgttttctctgaattgatgagagatgaagtctttagacaaatttctttcagttttaaggagattcttttctttttcccctatagatttttcccaactggccaaatacaccagaggctaagtgttaatactatactgtacattctcctgaaaatggtgctgagcttgagcccagaccttcatgatgcgcagctaacagatcattgggcattctggggaggtacattttgatgcttttataagaaagcttttgaagcataggacacatttttttttttttttttttgagacggagtctcgctctgtcgcccaggctggagtgcagtggcgcaatctcagctcactgcaagctccgcctcccgggttcacgccattctcctgcctcagcctcccaagtagctgggactacaggcgcccgccactacgcccggctaattttttgtatttttagtagagacggggtttcaccgttttagccgggatggtctcratctcctgacctcgtgatccgcccgcctcggcctcccaaagtgctgggattacaggcgtgagccaccgcgcccggcctaggacacattttttaacccctacagctagttagagtaatgaatttaaccaaaataataaattttcattttgtgttccaattgagattacagagttgaaaaggcaaagtaataagagcaatttgggtggctatttacactgtgctttgctgtttgatagccttttctgtggaaccttggtttatttctaggggaaagattagtttttcctatcagtctacatatttatcaagaacagtttttagggacaaaatcatttgcatttgatttatgtaatctttgttaattttgtagaaatttggaagaaaatattatagtgagtaaagataatgacttcttttccagtttggtttttttgaggagatgagggaggtgttttttttttttcccccttaagggcaaatcctgaactgtaacttataaatatggagctcttccttgtcaggagtttcagcttacaaatagcttcctaccaccacagggagacagagtgttatcagtccacacacccaaagcaagaaaagaacacatccaactagtatttgcaaagagtagtttacagtcttgttagctttcaatatactttagtatctcctacttctttagtcgttctgagtgctaaaaaaacaaatctgattttttcctttgctagaactatgagaagatagcaaatatgcctgttaaaaattaatagatgtaggccgggcgtggtggctcacgcctgtaatcccagcactctgggaggctgaggcgagcggatcacctgaggtcgggagtttgagaccagactgaccaatgtggagaaaccccgtctctgctaaaaatacaaaaattagctgggtgtggtggcacatgcctgtaatcccagcaactcaggaggctgaggcaggagaatcgctggaacctgggaggcagaggtttcagtgagccaaaatcacgccactgcactccagcctgggtgacagagtgagactccatctcaattaaaaaaaaaaaaatccaggttaaacatttttagtaagaacactaccttgtgacttcatcacatcagggcacatcatgttgatttgccccagaattgctgatacaaattttgatcattggttgaggtcgtgtctgtttaatttttaagtgctataggtctgcattctagatgatagaatcatgtaatgattcagttcagtttaccaaacatttctgagggctgccaagctccaggtagtgggctataaaatcagcaagacctagtctccccatgttcttaaggtgctggcagtatagtagaggagaaaaacataagctacaaattgcagtgtaaaatagattatgtcatgtgccattttaaagttgtacacgggtgctctttgaatatagagaagggagatattaatcctgagtaggggattagggaagggtttatgtaagaaatggtgtttgatctaggtcttctagaatgggtaaggtttggacaggtaggaaaggtgttgcatgagagagggaataatttaagcaaaggcaaaggtacagaggcaggaaaaagcattttgagttctggaaatagcagataattcagagtggttgaaggaatggatataatgggaggcgaagtatagttgttaagggccttaaatgccttacctaagagtttagggagaagactctgggaaattttgagtcatgaaatgacatggtgatatccctttttgagaaagattgttctactagcaaaaggatctacagtcacacaaagacatttaggtcaacaacagaccacatatatgatggtggtcccataagattatagtggagctaaaaattttctgttgcttagtagccatcataactacttggtagcgtaatacattactcatgtttgtggtgatgctggtgtaaacaaacctactgtgctgccagtcatataaaactatagcacatacaattatgtacagtacatatttgataataataaatgactgtgttatcagtttatgtgtttactttttatcactactttaaaatatactccttctgcatagatagatagatagatagatagatagatagatagatagatgactgtaaaacagcaatagcctcgggcaggtccttcaggaggtatttcagacgaaggcattgttaccatagaagatgacagctccatggatgttgttgtctgtgaagaccttccagtgggataaggtatagaggtaaaagacagtaatattgatgattgtgaccctgtgtaggcctaggctaatgtgtgtgtttgtgtctttgtttttaattaaaatgcttaaaaagttacaaaaaatttaaatatttaaaaatagaaaacttaaaacataaggataaaaaaagtatttttatacaactgtacaatgtgttttaagctgttattacaaagagtcaaaaagtttaaaaattaaactttataaagcaaaaaaattacactaagctaaggttaatttattattgaagaaataaatttttaaaatctcaaactataagaatcctagaagaaaaccttggaaatacttttctggaaattggcctaggcaaagaatttatggctaagtcctcaaaagtaattgtaacaaaaacaaaaattgacatttgggacctaattaaactaaagagcttctgcatagcaaaagaaactatcagagcaaacagacaacctacagaatgggagaaaatatttgcagtctatgtagccaacaaaagattaatatccagaatctgtaaggaacttaaatcaacaacaacaacaaaataaataaccccattaaaaagtgggcaaacaacatgaacagacacttttgaagggagacatacaagcagtcaacaaacatgaaaaaatgctcaacattgctaatcatcaaagaaatgcaaatcaaaagcacagtgataccactttacaccagtcagaataactattttttatttttttatttttttttatttttttatttttatttttttttttttttgagacggagtctcgctctgtcgcccaggctggagtgcagtggcgggatctcggctcactgcaagctccgcctcccgggttcacgccattctcctgcctcagcctcccgagtagctgggactacaggcgcccgccactacgcccagctaattttttgtatttttagtagagacggggtttcaccgttttagccgggatggtctcgatctcctgacctcgtgatccgcccgcctcggcctcccaaagtgctgggattacaggcgtgagccaccgcgcccggccccagaataactattattaaaaagtcaaaaataacagatgttggagaggctatggaaaaaagggaacacatatactgttggtgggaatgtaaattagttcagcctcggccatttggagattaatgaaagaataaaagtaaaactaccatttgacccagcaatcccattactggatatatacccaaaggaaaatacctcagtctaccaaaaagtacacttgcacttgtatgttcattgccacactattcacagtagcaaagacatggaatcaacctaggtgtccatcaacagtggattggataaagaaaatgtggtgcatatacactggaatattacacagccataaaaaagaacaacataatatcctttgcagcaacatggctgcagctggaggccattatcctaagggaattaatgcagaaacagaaaactgaatattatatgttctcatttataagtgggagttaaacattgggtacacttggacataaagatgggaacagtaaacactagggactccacaagtgagtagggaaggatgggagcaagggttgaaaaacttcctgttgggtactatgttcaccatgtgggtcacaggatcaatagaagcccaaacctcagcattatgaaatatgctgttataagaaacctgcacatgtaccccttgaatctaaaataaataaatataattataatgtttttcaaagaaattaaaattagcgtagcctaagtatacggtattataaagtctagagtagtgtatagtaatgtgttaggctttcacrtttactaaccactcattcactgactcacccagtacaactaccagtcctgcaagctggtttaccgtttttcatctttcgtagtgtatttttactgtagtttttccatttttagatatatttagatacacaaatacttaccattgttacctatggtattcagtacagtaacctgctcctaggtttagcccataagcaataggctattaccatatagcctaggtgtgtagtaggctgtaccatctaagtttgtttaagtacattgtatgatgttcgcacagcaatgaaatgacctaaggatgcatttctcaggacatatccctgttattaagcaacacatgactgtgtctactttagatggggagagatcagttaggaagacattacacagtactcccccacttacctgcagtttccatttctgtggctttagttactcacggtcagctgaggcccaaaaatattacatcactactctttcgctttggggccattattaagtaaaataagggttacttgaacacagcactgtgatactgccacagttgatctgataaccgagatagctactaagtgaccaatggcagtctgggtaggaaggggtgggacagggagagatttcgtcaggctactctaagcgtgcagtttaaaacttatggattattttttctggaattttctattcacagtgcctatgccactcatctcacattattatagtatataatattgtgttattatgaggtgttgttaatctcttacccatcaatcccattactgggtatatactaatacccagtttaaccgggtttaaataagtttaacttacagattaaactttatcataggtgtgaatatataggaaaaaacatagtatatatagggttcagtactatctgcagtttcaagcatccactgggggacttggaacatactccccaaggataagggggactgatggtaaattttcccctatgaggactgaagtacagcagcaggacagaagtacaagacagtgcaaagactaattagatgtaaagagttggggggatgtgatgaagtaaacatgcttagaaatcccagcatgagctcttagggtatcattaagatgagaaactgcaagagagggaagacaatgagtttggccttaagcaggccagatttgagttgttggtgggatattaagatagaattagaaatgtgggtgtagggttgcaggagaggccagcactagagatatagatttacttacctctactatgttctaggcactgtgctaggtactttatattgatatatgttacctcatttaatcttcacagccctytgaggtagctacttttatctccatttaagaggtgaataaacagagactgtcgtgagttaacttgcgtaagaccaaatagctagtgatgagggccagaattctgtccaaggtgtgtggtccttcactgtttgtggagataattgcttcattgagactgaatgttgttatccagggaatgactatagggaggaaacaaagaaggcctggacagaaacttgaaaagcatctgaatataaaagggtctaagaaggagctttctgggccaagagaaagagaattaagcagatggtgacaggaaagcagagaggcccaagaagagcatggtcagtaatagtgcagctgcacaaagaggtcaggaaagacaaagatttgaatactttctgagggaaatggatagatgatcacacatggatgattagaaggttagggtaaagatggcatgaacttcaggcagagcctttggcctggttgaaggattctttccggtagtaaygaacagctcaggactagggattatgaaggtaaaaaggaaaaggggtctagtgtgagggagaacatagtagaagtggtttatcatgggtcccaggatggacaggaagtaaagaaggtgatagtcatctggaaatctagatagagtgaaggacctagagtgtgcaggttgcttctaatttttgtgcctaatgttttaaaattaatgttacactaaagaagtttttgctctttttgttttgttgtgttgcatagagagaataaaaagaaggtaagagttaagagtgatttttttatctttgcaatcaagcagtaaataaaaactcgtaaaattcccctctgccaagctcatggacatccactattttgctttagggaacttttgttagctaaatacattgcttgaaagaacatctgtattctgcgggagtcagaaaagagaaaggacctaaaccaaaactgtttcttgaatttagaaatgaaaagcagtgcttagtaccaccaagtgggacatgtcttgaaatcctagatttccagagcgagaaagtatcttagaaattgccaatcttcttacttcaacaattggttcattgaacacttttttttttttgagactgaatcttgcactgtcgctcaggctggagtgcagtggcaccatctccgctcactgctgcaacctccacctactgggctcaggcgattctcctgcctcagcctcctargtacctgggattacaggcatgcaccaccacacccagctaatttttgtatttttagtagagacagggttttaccatgttgggcagattggccttgaactcctgacctcaggtgatctgccctcctctgcctcccaaagtgctggggttacaggtgtgagccaccatgcccaacctcattgaacacttttatacaccctaccactagccaggctaaaaagtgaagttacaaattaaaacggttaattctttccctcaaggagttcacgatctagtggcaagatcaaagagtccrgtaactcctttaagaagttttgtgataaaggggaaagggaactataattaagcagatgcctgttttctgttgatcacttttttgagaggggtgtgtgtgtgtgagagagagagagaaagagaaagttttttatacagaggagacttgatcatgcttatttattatagtaggagagaaaggagctggtatgatgctgttcactgcctggttactttaattgcccccaacaattcagacttatgaatgaactgatcattattatcctcagtccactgggtaggggtgtagagttagtcagggagagacacagtgaatttccaagataaggggaaaagagaggcacagaaatacatatatctttttccttgttcttctctaacttctgtgggtcaaggctttgcacgctggcttagaaaacctgttatttcttccacagccaagattgttttgttttgtgattgttgacttgcagtattatgaattaccaaaagaagagaacccaaaaagcatactccggtgccaaatataatttaattttgagttattcataccactattcccaaacaatgtcgtaaagcagaaagaaattcaggcattagagtcaggaaacaaagatttggtttctggctttgccacttaactgtataattttagacaaattactaaatctccttgagtttcatgttattcttctgtaaagtatcttcacaagattgttgcgaggtataagtaacataatgtatttaagagaaaagcctttgttaactgtaatgtcagttatatttacaaaatgctgacattttaaaaatagttgtgtattttggactgttcctggtctcaggtgacttaatcattgaattattaaatctccattattaattttctttagaaatgcccaggagactgcttcatgagtgtatatcaggagagagctttagtttttgtctttaaatgattgttctcattcctgcagtaactctcaaacttggcatatttttctcccctttcttttagtatgatatggttaagcaactaaatgaatgttcctcagacttccccaaaatttttgattctgggatagaagcaggaataatcttttgttagaagctgaacaaattaggatacttatttaatgaaaatactgtaaagtgactgacggcccctttatctgtttcaaggaaacacttagcacctaattgtgtaagccagaaaaatgcaaggtgatgaaagagttataccagatgaaatgactgttatcctgagtaaccacacattctggaccaaaagacaaagcagaacacataaaacaatgaacgagcagaattatattaattgtattgtgcagtgactaagtggatgggctctgtagccaaactgcccaagttggaagtctgctctggctctgctatttgctacttttggaatgttggaaagttacttttctgtgctttagtttctccatctgtaaaatagcatactatatagtacatatctcctaggattgctttgaagattaaattatgtaatacatagcgtgcttagaactgtgcttgccttatagtaagtactataataaatgtgtgcagctgctattatcgttacatgtttagatgttaaattgtatggttcagacacttggtataatagggtttcacagatcattctaggcaggtagagtcaagaaaagttttataaaggaaatggaatgtgtcagaaccctcaaaggtagatggttaaacagaattgggtgaaagaaaaaaggtactccaggaccagggaacatcatgaacagaaggtgagaaatgtgaactaatggccgggcgcagtggctcacccctgtaatcccagcactttgggagaccgaggcgggcagattacctgaggtcgggagttggagatcagcctggctatcatggtgaaaccctgtctctactaaatacagaaaattagctgggcatggtgatgcacgcctgtaatcccagctactcaggaggctgaggcaggagaatcgcttgaacccagggggtggaggttgcagtgagccgggatcacgccactgcactccagcgtgagcgacagtgagactccgtctccaaaaaaaaaaaaaaaaaaaaaagtgaaatgtgaaccaatttgttgagttcactgagcagggaagagtccagtctgattgaaggatctgattaagatggagggtgaacactggtcaaataagtagtggaatgggagtggatagggttgacaagattattttgtagttgcattcacattttacagttgcaaacatagcattttgcagttgaatttacatttatttacttaaatctaacaaaaattatattcagatttatttatatgagatatgtaaaacatatattattattttccttttattttataaatgaatatactggaactcagagagtgtgacttgtccagcagcaccaggttttcatacacaaaaccgagtcacatttccaccatatcttgccatttctcttcctttgctagatatacaggtaaatttgacagccaatcaaagcagactcttttcccgtcttctacctttgacccatggagtagctttcaagacattggcacttctctactgaagcaaatctgggtcaagatgagatgtatgctgcccatttcctgagtccttcaggaaagcaagagaggaattttgattaagtttagctcatcttttcagaacccaggccatatgtggtccatagtgtcccggatatgcttcacagtgtggaactctgctctgtattttctttaataaggacacacacacaggaaaatttcaattgaagacctcacaaatgttttgagattttattgagttatcatctgaacattatggattagtctaggatttcacatgatagagtgtatgggcgtatgtgagtaaacaaatacacattgtaggggaaggtgctgaaatgttaaagttaacattcccaaatagaaaatgggatagtttgcaggttactttctgaacttcacttcgtgttaattttcacctaccagttggtgggtagaacaacattaaacacattttactttagtacccttctgttcttatctggakcatggtaatcccaagtacagacagaaaaagaagaagcagatatgcgattaaaaatgaaaataacataacaacacggattattgtgatagatcctgtacctttttaaagactctgacattccacttaggagtaagatggaaaagtcccttgttctaaaatttgaaaatgataaaaataagtcatattaatggaaattaaagaaagaatatgtccattgttaggttatgtaaagggtacacatctcacttctttcacatcgttttttgatttaaattaatgtaactaaattttaaaatgacggatttaatattcatgctagcagtttatttttaatgtgaataaaattaacagtaaaactatcataaaagatagatggggccgggcacggtggctcacacctgtaatacccagcactttgggaggccacagcaggcgaatcacctgaggtcaggagttcgagaccagcctgggcaacagggtgaaaccccatctctactaaaaatacaaaaataagctggacatggtcgtgggcacctgtaaacccagctactcaggaggctgagacaggagaatcacttgaacttgggaggtggaggttgcagcgagccaagatcacgccattgcaccccagcctggacaagagtgaaactccatctcgaaaaaaaaaaraagaagaagaagaaaaaaggtagatggaagtatcttctgtaaagtgccacagattcctggcttcagcgctacctggattccttgaaaagacagggggcccttttctcatctcttagaacctcactatcactttgcatgtttttgaacacatggtaggtatgcagtgagctagtgttgatagatgtctcrtcacgttatggttggttggagggaagaaagatcactttttaagttagtcactctatatttaagtgtttttgtaatgggaaatcacctgtaaaacgagcttgcaggaacgctctaaagattaaaactgtgaagtgtgtggcatatgctaggcacttaataagtaaataatagctcttgttattgttatctttaaattttactgactgttgttctgactttgactttgcattttctgagatctttgaaaatacatattgttagtacctgttgatttgtattttgtgcctttgaaggaaagaatagaaatattattccaagggagggttgttggtcttaaaatatttttgtgccatttttattgtaggcaagtatatcacattctaataggcgtttaagacagttcaatacttaatacaagtgtatctttttaaataagacatttgaccagctgaatagattgtagtaacctgttgtaaactagtttcagctgaaatctcactgatcccactagatggcgttagttcattaaggcataacttcatcctctagctcaggcagacagctgcctgtgtagatgaactgattttagtatctttagagagtgaatgtggcagtaaacttttagactccttgttatttatatagcgtgatttgtggaggttattcagaaagtttaggaagatagaacactgagggcagatttattcaaactaaagaactataacaagttgcaatatttcgttaggtgcttattaattctggatttgacttagcctttgccctaattgtatatacaaccgaaagattaagaatttactgatttctcatggttttttgccctattaaaataattcttgtttgggcttctggaagcattggaaaacaaatgaaaattgggagtacacattttttaaagcatgaagtttataacatttaattttaaaatcatttggctcttatttrtaggaactatgtcaacagtgatctacttgtcagttaatctggttctttaatcgtaaatgtaaaataacagtgaacatcctaattctttaattctctcttgtctgaatttgaattattttttatctacaaagactgttttatattagaccagcccattttcaaagtttaaaattgtgcttttccacaggcatttgtaggctccaaataaacttttaaaattgtatgttttatttttcttactgttcttgagagttctgaagttgaagttttttaaagaaatgaatacgattcacatgcaaaaaaagcatttccacatttcattagaagtgtttcttttttctttatgatcagattcatacagctagagtaaattgtttcagaattggtgggatgatccgtcttgagctatggaagcttaattgtgctacaaatattattcttttattcattgctcatagggagtaagtagttggtgctgatggttcccctaatgtttatttaactattccagtataaggcagttcacatttcttagtaaaaggatcgttgatagtttcatttacctagtatgtaataaaaagctgagaataatcaggggcatttgctaatggagtcaaaataacctgttttataagtcagaacaggaaggtctgaacatttggtgcccattaattaagttaatattgcaaatgaggtttttgcttttcttattatcttgaaaccttcaaccagaaaaagcaactgcctaagattatttggtatatacaaggcgttaatatattgtgcaaatattctacagtctgaaaaatctcaaaatctgaaacacttctggtcccaagcataaatttgtataaattttatacaatattttacatcattttgtacatgaaacaaagttttgactgcatgttgactatgatctatcacttgaggtcaggtgtgaagttttccagttgtggcatcacgtcagtgctcaaaaagttttggattttggagcattttggatttcagatttttcagattaaagatgctcaacctgaatttttggactgcggttgctcttggtaactgagcctgcagaaagtgaaattactgatgtgggggactgctgtattagttgggtgtatacatgcatgtgttaaaatttaactgcataatctcattttccatattcagagacatttgcagtaagagacaaatattattgtaaagggaaaaagtaaactttgttgtgtagtgcttatctgtttccctgtgttttttcttgagggtagccatgataaagaaggggaataaatttcgaacacatgtaagtatgtgtgtagtgaatgggagagagggagagatggtattttcaggaggcataaactgtattttacaaagacatcttttagatgatgagtcctttagtcttgaggagacagttcaatggaaagcattctaggcctggcagatacagccctcatccacagtaaaagttaagtgctatgaaaaagtaatagtctgtgctatgcaaaccaatatgaagaaaagtgagtttttgtttgataagaggtcaaatgagcacagttctttaaaacttttatgttgaagaaaagaatagagaatattctgtcatagctactgataaaatatttcagtttatgaaatattgtcacttacatgttttaagtagcttttaatataatcttagaacaaggacttccttctctcctctaccccttccctactccccagtgtctcttatttcttatctattaaaagtgaaatccatttcctttggtcaaaagtacaagttttttacagtgtccaagacatctcaaattgattcactttgttatatagaaaacaccatctgtgatgtcagaccatttcttagaaaattgactgttaagagctcttttgcattgagttatttggtttttatgaagatgaacattggatgaaatttcttaccagtatgcataattcaatgattttaagaatctatggaaaataaatttaaacatttttaaatgaaatgggataagaaaaaggggagacaggattttattcattggtatatctttttaattttctactttgtgactccgtttaaaaaaaccaactctgtaattttgaagcagagattctgaaattaccacttttctaaaaatatcacttacagctgaaacttaatatattgaagcatttttgttctgaggatgatacatattttcataaagatgtatttccaaatggaaacagcactgaagcttctgaaatagggaacctttccaaaataggctgtggttgcctgggtgaagaatattaggttgcaacactcaaaaaggaaatcctggcataggaagcaattgatgaagggcaaatgtctgcagagtgtaatgaagcttttaaaagcacttgtgtgggcctgcatgcaaggccttgccagtacttttcaaattaaaattcatgtgctctgtagtgtgctgagccatactcatacttccatctttacttctcttctacataatatatcattcttatttttaatcttctataagtactagtcatcatcctagtgagaattgtagcgttttctcactctgcccttcgtgaaaatgtcatcatcattatgggcagcagggcagctttatggtgttttaaaaatcaagttcatcagcatttttaagctatcaatttcttgttttagtgtcattagtactatgaatattgaatattttatgactctttagttttataaaatatttttttcttttagcagtgggggagaggataggtattatcctcattttgtaacagtattaacaccgaagagagtctgagtgatgactagacacatagatggtgtgaaaagaaaacttggcatttttttttttttttgaatgttagcctttaacccaagctctttcctccatacactatatgcacaaagtttttaggactttttttagtggcactctcatatacagattttcttttcaaagcaagaaataatctgagctttaaaaagattctattgaggaaattattctactcctgtttttatagtctcagaatgtctcaagataattttaaatgggtttgtgctatttgggggagaagagaaagtcacagaaacttacctgattttgcaaatccaaaacagttagaaatcatagtattcaatctttagaaaaatttctgtagcagatatttatccaattaattcattttatttgaattcatttaatttgagctgtgttttaagtaaaaaggtatcaatgatctacttaatgttaaatacattgggtgtttttttgttttgctttgttctagagactttttttttcattacaaatttcggccttggggaagaagggtcttttgaataaagataaaactagttctgtggaggggtttgagggggtgcctctaaattccctgaaatgtgtgcaaaattgttttatatgtttgcacacataggacattttacggggacagagtccaaagttcttcattatatcccttaaaggtgtatatgacatcccctttatctaatggtaatatctgtgacgtaaataagttcccttatgaagtttgaatatacagcactttctgcccttaaatgaaaaaggccatgtgtgaattcctttttttttcccccaaatagtgctttcaaaagcccagaagtatttgctgagggtggttctcaaataaatcatcatttataaatggaaagagatatggtaggttattattggaaagttaataaattttacaaattgtagtaaagttacaaattagtttatttctgaagcattagccattccacaaatattttgaggactatgcattctagttatgaaggccaaatatagtaacaaatggtgaggatggagcaaaagaaaaagttgcccaaaggagctcaacccaccattaaaacctagcccagtgtgccagattataatgatgtaaatcactaatgaatatcatgttatttgtaagggagtgtttaaaaacattaagtgaagtagtaatttttcagtagtctaaattttaatgaaagcatttacttatgtaaattggagctttatttttatatattagttttactgttttgttttcactaaaaatagtcactcttttctttatattttctcatgaaatccttccgaaccacttctagaaatggcatcgtcttgccataagtattttgttttctccccatctagtttttatgaagtagtgctaactctgccttaatttgatttggcatccctgcaattgaacatttgtaagtatcttgtattatggcccatctgggttgtcatagaaaccaaagacctccatcctcttccctctagttaaaaatggaatgcaaacagggcttcaaagtgacgtttttctagtacgagtgacagccctgtgaagtgcagaacagaaaggtttcttattggttttattctcccatggcctatcataccagttaactctgatgcacacagcctttctcttgaaaatctggcaagatactaatggaattttaaaaatgtaagcatgggggaaaagaatgtagttaatccttttcctgttcttttcttatacaaaaattcagtgttagctagcagtgtttttgttttcctccctatgttattaggtggtctgttgatgctgtggtgcatgtgacggagacaccaactggagcttctattgttagtcttgttatttatttcctaggttatatcaatgtgggcttatctcattagaatctacaggtgcattggctaagtacatggcaatactttatcggaatagaaatttgttgataacagtgatatctagtgtgctgtcaatggacctggtgacagaacatcttagagccccatttccagcccccctggtggtcacagaacctttgacttaaccttgatggtttttcagtttccacattcccttcagattctctaccagaaccatacatggctttaagtttttcttcttagacttctgtgatgtttctgcttctgaagcagctatgttagtaagttccagtgaattatttcagttgtgttagcaaaatgtctgattttatggttaagatatgttgagctattgctgtagcattacttagagtttagagtgtcacattcttattttaacataggttttgaatatagaagatgacacagtgacctctgaacgtgaaacaatgaaaaagtgacatataaatttatttatttatttatttatttatttatttttttgagacggaggttcacttttgttgcccaggctggagtgcaatggtgcgatcttggctcactgcaacctccatctcctgggttcaagcgatcctcctgcctcagcctcccaagtagctgggattacaggcacccaccaccacacctggctaatttttgtatttttagtagagatggggtttcaccctattggccaggctggtctctaactccaaacctcaggtgatctgcctgcctcagcctcccaaagtactgggattacagacgtgagacaccatgcccagccataaatttatatcttaataggaatgtttcagaggggttggattaaaatcattagacaattgaatttgacagatcattggtcaattttaagtgtctttacaacttttcaaaagaaaaacgttatagagtctttaaagctgtttaaaattattcaccatttgactgttacctagtttctggtaattgtgtacttgtctttagtcccatatcgcagctaatggtcattttcagcagtgaattcagaagtgctatgagtactatcatatcttgatgagagagatcctgcaactctcagtagagtatgaagaagtagtgcttagcttctgttacagctagaggtgagagaatatattttctaaataacactgtattccttggcatatagtgtagaagtgaataatttgtttgcatagcatagtgagggaaatagtgtagcagtttcttcgtgctaaatatgttggtttcttctctatagtttgctgccttcactaacaatttgactggtactattgtgttgtcttattttgcttacacctatcaagcagttaaaagggctaatgtactgtcctcagctctctagtcaatcgaaaaattagaatctcccctagatcattatttttacttatcaatgttgtttaaaaagactagagatgttgctggttgtttagtaaatgtcatgttgcagccttgcagaatattgcgactttctcttagcacagaggataagacaagccttcctgttcaccactgctatgcctcatcctcaagagaaaagttacgatgtttctatatactggaggcagtaggtgcttgaacaaaatgaaacatgatgaatttctcacccactgggatacataaattctcatgtaggtatcagtcccttatcatctctgtgctttgtcatcactaaataagtaacataatatttggtcctttcaaatctgtgtttttagatgtatttctgcatgttattgacattgttcttcctcttctaacccactaatccattaaatattcagctcctcctaaattatacattttttgtcctctatagatatatttttaaatttcccttctcaaaataagcttgcattttgaagtacatttgttagaaacaaggtagaataattctactttctagtctcaaggaacagtcttctaaatgtaaagaatagaacctggtggaagtatatactatgtgctatttcactgggtacatattagtttatctgtttagagacctataatcaaccactagcagggaaacttgccttactccatttctgcaaagtaataatttttaattattattgatagaccaagttttatttttaatctcaaaaaagtttccttgagttagcattgcacaaaatatatactctcccaggtttgatcttgacctctgtttgtggtcctgttttctctatttactgctctcttctctgtttacatagtttttaaattttctaataattttctttgttgatactctgtaagaaatggtagggttctggccgggcacagtggctcacgcctgtaatcccagcactttgggaggctgaggcgggcagatcacttgagctcaggagtttgagaccagcctggccaacatggtgaaaccctgtctgtgcaaaaaatataaaaattagccaggcgtggtggcaggtgcctgtaatcccagctattcgggagggaggctgagggaggagaattgcttgaacccaagagtcagaggccgcagtgagctgagatcacaccactgcactccagcctgggcaacagagtgagactgtctcaaamaaaaacaaaaacaaaaaaaggccgggtgtggtggctcatgcctgtaatcccagcatcccagcactttgggaagccgaggtaggtggatgacttgaggtccgaagttcgagaccagcctgaccaacatggagaaaccccgtctctactaaaaatacaaaattagctgggcatggtggcgcatacctgtaatcccagctactcgggaggctgaggcaggagaatcaytygaacctgggaggtggaggttgcgccgagccaagatcacgcaattgcactccagcctgggcaacaagagcaaaactctgtttaaaaaaaaaaaagaaaaagaaatggtagagttattttgcatgtacatcttctgtttcctaaaatagatgtggaaacttcttaaataatttaacttgttaatatactacatctgttacaatactatatactcagtaggcatattcatttaatattgtcttcaaaccttatactgcctaccactctatccatggccctaacatcctttcacatctaagatgagagagtgattagcacagtgcttgcaaagcagcaggcaaattgatatttgtggatgactcaaaggatgttctgagaaccttttctaaactgctttaaatttgtgtgctaataacacagatggaaacctagctgtgagtaagttaccaatctttaaaacaaagacgactagaatggtttgtatttgtagttcatattcttgtcctctgggattcagtaatctttttagcctctctccacagtggtacatgtatattcctgggtagcaggctgattgctactgatggtactgaaatgttttgataggagcaaaactgtgctgccatcctccttacgagcccagtgttcagaggtgacctgtttgcacatgggcctgtggtgtatcacttttttatacaagagcagtagaataaggtctgactcgagttgattgaagtggtagttttaggttctgataagaggacctattgctggtgagggaggttgaaattgcagaatgagtttgcagcatgaggcaggtctgcccagcagcaggttgatttgcaccgtgagacaagcagcacacataaacagatggcccaacaatgagtcagaacaacagatcctgaacaggtagattggcttttgtctgattcttaacgtggttatagagagtggaattttaatttgtctgccacttttaaggctgcaaaacaagcatttagtgaaagaaattctattcattgggaaatgaaaaatgttattaggcagaggagaaatctgattgtcactggatctagacattgagaaaccagcattttcaggagctgtttcacgtaggcatgggctggcttcatcttttggcatacagttattcaactgtatcattttgctgaatcctctagtatgtaacgtgcagcaagaaaatagtaaaatgatgtcctttatatttggattttaagaagtatagtcctgttatttgcaagtacacttctgatatttgggttaagaaaagcatttttaaaaaggatacactagtgataagtgtcataaaaacatacagcaatgtaagtttgtaatggtattaagcaaaggaaaaacattcatggaaaaaaatccctctgtttcatacatcaagcataggaaaaaggaagagtgtagtagaattcctagatctaatcatccatcttcaaaatgtaaatgtaaacaaacatttctccgccaaacactttcagaaatactaagcgtcttattaattttcaaaaccaagattttgtgatagttttatatctctagaaaagtgttttaaatatggcatttggtgaataaattggtgtaccacttgagttcctatactttaattttgtgattatcacattcactgtaccatagactaacatttacaatggatacatttgtgcccaaagaaagtaagttagtagtcagcagtattgttaggataactattgaccttttttaggttactgtggttagggatatactcagaaacacaaactgctatgatggaaactttattctgagttgctgtgaaggctgttatgccattagttaaggcagagttataaatatagctaccttttgtttcccaaataattgggatcctattcaagattaattgtgccaacacctactttcaaaattgcctttcattttatctgctcaagcatgtacacctagcctttgctcagggtagaaaaagcactaatctacctttgtgcatatggaragtagcattcctggcactgcattaaaaactccaggagaatgcattattaatggaatacgtttctctctctctctctgtctctcaaaaagggaaatcatttatgtggccactgtcaaggatgatagggacagacttagtgctagttcttaaccagcatattttttaagtgagttactgagcaatacataaagagaaatgctttagcaagtaaataccacatgtagcttgtagacaccaatgtgatctaattgtaatatagatcactctataatgtgtcaacctgtaagctttactaccttgagtactagatcctatgtttttaataggatgccacattatcaaaggttagaaaaacaataatggctaggcatggtggctcactttgggaggccgagccaggagggtgacttgaagccgggggtttctgaccagcctgggcaattcagtgagacctcatctctacagaaaacttaaaaattggctggatttggtggtgtatgcctgtagctctasctacttgggagactgaggtgggaggatcacttgagccggggagtttgaggttataatgagctatgatcacaccactgcactccagcctgggtgacagtggagaccctgtgtctaaataaataaataaaaattatttttttaaaaaaagccatatactgaaaataataatgaatttggggtttgaatattatgaagattaccagaaggtttttgaatcacttttgatttaaataagctcccatcatttgtttactggtttccagctttatgtttttggtttgtttttgtctacacatgtataattgagctgaatatgtgtgccaataagtaacagagctgcgttcagcttctgcttaagtctgcagtattaaagtcttccttttgttacatgtgctggtcttgcagactctgtagagccttatcaaatgcagccagttggtgctgctggtatgaaagcacaggggagctctcatgtggaaggttaatggagtgtaattataaagaaaaatgaactgctcaaccactctatctcactctrcctgcaccaagagtgacaagtgctctgatcttttataaacccgggagtagaggtttaaccatctaaaattatgacagtataactgtcacacaaacatgctgtgaagtataggtatgcacccctgtgtaagaatgattccttcctgttaggggagtctctgttaggacaggagcaccttcagccaccaagagcagctgcttgttaaacattgcacttttgtgtcacttcttttccactgaatttgttccattttcttttcctaaaagtgctttctcccctatgattagtggcaaaagtggatagcctgctgatgagtgggttcgttccactgtatcccatcagacaacaaatatccatgctttctccaagcaagcctatcacacttgccttagcagccaacctgaaatcagctgtattcttataaaggggatggaaataattgtctcttctcattctcaacatctaagcagagtagactctaggacgcttaggtacagtctgacaattaggtctttctcccaggtctgcatatagcacagagattatacacatttctgtgggctcaagatggagttagattcttacgtcctttggttgaaaatattatcagaaatatttagtaaggaaaatgcagcacagagggacaaggacagagaaataccagggagacattcaaagcgtgtgatgactagacaaactgttactagtgtgtcacgttgccagtgaatattgcaaagtcgtcctactactggaacatctgaagggtaagctaagcgagctgggttgcagagctgggttgatttagagcttttgccagctcagcacagagttgaaataaggtgttgcagaatgatgcaacagcaaaacccctgacatcttgttcttacaaagcctaaaacataaccactcttggtgaggctgtgctgcctactgagataagtaaattcagcatcacatacattaggcctgtggagactaagcagaagtgatggctgcgtcacttacacagcagtcttactgactgagccctggtcttgcctgatacgtggaggaggggcagccaggattcctagtagcagctctgaaagcagggaggctggttttaaaacctctctgtgtggtttgtaatggtatttccgcagcccctttgcatatgggttttgattatctgagctctatttcaaaagacaaatagctacataatttttatggcagtaagataaatctgttagtgaatcaaatttttaaatccagctttagtggatggtaagtaaagtttgctatgatttactttaaaaacccaccagagcccaacactttacccagtctaaatgttgccagtgtccattccatttttaaaattgaagtcattattccagaattgaagtttttggcttgaggctgtaaggttagcaacagaatcttaaaattgtccatcatactatgtagacgaggaagtatatcattcttgttgggttggctccagcatttatccctgctcagctgccctgccaaagagactgtcttggatgacagaagtacagtctccctggcactttgaagcaagttatctagccctgcccagtccctttaggaacgttcccagcctttccaagtacttagagcagtttctaggaaattcatctcagataggcactgtcggtgtaacaggctccagagctatctcgccagctgcccgagcctcatctctgaccgtcccgtttcccagcatcactgcatccactggctcctctcctgcttggccctttcaatttattgtgtaggttactctacttccttggatctcaacagcctgactctgtttcctggcagttgactgtatctagagaatatgaccagaaagggacatctctccctgttggcccagctccccatactagtgtactctgcattcagtcagtctgcttggatgccacccaacctcctgtsagccccagaaaagttggctcagaaaaatgagytccagctttttgttagtgaacagagcttcattcaaactagttttccagagggcagggattccatattctagtcccagttttactatcacagaactgtgtaacttttgattggtcacccatcaccatgtgcctcactctccccatctgaatcaatgacagttaacataattagccctgcacagttctgagagtcttatttgataagagggtttcaaaatttacaatcgtaaagtgctgtgtaaatatgtgattacttatacacacaagcacacagaaaaatcacatcattagggaaatatttgtggaaaatagtaccatcatttttcatttagggtctactcagaaagtaagattcttgaaaaattattaaatagtcgtatgtttataacatgaattgttttttcttaatcatgtaaattaaatgattttgaaaaatcagagtactcagaaatgagaaccagttaaatgtaaaagatgttagtttcagtgttctggttggattccaagtgagattattacattttgcttactgtaattccctagatagcttcagcaaggtagttttcagttttctgacctctactctacagctctttaaacaactgctttctccaccacttgaggtagctgcggttcagtggtagaggaacggatttcagtttatccttgtgtcagtcttatgtgacaggggttaaattatatgtaaggtactttaagctgttttgataaagtaggcaccattatgaaacgtattactaccattttcatttccactgttatattttgtatatagttgtgtgtttccctgtgtcttcagatattttatcttagcatattctcagaactcattcatataacttgccttttgtctatgcattttcccactaaagtcacatcccagctcttccattatgataaaattttgattagtcagaaggccatttgaattttctggttatctaaaatcatttttggttcaccttgtgatgtcaaaaaattttcttttttgagacggagtctcgctctgtcacccagcgctcaggctggagtgcagtggcgcgatctcagctcactgcaagctctgcctcctgggttcacgccattctcctgcctcagcctcccgagtagctgggactacaggcgcccgccaccatgcctggctaattttttttttttttgtatttttagtatagacggggtttcaccatgttagccaggatggtcttgatctcctgacctcatgatctgcccgcctcagcctcccaaagtgctaggattacaagcatgagccaccatgccgggcygaaaaattttctaagtaatgtctaattccactttcctagtagttacagttcagtgagtgtaattaccgtctgagggttgaaaactggtggcccatgggctttatctatcagcaaagatactttgtttgactcacaatattaaaagcagttcattgattagtgttattagggcactgcctctccagttgatgtcagtccctatcatgcctagtatcttacacctggcctgcttcattctcttgtattaatattacttgcctggcaataggtaataatcctattacatgtcttgcaaaatgtaatcatcagtttacatgttcacgtgagtgagatttcaacccctgaatgaaactgttctttaatgatttagcttctttgggtgtgtcaggatcatctttgtgagcatttttctctgtgcagtgctatagaggtaaagatatacatcaggaatgtattcttgccattcagagattcataaaattttaatagaagataatttagagattgagtgcagaagctgagaccaagattgggtaaataactgaccaaaggtcacaaaccttgtttagtgacagaacctaggtttctcgacccagtgtattatttttacagcacaatactgcctctctacttattttttctaaaagcagagcggaggagaaaaagtgcacgcgtgcatgtgtgtgtgtgtgtataagcttactgcagctgtattacaggtgtgagggctccagatccttaccagcaagccagatactggtgttgggggtttsaggtgggaatatggaattagttatcaggagttggaactctttaagtctgactctatccctgatttgtgacctaggtttagtcacttaattactcagagcctcattgttctacctggcaagtaatatccatctgatattattacttcgtttttatgtaacagttatagaattcactagctactacattagaccatatggaaaaaatcaaggtactactgtgatacattcagacaatgcaatattattgagagctaaaaagaaatgaactatcaaaccatgaaaaacatagaagaaccttacatgcttattactgagtgaaagaaaccaatttggaaaggctgcatactgtatgactccaactctatgacattctggaaagggtagaactatggaggcagtaaaaagaggagtggttgccagagggtgagggaaggttgtgctgaatagacaggcatagaggaatttcaggacagtgaaactactctgtgtgatagtataatggtggctgtatgtcattatatgtttgtctaaatccatggaatgtacagcatcaggagtgaacactagtttaaactgtggacttcgacagtattgaggtgtcagtgtaggttcgattgtaacaaatgttctgctatgtgtagcttgttgatagtggggagatgtggggtggggaggccaggagtatgtgggaactctactttctgttcagttttgttctgaacctaaaactgctctaaaaataaagtcttctttaaaaaaaaaaaaacaaatcaagggactgcctttatgttcattgtagtgtcctcttttgaccatgcatgtcaatacttttgctgtatgtagaaactggagaacaatacagtaaaagcatgaatcacagcttcagtacttaggagtatactggaagaagatgaaaatgggctaggtgcagtggcacacacctgtaatcccagcactttgggaggctgaggcgggtggatcgcttgagtccaggagtttgagaccagcctaggcaacatggcgaaaccatgtctctactaaaaatacaaaaaattagccgggcgtggtggtgcattcgtgtagtcccagctccttggggagctgaggtgggaggatcacttgaggccaggaagtcaaggctgcagtgagcccagatcatgccactgcactccagcctgggcgacagagtgagatcctgtttgaaaaaaaaaaaaaaaaaaaaaaaaagaagatgaaaatgctataaatgatttttactgtggccattccatcctttctaaagtgtgagaggggtgtgtgtatgtttgtgttagtgggtgcatacatgtgtatgttcaggtgtgaagactgtaaatatttgtgtagaaatttgtggattagattttgtaattagattttgtaattttcatcacctgtgaaaaatgtttttcttcaggcttaagatttaaaaaattctctttcttttaattttatttatttattttttgagtcagggtctcactctgttgcccaggctgaagtgcagtggcacgatcatggctcactgcagcctcaacctcctgggctcaagccagcctcagcctcctgagtagctgatactgccggtgtatgccaccatccctggctaatttttgtattttttgtagagacagggtctcactttgttgcccaggctggtctcgaactcctgggcccaagcagtcctcctgcattggcctcccaaagtgctggaattataggcatgagccactgtgcccagctaaattttttatttttttatttttatttttatttatttatttatttattttgagacagtttcactctgtcacccaggctggagtgcagtggcatgatattggctcactgcaacctccacctcctgggtccaagagatgctcctgcctcagcctcccgagtagctggaactacaggtgcgcgacatcaggcccggctaattttttgtattttttttttttttttttttttagtagagatggggtttcaccgtgttagccaggttggtcttgatctcctgaccttgtgatctgcccacttcggcctcccaaagtgctgggattataggcatgagccaccgcgtctggcccaccccagctaaatttttaaccaaatttgttttattcattaagagatcgttcatgcttttcttctacaatgctgaayctctctctttaataagatttgtagtactaatgatttaaaacaaacaaaagcaaatgtgttctgaaattctgaaagatgagttcaggtttcttgtgtctctgatgaagtaaactcagataaatacagagaagtgcaaattatcctttatcacatgtcttggaagagccaattccatgaagttaatcagtaattattttggcaggctgcacttgtgaggaacttgcaccctccctgttgtttgacgaggggtgtcttgtcagaaagtaaatttataacattgttcatttttttctttaagtgattgtaacaaatatttggtggtaaatttaactactgaaattaggaatactttgtgaaactaagagggtagcattcagcagctttagaatcttttctttctttttttaaagacagtctcgctctgtcaccgaggctgaagtacaatggcaggatcatggctcactgcaacctccacctcctgagttcaagcagttctcatgcctcagcttcccgagtagctgggactacaattgtgccaccaccatgcctggctaatttttgtattttctgtagagacgggatttttgccatgttggccaggctggtctcgaactcctggtctcaagtggtcatccagcctcagcctcccaaagtgctgggattacaggggtgagccaccacgcctggcctagcagctttagaatcttttaaaatttatgtgcctgtgctattactgtagatgattttttaaattatgattttaagcatcaagagtgtgatattaagaatgtacttttgttaaaaatacttcccaattaaaaatgccagtgtttagttatatacaagtgttacttttgtttaaatgtaaggcaaatattacatttcatcatataatattttctacatgatatatactgcctgctacgatatatttttctaatattattgtctttttctgtcttctaagaaaacttacagagttgaggattcttaaaaggtatcctcatctttgaaaataatggatctatttcttagtggatgtattctgcatagaatttggttaaataatctgttatatttacctcttctagcatctgattctgtcttgtgtttctgtgaaaatgtgacttcctacattatctcaaatggtacctagggcttggagtaggtaaaacaatttgttttgtctgagcagtgttccataaaatgataggggctttggttttgttcctcctttcccctcctccaatttagcatcatcactgtacttaaattgtattttcatatccaacttgtcagggacagctactgtgcagccatctccagtcagcattcttttgtgaggaaaaccacagcagctacagtgcagaggaatgggagaatttctgtagtgtccaagacaattctgatattaacaaagcagtgctgcctttaggttgtgggatacagccatgtaatgatgaatgacaagctgatggtatgtgcagcggtgttctgtaaacagmcagttacagagggacagacgttttgctctattggagcttaatttacaaattaatagcctctatgatatatcttattgtggtacaaacacaatgattcaggtgcttttttttttttttttttttttttttttgagacggggtcttgctctgtcacccaggctggagtacagtggcgtgatcttggctcactgcaacttctgcctcctgggttaaagcaattctcctgcctcagcctcccgagtagctgggattacaggcgcccaccactatgcccagctaattttttgtatttttagtagagacggagtttcaccatatttgccaggctggtctcgaactcctgaccttgtgattcgcccacctcggcctccsaaagtgccaggattacaggtgtgagccaccacgcctggcctcaggtgcttttttatggtaacaaacagctaaattgtgcagattataaatggttcttaggtatttactgcgtctagggtctttgatgggtcaggttacatacatacatacatacatacatacatacatacatttatttatgatacagtctcgctctgttgcccaggctggagtgtagtggcatgattatagctcactgaagcttcaaactgctgggcttaagggatcttcctgtctcagcctcccaagtagctgggactacaggcatgagccactgtgcttggcccaggttacatttaaattgggcatctcttttacgcattcataattatggccctgaaccaccatagaggtataagaaatctgggatgtacctagatttccacagggatatatatcctaatatatttgatttctgagattaaaaggcaacaggtagcattcgctttgatattgtactttctttttggcagttgtcattaaaaaaaaaatagccaaacatagattgaactagcattaaaatgattagatgttaaaaatcaagtgattgaaatataattgacattggaaataaaagtcacatttaattagctgttgctctgagttaaaaattcatactagacaaattgtgtcattcattagttactatccctttttttcacattgcccctgacagtttcctaagcattccccaccattaattaatttgattcccaatatttttctgaaggaaggagggcggtatagtttagtgcttcaaagaaatgtagaaaacttgaatgtaagccatctggacttttaggtcttttatcacacataaatatattacaactaccattcctagtatgcattgttcgattgtagtttatgtgtttatacttttttgctgcagcatcgtcgtatgttacatattagaatctgtaattctctaggggtcacatctctcttgagtacaacagccacactctttcttgtttgacacaaattaaaggcagtcccaggtttttagaagggtctctaaatttaggcaaagtctgactatatcaatattagtcttttatagtcatacatatcaagttagggggaagatggggttgagtttacctattagagcatgagtgaattaaataagaaaactgcatttcaatcaggctagcaaataaaaggtctaaagtctaaatttttagagagatggactgtaaatcctaatgatattaataaagggtctcatctcctatggagatgagatgtaaaatccattgatgtaaatacctctgtgtgtgtgtgtgtgtgtgtgtgtgtgtgtgtgtgtgtgtgtgtttgaaggaagaataagccccaaagaatattttttaattaaaaaagtaagccgaagtctaatcaataccatgatatatgcattctttgccatctgttaaacatccatgcagagaattttaaactttactgaaaaaaatctctgataattacagttgctgctgttgtcaatttgtttatttgtactatataaattccatgacaacttgagaactataaaataattatgtccccaaatctcaaaaccaggaaagagacctwcttttgtagacattgtgtccagttcactgtgtaagatgaggttgtagatgctgtttctgtcaaacaggtggtattttaaaaggatatgtactttttaaaagaggttaaaaagggaaagaaactatttgtctaattctttgtgaatctcagagagtctggggaaaactttctagtatcttacaaaatgaagaaagtgcaattattttagctaagtatatttttatagcttctgccaccagtattcctccctgtcttcctctgttagaattctatcctgtgtcttgcctggactatcccctccaataactccagtgcagattctsttattgaattttacttgcattaaggagggagtttatcttgagtttctcttctgtgtgtttgtccataaaatggcattctgtgtttttgttcataaaatggtgaaatcttcacttagtttctgtttccattaaacaatacatacattttactctagattgtaattttgtctctaatgttatgacagtaacacatcccctcttctttagaggataattttgtggcacattctgaagactgccctgtctccttcctgcatcctcagcgttgatgaatattggtgtgacttatcaatgcagtggctgagttttagttagayggtagaaagtcttttttttcctctttgagtaagttctgatctcatcaacaaataaacatttctccaggttagtttttccatacgcgtaaaatttagtatccttggtttcattttgagcaattggtgtgtctgaagacccagaaagattttgagtaagatttgatacctttctgcatttgtgaaaagttacaagtctctatcagcctctggtataaagagtgaaggttgtatttttarattgcatgttgattcatggaaggaataaaaggatgcatctttaaggcaatactgtgtaagaagatgtcttgagtgggtgtggccctctaataattgatacgcaacagatactgccatgtagagcacaaaccagtggagtgactgaatgtgtgaaaaagcagagacttgcagcactgacatccagttgtggagggcagggtcttggagtttcttttgagagaagctttctaaaatttgtgggagcaatttttgataggaataaactggtgggttgattgggtgggggcagtccttccgtctctccgtctcccttctctgttgacaaaagccatggaacgtgacttaaacggtggaaaaacgaacctgattttctgttgtattagacctataaaattccgtatttttcttcaggatctgtcttgctgtcgtgtgaacacgttgatagtatcgctgaatgtcacaatattgatcaccgtgactacctgtcttggaaactgtgacttgaagtgtcagaggctctgtgaactcttctgcctgaacaagccctgatgaaacccagtgatgcgaatgtcaagggaatctaaggctccttgttacatgctgggtttatggagcagttcttgacagatggattgaagtgggcggtactagcagttctggaggcctggcaygttggcttattgtttatagaaatatattaagaagaaaagatgataagttattaattttttctccctctctcccttccgtctttgttctttccagctttcttttttcatttccctgattttttccctctcttttaactctcattaacttatcagtgaatgatgaatggccagtttgtgaaatttagccctttctcaaagcttcaggataatgttccaatatagttagctacatttaaagatctccattatatgtgaatacctttgaaaatatcaaatcatgtatgccagtataaccttcgtcagtgaccagcagcagtcatgacgtcttcatttaaaacacatagtagtaaaaatataggctcatctcctgtggagatgagaggatatcctttatatagggagcagtgagaaccttggatgataccacacagctagggtttttgagatattttcgccgtattctcttgctgccacccagaagtggtactgacctaaatccggggtccctctgaagtcatttgagtgctgtgtttgccagagctgcaagactgaactagaacgagactggattgtgagacttagaaaagccagctaatatgcacagcaactctcctttactcccagtccttggaagagcctgcagggcctccacacctaaggagcacctctgctgcagagctcacctggctttcagttactggtttctaagtgcagtcatctatatttaagtgacagagggcatcagtgcttcctcaaaatcttgatttaaaawtttttttttttcacagatagcaacagacatgtataaccacacacgcagtattctaatctggtgaacacagcaaggagtaagggacaattcatttctgagtggcagtttgacataccaacgctatcttttaaagaaagctttacccagctcatatgatctgacctgtaatgcagagctctctttctttttccttttttttttccctcctctcaaggactgatgtaagtttgcaagtattttgatcatgtccccccaccagcccccaccccaagcttccacggctttgtttcaggycctgggggaggagcagttgtgaatgcagtgtgactcacttgactcccacgctcctgattctggttctgattggtcgtcaccttgctctagccatatggctgaagagtagtactctagcccgcatcccttgctcctgctttccctactgttcccttctgttgtacatgacattggaaatgggttctgggctttgtttcttgcttctagtgtactttagctaggcagtgattaggagagcacattgtgtttcctaaggatggctgtagaggagaaaaaaacaccctttccttttgtgactggtatagtaattagtttcctgtgctgtttttgtccaaagtttattttttggcaggtgtcatgtttatgttgtattatttcctcctgatttatctccttcttctgatttgatctgttttgggttttttattgttgtttttgttttgtaagagctcttagggttcctttctctggctgctgatgctgcacgttagctagttcgttaatatgtttgatgtctgatggggaggaggactgaagcaactctaaataattacttaatttttaaatgtctaaatgttctagcagtcaccaagcaataaaatttacatgagattctcaacattatctgcagcaccactgctattactttgccttctcctaaactacagcagtttaattattctgccttttatattggagaaatagaattttgaagacttgaaagttaactttataagcatttgatattttattaatttgcatttttattattctgcagatagtttctgcaaagactttaaactctgcatcatttaaaaaaaaatatttactcagagaggcagtgctagcagaatataatgcatagcagaatttttccccccaaaattggcctttatatgatattttagttgtctgaaaagaatcaataataaaaatatttttctaaaaacctctcagccgggcgtggtggcttatgcctataatcccagcactttgggaggccaaggtgggcagattgcatgagctcaggagtttgagaccagcctgggcaacatggcgaaaccccatctctacaaaaaataaaaaaattagctgggcatggtagcacgctcttgtagtcccagctacttggtaggttgaggtgacaggatcgcttgagcctggggcgtggaaatggcaatgagccaagattgtgctgccgcactccagcctgggtgacagagccagaccctgtttcaaaacaaccaaaaaaaaaaaaaaaaaaaaaaaaagaaaaacaaaaagagagaaacaaaccaaaaaataaaaacaaacaactctcaagagaacttttttttttacttaaagattttagaaattcattttatacatattttaatgttcaaatatgttaaatgagtaatccacagatttggattcttcagagaatatgggggatgaagttggttagagccataagcaggcatttgagaattaacctggctcttatggtttcatctaactatttaaagctcttcattcacttctttttcttcattcataatctatattagaaaatcacaatctatttttatcagaaatagcacacctctgctaatgaactaacttgaaagtgtatgagatatgagaggaatgctgcttataccttcttcctcctattagggcaggagagtcagagcccaaatatggccccaaatagttattatatgctttatgagccatttgttggtctttggtcccmccmctttacacatcaggtaaagagaacaaggacatttactgagcaatatagttttttttttttttttttttttttttgagacagggtttcactctgtcacccaggctggagtgcagagtgcaatggcatgatcttggctcactgcaacctccatctcctaggttcaagcaattctcctgcctcagcctgctgagtagctgggattacaggtgtgtgccaccatgcttggctaatttttgtatttttagcggagatggggtttcaccatgttggccaggctggtcttgaactcctgacctcaagtgatccacccaccttggcctcctaaagtgctgggattacaggcatgagccaccgtgttgggccagcaatatagttataagtgcagagtatagttgtgaaccaaataagcccctgcactcatggggcttacatgctgttgaagtgtattataataatgaaggtatccagaaacacatttctcttggatttgagcaaggcctagaaagtttgaagaactttgacattaatttttcactccacgcagttaaatccctactctgcctaaacaaacgtgtgtaccgccacagaacctgtcccagcaaagaagtcctgctcatgagttacacatttcagtaatttagaatgtgttgtttatatggcatattactgggatcaaggtttctttgtttaacagtctgtttaatgttttcaactgggacagatacatgatgtttgcttaataaaaattactatggctagtatctgtgttatcatatgcaaaaaataataagctgggcccagtggtgtgtgcttgtagttccagctacttgggatgctgaagtgagaagattgcttgatgccaggagttcaaggctgtagtgcatgcactatgactacacctgtgaatagctactgtactccaacctgggcagtatagagagacactatctctaataataataataatgatcaacaatgtgccaatcacagttctgagtactttccatataacaagtcatttggtgctcataagaacctcaagggtactgttaaccacctcattttaaagagcaagacagtgaggcacaggtaggttcataaacttacccaacatcttagagctgtgagtagcaaaactgaaattggagttgaagtaggatggctccagagtcctgctttttactgctacgttgtatactgctctcagcatgctaagttaataataggacatctgagctstgctgtgtgatctccttcagatttttcatttgtgtgcctcagttgccctttatatataaaacatttcttacaccatcagtttcatattaccaataatgtatattaaatgctttaagctcttcatatgtagaacctgtgtaaatttagatgtaataagttttagatgaagctatttatagaaaagatgtcagagcatatttctgtgcagctgatagagcagtattctaatatcttttatttcttttygtcttcatttggtagaaaagagtagttgaacagctacggaagaacctgatagtaaagcaagaacaaccggacaagttccaaatacagccattgccacaatctgaaaacaaactacaaacagcacagcagcaaccactacagcaactacaacaacagcagcagtaccaccaccaccacgcccagcagtcagctgcagcctctcccaacctgactgcttcacaggtraatgtgtggatggaacattgcaggctgcagattgtagactgatttgttgttggtcatatagaactgggtcctgtctcasactatactaagctcagctagaactaaacaaaagttattttgattgcttttttacagtataacccagataagtatcacttgtaatcattggcagaaggaaataacattactaagaagcaaaaattaaatgatttcccacctgtctgaagaaggggagaaaggtagtcaataacaaaaatcaattatctgctttacagcagaattaaaaccttattttgaatttttggaggtatttatttacacttgttctaaaagtttgtgacttgacctcttctggaattcttagcaactaggcatagagctattccaggatcagtgctcttgggaccagatagaaagaagcatttggaagggtgctatggctgggctcagtagctcatgcctgtaatcccagcactttgggaggctgaggtgggcagatcacttgaggtcaggagtttgagaccagcctggccaacgtggtgaaacttcatttctactaaaaatacaaaaaaattagccaggcctggtagcaggcgcctgtaatcccagctactcggcaggctgaggcaggagaatcacttgaacccaggaggcagaggctgcagtgggctgagatcacaccactgcactccagcctgggcaacagagcaaaactccgtctcaaaaaaaaaaaaagaagagtgctatatttgcactattcatagaaacactcatttttaagcccatatttataagaaaatgtatttgttctaatacactgatgggaatctgaaatgaaagctacaggtcaaaactaaagaaatgggagcttaataaaattctaacttggtgtagctgtgcaaatgtttttaccaaaaagggcatttaaacaagcatacaatttaagaatcgtgaggcaatcaagatacacaaaaagggcgtatttggaaatgatattccaaatgatacttggatccttgaaggtcacagatccctttatgactctgttgaaagctatagatccctctccagaagaatatacattcacacttaatacactcatttttgcacacttcaaggactttgggatcctctgaaacctaagcgtggatacctcttacaaccaacaccaggtcttcactgtgtctttatatagagagaaaaagagtatagttcagttggctgttcactgtttatggacattggactggttcatgtgcaacattttgcaagtaaagaatgaattttttataagaacactaaagataagttaacatttaatagaggttactgtatactggcagtctcctaagtgttttacataatggacatactcctcaccctaatcctaagaggaagttattattaccatctctgtttttttgtttgtttgtttttttgttattgtttttttgagacggagtctcactgtgtcacccaggctggagtgcagtggcgcagtcttggctcactgcaacctccaccgtcttgggttcaaacaattcttctgcctcagcctcctgagtagctgggactacaggcgcgtgccaccatgcccggctaatttttgtatttttagtagagacagggttttaccatattggccaggctggtctcgaactcctgacctcgtggtctgcccgcctcggcctcccaaagtgctaggattacaggtgtgagccaccgcaaccggcccaccatctctgttttttagaagagaaaactaaggcacagagaggttacataatttacctaagatcatggagggtggtatgtggtgtagctaagatttgaacctagatgttctggctgaaaaataggtccattcaactactcttctgtactgccattcaataccaaaaaaaaaaaaagaagaagaagaaaaaaaagaaaaaagcaataccaatactgtataaaaccaaagaaggaaaaagaaaaatccctgttgtaaatcagatagctaggacagcctacataaatttttaccctaatcaccaccccaaggctatttggaaattaggcattcaaaactgactttaaaaatctccttaccagcacttgtattagttctgaaagaatgtttagaggataatttttgtttaagttttaaacagaattgggttaggttgttctctttccaaagtacaggttgatcagaaaatgtttatctgaaaggagtgtggtagaattcattgtttcctgttacataggagttttctgtcttaacccatggaaacatcctgttcaagtaacattttatgttataaaaatcaaaggaggctaggcacagtggcacacgcctgtaatcccaacactttgggaggccgaggtgggtggatcactttaggtcaggagtttgagaccagcctggccaacatggcaaaactccatctctactaaaaatacaaaaattagccatgcgtggtaacatatacctgtaatcccagctcctcaggaggcttaggcatgagaatcacttgaacccgggcaacagaggttccagtgagccgagatcgtactgcactccatgctgggcgacagagcaagactccatctcaaaaaaaaaaaaaaaaaaaaatcaaaggaagcatttccaaaatataatagcttttcctttccctggtagtctgtgttgctttgggatggtgaatggtaagaggcccagggctrcctccaaaacagtgttgtatagcacctctccatccagtagcccacctgacatatttaattgattttgccaaccttttttaaatattgttttatttaatgcaaatgatgcaaatgtttaatgttaaaaaccaaaaggatcctctgagtttttggtttttgagtttacaggtaaactacaaatctggtttttggtgtttgtttgtttgttttttagacaggatctggctctttgacccaggctggagtgcagtggcacaatctcagctcactgaaacccctgccccaagccatcctcccacctcagcctcccgggtagctgggactacaggcacaggccaccatgcccagctaatttttgtattttttgtagaaacagggtttcaccatgtttgccaggctggtctcaaacgtcggagctcaagtgatccacccatctcggtctcccacagtgttgggattacagacatgagccactgcgcttggcactactaacctatttattggtactaccaatctatgtggtagattctggtatacaaagagcagtggtccctgccaaaagtctggtatatcattattaataatttttattcattctgtaaatatttgtggagttcctactgtgtgcaagcactgttctaggtaatgtggagactaaattcacaaatcagagagtttctattttcaagaattaaaaaaatttaagatgtagagaaattttgaggacagagtaattttgactagagggatcagaaagtacttgtcaaggagggttgcatctgagcagggcsctgtcagatgaatgggattttagtgatagagcaaaggggaaagagcttcacaagtatagagagtagtatgaacaaaaggatggcgtcaaaatagtaaatgtatgccctgggaatcgtaagtaggctggtgtggttggagtgtgtgatccacgaaacgatggagaggagataaggccaagccctccaaagcatgccagagcttctgggttttttaacagtcatagggaagtctaaggcaaggacaaatgggaggttatatatggcatatattaaatacatatatttaatgtrtgagggcaaggacgaatgggaggttatatatggcatatattaaatacacaacttcagaaagaattaaatattaagtagcaatcggggggccagggggagatgctaagaggagaaagttttttattctaagtcgggtgattggcatataccaaggcgtagagaaagcaatgaggaattctttttgggagagggaatgggaacagtttgctttacttagttaacgtcaactcatgcttataggtgtattttaaaagttttccaatctacagaaaaagtgaaagaatagaacagttaaatacaggtatactctccaacctatattcacagccctctaatttttaatggcataatgcaaatgtaaagaagaaagcagttaataaaaccaaatggaaaacaaacctttggagacaaaaaagggaaaagtttctatttgtggttgtttgagtatacatcatgactgcattcaaaattaaaccagcaaaataatataaaayagatgtggaagttagatcccatagtaataatcccttaaattctgatttgtatattggagttcatctgttttattttattttgttttgttttattttattttattttattttattttattttattttattttattttattttattttgttttctttgagacagggtctcactgtgtcacctaggctggagtgcaatggtgcaattacggttcacctcagccttgacctcccaggcttaggtgatccttccacctcagcctctcaagtagttgggactacaggtgtgtgtcaccatgcccaactaatttttgtattttttgtagaggtggagtttcactatgttgccaaggctggtctcaaactcctaggcttaagtgatccgcccaccttagcctcccaaagtgctgggattataggcatgacccactgtgtccagcctgagtccatctgttttaaatcaatacttcatatttggcaggcagacaacaatgacttagcaaataaataaataaataaaaaggattttgctattggcagtatttgccatgccatgtatttctgcattaacttctagctcatgcaatttgggttttgtcaaaataaaggaccccatcatgaaactgtggagaaacagctaccttctcttaaaggtgatcatacttagacactgttaactagctaaaaacaaatcacagctttcatataaataaatctcttggttgggtgtggtggctcatgcctgtaatcccaacactttgggaggccgatgtgggaggattacgtgagagcgagttctagaccagcctgggcaacatagcgagatcacgtctctactaaaaataaaaaaaaattagccaggtgtggtagcacctgcctttagtccaaggtactcaggagaatgagatgggaggattacttgagcccaggaggtcaaggctgcagtgagctgtgattacgccactgcactctagcctgggtgacagagcaagaccctgtctcaaaaataaataaacagcaataataataataataataataataataatttgtcgtttgacacctttcttctctatgtctcttcttcctccttccagaacagttcagacattttaattagacttggatttcaaagttctaaattccttttgtcatctaaacccaggagtttggtttgtgttccctaatacttgggaaagaagaagcaccagagtaggggtaaagatctaagcactacctgggtcttggtgtcaataaatagtaaatatattcttcaaaaagttttcactgaagcatacagtactaggtcttgtgcctgtatactagacaaacaggtatgtagatgctagaaatcatgtagtgaaatcagccataaccatagttgtaaaataaaagaaaactgctaacctaagatgtgaacaaacttgttaggtttcagtgtttttaaagtgttgggttaatggtaagtatataattcargtgagtttgaggctttagtcagtattttgtagaatcatcagtttagagttattcaaaatattgatgatttacttgaaacaaaagtacattgacttctcttaaagcagtaacaacatgcgtttctttaaaatccatgtcagtgagttctgactagagctttactcccacaatccacgatagcactggattgaacgccatctggtgtgactggatcaccacttcagaagttctttaaatcgacatgttttaaatggaaaacaagggctaatacactgtggtaaaaacacttactacaaattgctgataatgcagtcagtccttgctgttacactactattaatataccatttctaataataaatagcatttggcttttatttggttttcatcactgatcgaagataggtgatccactgcaccccaaaataaatatcagtgttccgcgtttactctcatttcacatttaaggaggcaatggcaaagagaataagccacttagcgaagaggaaacaaagatttggatgatgatcttaaaagattagataatatgtgtatatgcgcataaggcagaaaaatagagataagtaactccctagaagcaaacaacttaatacccctaagtagaaaagcatagacactgaaatagaaattcataagggaagttgtccagatgtgtttctgagagaatggaggtacttttcactggtattgcacagtgatagaactttctgtgatgttggaaataccgtctatctccactgtccagtttggtcaccactaaccacatgcgacttttgacatttgaaatgtggctagtgcaactgaggagctgatgttttaattttgtttttgttttaattaattacatttaattaatttagtttttatttttatttatttatttatttttgagacgaagtctcactcttgtcgcccaggctggagtgcaatggtgtgatctcggctcactgcagcctctgcctcacgggttcaagtgattcccctgcctcagcctcccgagtagctgggattacaggcgcctgccaccacacctggctaatttttttttttgtttttgagacggagactcgctctctcaccaggctgagtgcagtggcacgatttctgctcactgcaacctccgcctcccgggttcaagcaattctcttgcctcagcctcccgagtagctgggattacaggtgcctgccaccaggcctggctgatttttgtatttttagtagagatggggtttcaccatgttggccaggctggtctcgaactcctgacctcaggcaatccacccgcatcggcctcccaaagtgctgggattacaggcacgagccaccgcacctggtctactttttgtattcttagtagagacgggctttcgccatgttgaccaggctagtctcgaactcctgacctcagacgatccacctgcctcggtttcccaaagtgctgggattacatgtgtgagccactgcgcctggccaattaatttccttttaaatagcaacttgtggctagtggctgccaaatcagacagtgcaaatatacagtaaaggtggagtagtatcaaaatcagaatcaatgagtttgaccagataaattttcatgttcctgaaatgttgatctatctccagatagatgtttaggccatataatgagtttgtttatatttttttgtttgttttgtaactgattcctttaattattctagtaaaaagtctagaaaagtacagcttcaaagctgcaatagcacttaaggagcatcagtcaagtcctctcacctcagttcatcttctgatctctcaggcttttaaaactcagatgtttgttttcaccttgtcatgtttcattgcatctttgatcacttctgcagcagttytccagagaaaagattataggtagtaactcataatatccctttagtatcaagaactggtatttactatatactcattggctaacatgtttcattatctggagctttgggactcattgcctccagggtaactacctcagaggcgacatgctaatccttatgtgagtttcccttccttctctccagggtgaccccataaaaaaaaaaaaaaaaaaaaaaaaaaaaaaaaagaaagaaagaaaaagacactgtccttttaccccagcctttgtgtctcaggaagcagatatccagaactgtatggtggctttcttcatattggtgagcttgtagcagttaggatagaaatgacatgtacctcattgatttgcaactagtacaaagtttaaattaattgacagcaagcaaagaactagaaaaactaaaagaattaagtatactcacattctgtatctgtatacctaccccatttgttgttgaaaaccctgtgcctgaattagtctgcagttattactatgaacttacccatttacaagtgacaccaatatgagaactcttgaaaactagagattgcctttctctgtagtaaggagtatgctgtatgtacacaaaagaaatgttgttctacagagaaacttgattatgagaattattgttttgttttcttccaaggttaagcagcatattgtttagtgggatttagtttattatttagtttagatttagtgtcctaatatctgttttccctgtctcctagaagactgtaactacagcttctatgattaccacaaagacactacctctcgtcttgaaagcagcaactgcgaccatgcctgcctctgtggtgggccagagacctaccattgctatggtgaccgccatcaacagtcagaaggctgtgctcagcactgatgtgcagaacacaccagtcaacctccagacgtctagtaaggtcactgggcctggggcagaggctgtccaaattgtggcaaaaaacacagtcactctggtaagccagcagctgctcctcatgtgtgatcacatgagaaggttaggatacgcatttgtatagtatatcccttctaggctcctgctggatttctcagtttccatcattcttctagcataccaaattcccctttggggctgacaagggaatatggcatttctgctatctgctcaaatcactacagaagcgtcctgacaccaaggactaaattcagtgcattatctgaggtcaaagtatgacttgattttagggggaaggtctccttcacagaggcatacacactgtttcatttatgtctccctctcccttcactctctctacagtgttttcctgtgaaacttgagtgcttaaactctcttgtgctgtattactgccttggtgaaaactccctgataattcttttagttttaatatctctttaaattgattgtacccagaaagaactggagttagttgaggcactttaaaaatattcaagaaactcacaaattaaccgtgtcagtgcccaagttttgttcaggaaaaaaaaaaaaatccctttaaggaggaagtacttgaacaagaattttcatgagagttctaggatcaagccatttagaaaactgatattctcagaagcttgggagaaatatatctaaattttgatgtaaaattcccttaaaatggcacctaagagctcttggtggcttttgaataataccagtggtgagtgaaactagagagcaataaagtgaaggttcaccgcttatccaggaatccttagagaagcaacgaggtcactcaaccagatactgagagttagaaaattttctataggaataaagccattcactgttagcttatatcaggaaaaagcctatttggctaagcagcaagtttgattttactttggatccagtcttgacttttaaaatatgttaatgcaaaagttcttgagtgtcaaagaaaattgtctaagatttactgagcctgctatgttctccattaggtgtaggaggaaacagaagtgtggttggttcattttatagggtaaagcacacaggtgggagagttaaaaagtttcctaatgcagtgttaattcagatgattaacttacgatgaaagcttgtagaaaatattgtctgatccaaagaatagtgatgctaaaaatactagctttgatattgaagagtaattgttctctctggtttatttatcttcctcattttttagcaggttcaggcaacacctcctcagcccatcaaagtaccacagtttatcccccctcctagactcactccacgtccaaactttcttccacaggtgagtaaaccaatgacaagctcaatgataggttagatgggacagaaatcctcatgggctctttctaagtagcctgtaatggggcttgtcagcccagctgtctatcccgcttagctaaacattctgactgttgatttctgtactatgaagaagtttattttgtcatcatggtttattagcaatgaccaaaggcagtagcagggggaagtaaaggaaagggaacattttctaaatttaaaataattaaaaccattataaaccttaaacttactagaagaatttagccaaagtctgcctggcagtggggaaagaatgcaattaacacttcttatttctttcctacatgccaaaaagagtagggaaggaaacaacagctaaaccaactagtagaaactattcttcagttctgccctggaaagtgatggttttgagaatcatgcttaaaggcaaagccttgcttctaaaggcttaggctaggggtctgtacagaggactttctccctaggccygagcagctctgcatgaccatactctcctgagagtgttcttccagcaattaggctaactttcaccattcccagtgcaaaatgtcaagatttccccattctggaccttgaggagtgttgacttccttggtaggaaggctgagagttcctatctgaggccctagttttcagacaaagggagaagaagaaggagttttgtggtcagtagtgtaaatgatttccaaatagcctctggggagaaggatgggcagtgctaatatgagataagatgatatcatttgtttatcagataaatccctagtaaatacctcagagggtagtctgagagcacatgggagggatacctgcctattttttttttttttttttttttttgcaatggagtttcgctcccatcgcacaggctggagtgcagtggcacgatctaggctcactgcaatctccacccaccaggttcaagcgattctccttcctcagccttccaagtagttggggattacatgcatgtgccaccacgcccggctaatttttgtatttttagtagagacggggttttgtcatgttggtcaggaatgtctcaaactcctgacctcagggtgatccacctgcctcggcctcccaaagtgctgggtttacaggcctgagccaccgcgcccggcctgcctgcctatttttaagagtattagagaaggtttcttcaagctttctttgatgagttgacattcagtctgacctaaaatcctagctgagttagcctgataaaactttgaaagaagaataaaaatgtcccaggcagaggacagaacatgtatgtagttccagggtggagaaatgtgttaagtttaaagaaccaaaggaggtttgctgtggctgagcacagagggccatgtggctcatgcaggctagagttagttagagytgaggttggagaagtccactagggccagagctggtggaaccttgtaggctatgcaagaacctgggccttatcctaggagcagcaggcattcattaaagcattttcaagcaagcacttgatgtggtcagatttatgttttagaaaattccttcttgcctctgtgcagagaataaattggggatggtcaagactgtgggcaggaagaacagttaagacattgtcaataatggtaataaccaatgttgagagaatcttgctacatactaggtactatgctaggcactttacatggagtatccattttaattgttacaacaaccctatgcaaataggtattactctttttagggtaaggaatctaaggtttagtccatgtttttcaaacagtggatcatgacccacttgttgtgaaagcagtttagtggattgtaaccagagtgtttaaataaaatgaatagaatagaatatgaactattaagagtacatagcacatactgtgttctctatttcagaaagtttttgttttagagatacatgtctataggcacatgctgattacagagtaaaatatatttcttactgttaagtcagtagcacccaccacagggtcgttttaagttcagtcagacattcataccgacaagactttcatgggccacacttggcaccagtctacttggaatgatacaggacagaaaccacagcttgtgagcaagatagcatcagacatttgtcttcaatgagtccatacagcagtccctacagctgtccaaggatagctcaggtgtaaggaaataagctccttatctaagacagtgggaaagccaccttggcatagaagccttatgcccacaggagccaatgtatcttataaaaactacataggcatggcttcaaggtccccacaatggatgtgcccaagttatgagagtcaccccacttagggaagcccaaatcatggggtcccctcaagcccatccagatttgatttagcaataagggattttttttttttttttaagacagggtctcactctatcacccaggctggagtgcagtggcactatctcagctcactgcaacctccacgtcccaggttcaagcaatccttatgtctcagcctctcaagtagctgggattacaagtgtgtgccaccatgcctggctaatgttcgtatttttagtagagatgggtttcactgtgttggccaggccggtctcaaactcctggcctcaagtgatccaccagcctcagcctcccgaattgttgggattacaggtgtgagccactgtgcccggccaggaaagggtcatttttatcataagcagtgttgcctggtaatatagttgacattcttatttccaggagagcagagctaaagagttaattgaaggtcaagcttcatgcataaggggaaagcgttttgcccacagggtcacagttttaaaagtttgaaaaatactggcttatggctgggtgcagtggctcacatctgtaatcccagcactctgggaggccaaggcgggtggatcccgaggtcagaagattgataccatcctggccaacatggtgaaaccctgtccgtactaaaaatacaaaattagctgggcgtgctggcatgtgcctgtagccccagctactcaggaggctggggcaggagaatcacttgaacctgggaggcggaggctgctgtgagccgagatcgcgccactgcactccagcctggcaacagagcgagactccatctcaaacaacaaaaacaacaacaacaaacaaaaaaacaaaaactggctattaaaaatcaggtatgttacctcaggttacacagctagtgagtggtagaactaggatttgaacccaagcaaggctgacctcatgtttttaactgtaactttttttcactgtttttagtgagccaaacataagctaggatagtagatagtggagtgaggatagaagtagacagatattagaagtatttagagagtagagggtggggtaggaatcatcaagagtgattccaaaatttgtcaagaaaagggyacttactgaggcaattatcggaggaagagaagattggaagaagaaattgatgagtcttagacatgttgattttgaacttttgagatattcaagtattgtataattctgaagttcaggaagtgtctcaggttctgaggtaaaagtgtgaaagtcttcagtacatagatggtaattgaagccatgagatgggcaaaagctcctaggaataatgagaacattgggaagaaaaggggtgccagggaaaaaaatcctaagaaatactyacatttaggatgaggcagaggaagagtaagcccacaaaggagactgagaggaggagtggccaagaacagggagttagagggccagaaatgggggtgcactgaagctgtggatatgaagaaatttcaaatgcgagttaaggctattggcaacattatgactatactgtgcacaagttctgggtgggaccagtctctggattaggcctttgacctcagctagaagaggtggcatggtatagaagagggagctcagggtttagaatcaaaagctatgttctagggtgaggtttggacctcaagagctgatgagtcttgtataagattatatgccctgaggtctatagaattaatgtaccaaaatgaacattaataagtgtattaaacaccatttcatacatagagtgtggaagatttgcttttataggacttgagcagcttaagtaatacaataattattctctctttcccctataggttcgacccaagcctgtggcccagaataacattcctattgccccagcaccacctcccatgctcgcagctcctcagcttatccagaggcccgtcatgctgaccaagttcacccccacaacccttcccacatcccagaattccatccaccccgtccgtgtcgtcaatgggcagactgcaacyatagccaaaacgttccccatggcccagctcaccagcattgtgatagctactccagggaccagactcgctggacctcaaactgtacagcttagcaagccaagtcttgaaaaacaggtacaggcagagtatgtacctgctctgggcagtagccttgtcgttgaggcatatggctgctgggctttctctaaatacattttctcaagggctcttcatctcaccaccattgtcagtaagctgtcgcttatgtgcgataattcatccacgtgcagaagggtcattcttactgaagaaagttggtttgcttttcccaccatcccctcgtagatgggctgggattcctgtgtgagtgagctccccctggtggttctgatgtggaaattcacagacaggctctgctgccctccgtcagtaagcacagatgaggtagtaaacagaaaacgccatgttagtttcggcccaataagaatccagatgaaggtaggactgtgaaagtcaggaagaataaacaaaacagggaaagggatttcatttcaaagacttttctttgattgttacagataatggggagccaaacaaaaaaaattaaaatttccaaaaagcattctttaactttagaggatgcagatattttagctcaaatattgaaacatttcatttatatttcctgaagtcagattttatcttaaaaaacgaggctagagacatacaagtaacctgcaaaaatacttgaaggttctgtagcagaaagacctctgaaaacaagaaggatttataggcagtcaccgtatcctatttgaaaaacgactagtgatgagaaagaagaatttggcaaagaaaagcattctctctcaagaaagttgctttaaaaagtcatcgacctatttctaattgttcagtcttgacttctcatttatctgaaaatagtctgtggtgatcctgaatcttctgcttctggatggaccatgattcagagaggctgttcagatgctgcctgctgccttagtcttcttgagcagaggaacctatgcatagggtactagaccttaaacccaggcagctcacaaatgcggcagaccttgcattcaagaagctagttatcaaaatctgtgcttaggaaacacaagaacacatctcaattcctggggaacctattcaaaccccaggaagtgctttgagaaacattcagaaataaattattattattattattattattattattattattattattattattattttgagatggagtttcactcttgttgcccaggctggagtgcaatggcacgatctcagctcactgcaacctccgcctcccaggttcaagtgattctccttgcctcagcctcctgagtagctgggattacaggcgtcagccaccatgcctggctaattttgtatttttagtagagacggggtttctccatgttggtcagctgatctcaaactcccaacctcaagtgacctgcctgcctcagcctcccaaagtggtgggattacaggcatgagccaccacgcccagcccagaaataaattatttacacatattttaacacagaaaatttcaaacttattgacagcagaactttggtattaaactactgagagtcagatgctcaagcttaggagtttgggtggggacctgttgttttgcactggctctcaaagaacctctgaggagcctcagtgttccacagaacctcgtttcacaacactattttaggttattaaatattatttctctttacctctttttttgataaagatatttttaggagacaaattgttttggtttcattttatttttacatttcttttctgattacaaagatagtacaagttcatttttaaaacagattcaaacattacaaaaatataaattgtagaaggtgcttttccccgtaatctaaagagagagtaaacttttatcataattttacccccaggagttaattactattaacagtttagattatattcttacagatttttttttcttttcttttttttttttttttttgacacagagttttactcttgtcacccaggctggagtgcaatggtgggatctcagctcactgcaacctccacctcccggattcaaacaattctcctgcctcagcctcccaagtagctgagattacaggtgcccgccatctcacccggctaatttttgtatttttagtagagacggagtttcaccatgttggccaggctggtctcagactcctgacctcaggcgacccacctgccttggcctcccaaagtggtgggattacaggtgtgagccaccacacccggcccccagatattttctatgtacgtgtaaaacatttttaaagcaaaaaccaaaatcaaacttatgtattttgtaatttggttttttccctactttaatagatcttaagcatcttttcctgtcgtggccttcacgttgatagagctttttattttaattataatattataaaaagatatccttgaaatcttaagaattaaaataatttcttttgtagcagtaaatttcatgttctctcttctcttttttgagacagagtctcgctctgtcgcccaggctggagtgcagtggcgcgatcccggctcactgcaagctccgcctcccgggttcatgccattctcctgcctcaacctcccaagtagctgggactacatgcgcctgccaccatgcccggctaattttttgtatttttagtagagatggggtttcaccatgttggccaggctggtctcagactcctgacctcaggcgacccacctgccttggcctcccaaagtgctgggattacaggcatgagccaccacgcctggccaatgttctctcttctttttggtctaataaaggaattcagtcattgttattttagtttgctgggcagcctggcataatagtcttagaggttaccgagcccgatcagcagagactctctttagactagattgcattctcaggattctcttacttcgtatctttcaactatccttgttttctatttatatttcakttccagtatcacatttatagccagtaagagatctcatagatcatagagctaaaggtaaaacaatgtaatgtatgtagccatggaagaacctgttcacacctgttcacagagttaccaaacccgtatccaacgttctctctatgaccaggctaaataggttcccttttgctttctgctattccctttagatgataacatcattcatttaataaaaatgtgttaagtaccagttgctatgctgcatgtgatgtctatatataaggtggataaactaaagcccgtaccctcacggaactcagtttctagtgtgtttggagcaggcactgaggctgtgtctccagggaaggaagcatggcctcccacattggcataggaatgggagaaggcaatgccagttataacagcagtggtctcacgtgtccttcccctgtcagacataaccaacttccttatctaccccagataagagatcttatcccttattagaaaccacgttacactgtggctctgagaaaacaagtgatagggtttaaaaatctttgaagctgaagactcgttttagacagaaaagtagatgaagccagaagacttacgatatagccttcacatcacctcccctgtccttgtcctctccagcgctctaaaatggggctaacacctgttggtgatgaaatgaagtcaggtatttaatgtttattagattatgcttgatggagttctcaggaattatgtttcttctccaccccactgccaccctgcaacaaagacttctatgtatgtcgtcaattcagagctactgaaaaaaatcccaaggttctgtggggaaaaaaattgccacgttaccataaatatttttcataggaatctgcacagtatcttctaaagagaagtacttacaagataataatattatccaatgyattatcttcaaatttctgttttccctgttagtcaaccagagctgatgcctccccttaccccattttaatactggtgcaatagtagagaaamtagttccaagtgaccaaaccatggattttgctttgccttcaatcccaatctatttaaccttgactaacgaaattatttggacatttatttgcacctgcctacctttgatttttcatgcagacaagtatataaagtatacttgattaacttcattctaggtttgtgcagagtttttggattcttttattataccaaaaagaacaggagttgcaaattccagcaaccgtgggttcgaagaggagatgtaagtgagtgaaacaggctaggagtaaacaactggactttttatttatttttccactttcagtgggaacatgagtataasagatatcccgcttttattcttaattcccctttaaaataataagtaagacaagcatgataataattgacaatagaaaatggaagaaactgtggcaaactgcacagtaatatgcttcatctcaaggaagcagctgcttcttggcaataacaaacttttatcacatggagacttcttcaagaaaagcctgaaatccagatgtttttaaaagttgccaagttgttaaaatactggtaactgtttaaacaccatatatgcagaaaataacatctgcaagacaattycgagtctgcatcatggtttataatctcagagaccaaactttagattcatcgaagggatatccatgaattcttttttgttttctaaatccaatttttttttaattgaggtgaaatcacataaaattaatcattttaaaataacagttcagtggcatttagtatattcacagtattgtgcaaccatcacttctgttaagttacacaacattttcattaccccaaaataaaacccagtatccattaagcaattatttaacttttgccctctgccgctggcaatcaccagtctgctttctgtctccatagatgtacctgttctggatatttcatatacatagaatcatacaatatgtgatctcttatggctgctttcacttagcatgtttttgagagtcatcaatatggtaatacatatcagtgcccccttctattttaaatggctgaataatattccatgacatgtatataccacaatgtgtttattcattcatctcttggtagacctaggaaatcataagacattggttggttccactttttggctattgtgcatagttctgctgtgaacattcatgtgcaagcatttgtatgactacttgttttcagttctttagggtatatacctaggagtagaaattgctgggtcatacagtaattctgctcaactatttgaagaactgccaaactgttttccacagcagctaaatcattttccattcccaaaggcagtacatgagcattccattgtctccgcatccttaccacacctattactttcctttttgttttatttatagccatttcagtgggtgcaaagtagtgttgatgtgcatttccctaatgactaatgatgctgagcatcttttcatgtgcttgttggccatttgtacatccatggaaaaaggtctattcaaatcctttgccaatttttaaattgggttatttttctgttgttgagttgtaagagttctttatataatctggatactagacccttaccagttacatgatttgcaaatattttctcctgttccgtagtttgcctttttgctttcttgatacagtcctttgatacacagctgatttttgtcttgatcttgtaccctacaactttgctgaatttgtttattagctctagtatttgttttatggattctttgagtttttttctctgtaagatcatgtcatctgcaaatagagatttacatcttcctttccaatttgggtgccttttctttttcttgcctaattgctctggcctaaacttccagtacaatatcaaatagcaatggtgaaagcaaacattcttgtcttgttgttgatctcaagtggaaagctttcaccattgagtatgatgttagctgtgttttcataaatgttttttataaagtcaaggaaattcccttttattccaagctttctgagtgtttttatgaatagataactggaatttttaaaataaaaactgtatatgtataaggtatacaacatgatggtttgatatacatatacatagtgaaatgattactataatcaagctaattaatatatctatctcctcacatagttaaccttttttgtgtgtgtagtggggtgctagattttgacaaatgctttttctacaccagttgagataccatgttttttttcccccttggttctgttaatgtggtatattatattgattttcttacattgaaccacccttccactcttgggataaatctggctttgtcatagtgtaccatccttttaatatgctcttggattcagtttgctggtattttgttgaggaatttttgttgttgttgagggtttttcatttatattcataagggatattggtctgtaattttctgttcttttggtttttgtttttttggaggcagggtcttgctgtgttacccagactggagtgtagtggtacaattgcagctcactgcagcctcaacctcccaggctcaagtgatcctcccatttcagcctcccaagtaactaggactataggcatgcaccaccatccctggctaattttgttaaattttatgtagagatggggtctcactttcttgcccaggctggtctcgaactcgtggactcaagtgatcccccgaccttggcttcccaaagtgttgggattataggcatgaacaccaagcctggtctataatttaatttttttcgttattttttggagacagggcagaatcttgctctgtcacccaggctggagtacagtggcatgatttcggctcaagtgatcctcccgcctcagcttcccaagtagctgggactacagttgcgcaccmccatgcctggctaatatatatgtgtgtgtgtgtgtgtgtgtgtgtgtrtrtatatatatatatatatatatatatatatattttttttttttttttttttttttttttgagaccaggttttgtcatgttgctcaggctggtcttgaacccctgagctcaagctatctgcctgccttggcctctcaaagtgagccaccacgcccagcccattttctattctttggtgtctttggctttggtatcagagtagtgctggcctcatagaatgatttaagagtgtattttctggaatttgagacagattggtgctaattctttaaatgtttggtagaattcactaataaaaccatctgatcctgtactttttcttttcggggagaattttgattactgtttcagtcactagttgttacaggtctgttgagattttctttatcttgagtcaattttggtaatgtgtgtgtttttaggagttttccattgcatctatgttgtctagtttgttggcgtacagtttttcaatatattctcctataatccttttgaattctgtgagatgtaatgtcctcagtttcatttttggttttagttatttgtatcttcttattttcttagtctaagccagaggtttgtcgattttgttattcttttcgaagattcaccttttggttttgttgagtctgttgttcttctctatttcatttatcttcatcctagactttattttcttttttcttttttttttttttttttgctttgaatttagttctttttctgtttcttaaggtgtaaagttaggttattgatttgagctctttcttcttttttaatatagactgttagcagctataagtttccctctgagtactgctttcacagcatcgcataagttttggtatgttgtggccttgttttcatttctctcaaagtattttctaatttccctagtgatttcttcttttacccattgcttgtttaagaatgtgttgtttaatttccatacacttgtgagttttctagtttttctgctgtcattaatttctagtttttttccattgtggctggtgaagagattttatgtgattctagtctttctaaatttattaatatttgttttgtggcctaacatataatctgtcctggagaatgtttcatgtacacttgataaaaatatgcatgctgctcttgtggagtggagtattctttctatgcctgacaggtctaattggtgtatagtgttgttcaagttccctatgtcctttttaatctctgcacaagtttatccattacttaaagagggatattgaagtctccatttattattgtagaactgtttatttctgtcctcaatcctttcaatagtttcttcatatattttggggctctgttgtctggtacatatatgattataactgttatatcatctttttgaatcgacccttttgtcagtatattatataatgaggttctttgtctctcgtaacagttgttgactttaagtcacttttgtctaatagtactatagccattcattataaacatcctttcactttcaacctttttgtgtctttttctctaaaatgagtctctcttacagcatatcattagatcatgtgttttgttcattctgccagtcggtcttttaattggtgagtttaatccagttacatttaagtgattactggtaaggagggacttacgccattttgctatttgttttctgtatatcttacgttttttgttcttcatttcctgtaatactgccttttttgtttgatttttttcttagtgtgtcattttcatgctttcctcatttctgtttctgtatataattattttcttagtggttaccttggggattacagtaaacattcatacgtttttaacaatctagtttgaattaaccccagcttagatttttaaaaccctgcttgtatggtttcagttgaagccccaatctcagcgtcatgcaatatatccatgtaacaaacctgcactgtaccctcaaatctaaaataaaaataaataaataaataataaaagctttgccagtgacaatgaaggaaaaagaagctctgctcctatacagctctgcccctcctttatgttgttactgtcacaaattatatcttatacattgtgtgcccactaatatagatatataattactttgtgcatttaagtcatataggaaacaaaaagagaagttaaaaataaataataacactggcttttatatttattcatctagttagctttattggagttcttgtttctttatatggcattgagttactgtctagtgtcctttcatttcagcctgaagggactccctttaacatatcttttagaactggtatactagcagtgaatgtcctctggttttgtttatctgggaatgtcttaatttctccatttttgaagaatagttttgcagsatatagaattcttggttgataggggtktttttgctcagcactttaaatatattaacccatttccttctggtctgcaacttagttctggctgatagtccttcacaagtttacagtcaaactagttggctagagctgcagtaattttaaggctgtgctacagcttaataatccacatctgagctcatcacatggttgttggcagacctcacttcttcactggctgttggctggaggttccgttcctcacacctgggcctctccatagtgctgctcacaaygtggcagctggcttcccccagagcaagagatccacgaaggaaagacaccctccaccaccaccaatgttttgattgttttatttgtatttttgtttttggatccttttggtattatttatataacactgagataattgtactttttcttgcatgagagagagaaatttgaaccatgggtaattttttagtggaaaggaattgatttgcccttccttaaaagcactgctgctaattgctttactcagccttagaaatggaagtaagagactccaagagacttcacacagccttggaatggaacagcacacccttatagttgaccttcttttctccctcctccatcatacttctctccttcctattcaaagagacatgaaaataagatttctgggcatccaggactttaaaatgtcactgtaaactactttcccactggtgttttgttttatggaggaaatgtgtcctttttgattaaaaagtgtgtgtgtgtgtgtgtgtgtgktggagagagaaagacttgagtgattctcgcttagatcatactcttcacccagaagcccaatcaactctttactatacacccgctctgcatgaagtaccataataggcacaaagggatgcaaaaacaagaggtgcataaaacaattcccactcttacatagcgtttagtataaagggggaaatacgagagaacaccastgggggaaaattacaaagccgcatttgtgccccagagcactggttgccacagtattgataaggcagatgcttacgctttctttatgtaatcatataaaagcagaaggaaaatatggaagtggccaggaaagaaaatcaaagatctatgtgcttgtgtttttcagatctagtaaaatatttccagcataatgatttttgagagctttagatgtcttgtttgtaggaccaaagtctcatgtagcccctgcccatcaataatcagttttattctcacttatttaattattgttgccatatgaaaggagcattacttccacattttttctaattttgaaaaagtaaattaggtttgtgtttatagtttgatattttctgttktaaaattatttcagtatttacggagagcttcataaaatgagttagacattggtcatggtaagaataggaatgcaagcccagtctaccagtatgctagctaccttttgtgtttgaagatggtaatcaactggtgtttcttctgcttgagaagaggcttctggaagaagaggcttggaaaaattaggaagtcagcctcttgcaagatggcccactcttagcaattgcatctctcctctgatggattatatagacagatttttaatattccatgtaagggtggttctgcagtctctctgagattatgactggaattgttccgaaataggagactgtgtatgtgagatgtttttaacatcattctgatcttaagcaggttgtgagctggagcttgacctataatataaaaacagtgggctgggcatggtggctcacgcctgtaatcccagcactttgggaggctgaggtgggtggatcacctgaggtcrggagttcaagaccagcctgaccaacatggtgaaaccccgtctctactactaatacaaaaattagctgggtgtggtagcgggtgcctgtaatcccaggtactagggaggctgaggcaggagaattgcttgaacccaggaggcagaggttgcagtgaactgagatcatgccattgcactscagcctgggcaacgagagcaaaactccatctcaaaacaacaacaacaacaaaaaatagcaggcttgcttctgggcaactatccccacattctaaaatacgtggaaatcagaaaggacaacctgtaccgtatttctatacttaggaattaaaccatacttttcttttcatataccttatttagactcgtatttatagattcatatttactctagccatgcaatttaataacttcaactggggctttacattttagtttcccctcccccaatgaaatctataatactaacctttttattaatatgttccacatttgaatatgttgtcttctttcttcttgactactactattaaacttctgattgcttcatccttttaataaaaaacgaattctgaatttttatttaatttttctctcctagacagttaaatctcacacagaaacagatgagaaacaaacagagagccrcaccatcaccccacctgctgcacccaaaccaaaacgggaggagaaccctcaggtaggcctatgtttccaaaggcaggtctcagtctatggtgtatggtttattctcatgtaccaggaggggcacctgctctctgaatgatgaaatgaactcgatgttcattttcttatgcacttttattattcagcaatgttattgccaagtcagattggtctagagtggaattcttagactgtagtcttgagggtccatgcactagtacataggcattttgattgtatcaaaggaaaagttttttaaaatgttattcttcatatgcatgttacaaatttgaaatgttaagatgagcgatgattttcccagctgtcccattacattcctaatcattactgtgttctgtttgtctcagccaacatttataagatatctagttcactcagctaatgtgtatttatattatcaattgcagttgttaagtgtgcgtttttsttacaaccattgtattacattagaaccccaaaccccaaatgaatcagtagctcagaagtaatccattgaagcataaaagtagggatgaaaatagtaacatctatactataatttaggatagaattataaacataaatagcaaagaagaccctgataaaaatgtagaatgtgaatctgtatgtccttagacaagcaaattttttcagtttgatgtttttgcataagcagctataaatggaaaatgtagacaggtaatatgatgatgaatatctgacagatttcatttggccagtaattctcttgcccctatccttagtgctttcttcataatgaaaccatgtgaaatagtggcataaagccatcaaagcttcatgccatttttttaaagcagtgatttattgagccagttcaggtttcctaaaacaagtacgaaatgtaattctttctgatatgaaatgaatgaatttttaattttatcttgaaaaagaggaccaaaacttaagccaaaaagaagtactagtcacaaaaattgctgaggaacttgtgaaatcatccacagaattaatgacaagtattatgctctgagaaggaaaaattgagcaaaatttccctatcaaaggaaactgaaggatccagcctgggcaaacatagtgagaccttgtttctgcaaaaaataaacaaaattagccaggtgtggcagcacatgtctgtagtcccagctacccaggaggctgaggtgggaggatcacttgagcccgggaggtctaggctgcagcgagctgagatggtgccactgcactccagcctaggtgatggagctagacccagtgtgggcaagcaagtaccatcatgtgtagtagcatatagttcaccttctagttggacagaatcactgccataaacaaagtaaattgctcttggcatatgtgggatacatatatgaggtaaaagtttttgacagctttttattctatcatcaaaaatttaggctgggcgcggtggctcacgcctgtaatcccaccactttgggaggctgaggcgggcggaccacctgaggtcaggagtttgagaccagcccggccaatggtgaaactctgtctctactaaaaatacaaaaattagctggatgcagtggcgcgtgcctatagtcccaggtactcgggaggctgaggctggagaatmgcttgaacccaggaggcagaggttgcagtgagccgagattgtgccactgtattgcagcctgggtgacagagtgagactccgyctcaaaaaaaaaaaaaaaaaatttattccacaagagaggacattttttttcacttaattattttatgagcttgatctaaactggcaaagatgatttgggtgtgagtggccaataagggtgctgttacttgcttaaaagagggtgcatctgaatatcagtccacacactgcttcatcaaaagaacaacagttaggggaaagcctcttgatcttgattatatttctaaggaatagtgaaaattaggaatgtagttagttggcaaccacaaagtgtatgtcatttcaacatacagtttagaaagcaggaaagtccaagactgctttttcttaccagactaatctggctgtcaaggggataggtgcccatctcagtttttgaaataagaaataatataaaaacatttcttcaggactctgaagttaccagtaaatgacatttctatgttctcaagtggcttgctgaagaagtttattttcaaataggctgaacctatcacttcaggccaaagtagsataatatcgaggataagatgtcaggacttttaaagatcaaattgtggtataaataactctacaggagtatgtcttttacaattgaagatgttctttattcatcagagaaataaattgataatgtattatttggcatatttagaaactgcatgcagtagtacaacagaaaatgaagacacacttttcagaccacatgcaagcaaagaaaagaatagaaatcaatttgtttccctctctggcttgaagagtcttaacgttccatcttcagggcccagtattttgaccagcttagtttctgatggagccctaagagtggtcttcagagagaaattgctccataatttttaggttcatgtgtgattgaaaaatcatagtattcagcagaaacacctgctgtcattcctgaaaatcatttagctgtgagttagcattgtggcagtataaatgtgagaaactgacctagtcgtgacaagtgaaacactcaggatttggagcttgttaaatgggaggctctttaaaactctctgcatgttttgtgagtatgaaatcctcttctttttaagaggatttttctgtggggcgggtcactcggatcacacaagatactgatttctgtcattgagaaagaagatgtagaccccagtccttctcttttggccctgttagaccagagagcctctagagcaaactttctaacctgtggcccaggatggctttgaatgcggccccacacaaattcgtaaacttccttaaaacatcatgagttttttttgcgattttttttttttgaagctcatcagctatcattagtgttagtgtattttatgtgtggctcgagacaattcttcttcttccaatgtggcccacattgaaggaagccaagagcttggacacccctgctgtagaggatctccatggctgcttagagaatgcctgctcttgtgcattcatgagacccgcccattgggctggctttccctaatgtcctactaggaactggcaattggctttgtgagaacccagactgaagcatattcttcttttgtttctctggcacagaaacttgccttcatggtgtctctagggttggtaacacatgaccatctagaaggtaagagaagatattcttggcactgcctttttttctggcycacagctttgttcctgaaaatgatgtttgattgaattcctggaatagaaaattggaacacaaatagagtatgattcagccaatgtggactttatttcctttagtgggaaaattgccttccctctgtctaatgttcctatcattatccacactactgtcctgggaaaacctccccagttgcctaaattcaggtgacttctgttcatttaggggagctcttctttttctgaacagcacagcgaagtgctcttctgataagcctttatattttctggtcactccaggttatcagaatgttgacaacagttacaaagctatacctgtcctgattatttaattcaagaatgatgaactttggttactcagtttaagtcttatggataaagctcatccagacctatatatacagcagtctaaaaatcaggacaacttgtttacaagtgttgtctattgttaaactctcaacagagaaccacgtgtaggacagcgtggtcttgcaggtgagagtagatggtcctacatatttgcttccagtagtgtgcttgcctctgctgaggcttcagtgaaacagagacttgtccctgattctgatttcttatgggaaaaccaatagataaaacaatgaagttaagttttttaggttctccatgcctctctgctaatgaaaaccttttcttctctcaagaaatccaaagcaagaggcaagagcgaaaaagaagaacaacagcaaatccggtctacagtggagcagtctttgagccagaggtattactggccagcatctggcccttccctcatgttccagttttatttatgagctgttcagtgcctcccctctgaaaacctgctgaagagcagcaccctgattgtacttggccagttctgtgaagtggtagattttttttgacttatcatttttattagtcactgcttaccccttaggtttttttcctaagtttcagcagatacatgcctaccttaaaattttaattcaccctgacttcaatacagctgtcatcggcaacagaggcaggcttctctgagagagtctctgagagccaagtacatacaataaaacccttgagcattgagaccttaggatgattagcactaactagtcggcatgttgacagtcatgccatgcttggtctttagcttgtgccagtattagtaataaccacactactcaacagtcacctttcctccttcaaccctcaaagcgtaagaagagtgcagtgacatacctaaacagcacaatgcaccctgggacccggaagagaggtgaggacctttttgtatctctcccttgctgctgttgcttttgctttgtgtgtgtgtttcttctccttccctcctcccatcattataggacctaactcctctatcctttgaaaatagttttgttgttgttctctgagaatgggagagaaaagagaatgagatttcttattagagttctgtatgctgaatcaaaagctgactttactaggattctggcaaagctgactcaggggaatggcttaatgtagcatttctgccccaagcctgccaggccatccatgaatagcacagtgaacagaaccccatgtaaaaggaagcatttgagagtcattaagcagaacagagcactgccrttgccaaggtgttcctaatagcgtcttggttgtcctgctgccggcaaggccagagtgtgacgctgagtttcttggagctgcagactttccaggaaggaaagaggtagccacacttgagaacttagaatctttgagaagagggcatctccaactaaggaagaaaaggtcactctcaaaacaggctccctaaagaacagattcctaaagagctccaatcccatatttcagaccttcccatggacattccagaatcttactcttaggcagagcagaaaaaatagcagtagcagcagcagtgtctctcaccatgcaagtctaaataggtcttaacagctcagggtttgagctcataaacaaggtactgaaatttttctttgatgtcagtaatacatcccaagatccttttctccacatggtaatgtgtccctgaattatagttgcaggctagaaaggttgcagagtgagcggagtagcatactaatttttgcatgtgcacacacagtctcagagctactggaagctcaggaggtcatcctgaccctttgtctgccttaggcaggactacactattaccattccctctccacaaaagagatatacccacccttagtaacccattctaatgtttcatcagtcctgtccttcaagtactcaaaaatatttagatgggaaaccctaagtcatggctttatattgattcctgggccacagtaaccagtactctaagttatttttgttttgttttgttttgttttgtgcttggtgatttttttagtgacccctgatgcagttctcggaaaggagccccccagccagaagccacaataattggcctgatagtgggcagtatctgctaagaggacaggggttaaatgagccagaaagaccttggcatctcttgctaaggtcagaggataaaagcttgcatccacagtgcctaggatatgccttttgtgggtaaacaagagagcattcatcttgttcttccccttccagcagcactgaactccctagaaaagataaaccagtacgatctgtctttgtactataggcatcaccaatttaatacagagaggtaatatttttgtaacatctgacagaatcatgactcttgtgcataatcctaatataaatgataactgttggcaaagtcatgatcctacataccatttaccagtgcttataggcagttttgtatctctctggcccttttttttcctttggtgtgttgggcatatacttttgatcactcatagcttagaagcaatgaccttgcccctagaagacaagggccctgacttagatatgtggtaaggcaagagtggctgacctagactttctgtacccacagggctcattcaagttcctttgtagccttgaagtttgagtcaaaatgctcttacacaaatcaggtctctcagttaggagtgctgatgggagggcctttcctgagacttttaaacagccccaatttttagagatgtagtttatcaggatgtttgtcatgtaaagtgggggagacagctgccagtcaactggggagggtatccagggacagaaatacttaaacattaattgctaagcccagagcatcttttaagctcttaggtttcagctactcccagaacatgcctctcaatagctctaaaagcaagggataagaatagttaacttgaattttgcctccttgctttgccggtctccaccctcataaaatgcagacagaatagagaaggaaaagcagaaatcctaaataaatcagtttgtgggaactgagaatcattaaagtattgtgagaatgctgattgcagagaaaccttagagaacagtatgcaagatatgaaaaaataataaattcggccaggtgcggtggctcacacctgtaatcccagcactttgggaggccaagatgggcggatcatgaggtcaggagatcgagaccatcctggctaacacgatgaaaccccgtccctgctaaaaatacaaaaaattagctgggcacacgcctgttgtcccagctacgtgggaggctgaggcaggagaatggcttgaacccgggaggcggaggttgcagtgagccgagatcgtgccacagcactccagcctgggtgacagagcgagattccgtctcaaaaaataaataaataaaataaactcattcctggccctggctcccactgggctttgacatcttggttcttgcactagaaatctcaaattgcaatagtccaggaacttcaccacaatctgcccaaggtgaggtctttctacataagccagcaccttctgtcattctccagagctctcttatcctcccttctcttgagagtcatatagttgtttctaatgacatttaaatctttgcttctcttccttcctttgggactgttgaattaaccttctgtctgctacctcacttccttttccatgctagccaatgaggaacactggccaaaggtatgtaagatcattttccccctctctttccctccccgtttttcccttttgttcccttctcttggtatataggtcgtcctccaaaatacaatgcagtgctggggtttggagcccttaccccaacatccccccaatccagtcatcctgactcccctgaaaatgaaaagacagagaccacattcactttccctgcacctgttcagcctgtgtccctgcccagccccacctccacagacgtaagtaacttgggaaaagcacactgtctttctgagagcttaaattgggaaaagcgttatcatatgttgtctccttatcgacttgcaccttcttgactaaccctggaacagcaattaaacactatagaatgctttttatgccatgtaaggcagctttcttctgagtttccaggccttccatgtccttgagaaacatgttaaatataacctcatggaactcagccagccttcagagtctgaatttgatctactgtgaatgagttctcagaaaacagatggggtggggagatcagctcatacagttgagaggtgtgcaggtttctatcatcagtgttttgggagtggggaaaatgaacaagacatacagtcccccagcagcccttgtttgctgcttcaaatacaattccaaaagtggaaagttttctttagagcaactgttgatcagaaactgttgagcagaaactctgctctttagagcagagttgatcagaaacaggttccggaaaaactgtcaaatacttagtagcccttcacccacaaactgcaggaatgtgaactagtgctctaaatgtttaaatgaacctcaacaaagctcagaattcactcagcagatactcactgagcgctactctgctgagcaagtgctattcttgaggctggggatacagcagggaacaaaaccaactccctgtcctcaaggagctcatctaaagaggcagataataagaaagtgaatatataatgtcaggtaatgataagtgctatgaagaaaaatggggccgggcatggtggcttatgcctgtaatcccaacactttgggaggccgaggcaggcagatcatctgaagtcaggagttcaagaccagcctggccaacatggcgaaacctggtctctacaaaaacacaaaaattagccgggcatggcgtgctcctgtaatcccagttactctggaggctgaggcaggagaatccctggaacccaggaggcggaggttgcagtgagcagagattgtgccactgcactccagcctgggtgacaagagtgagactccatctctaaaaagagatcaaaaatggaatggatttaagggcatatagcatactggcaggaggctgatgtttatgaagagtggtgaagcctcgggaggatctgggggaagagcctgccaggcagagggaacagcagtgcaaagccctgaggtgggagtgtacatggcatcctgaaagaaaagcaagagggccaggatagcgggggcagagcaagctggccagggtggtgggaaatgaggcctcagaagtggctgggccagttgcgcagggctttgtggctttcgttctcagtaaaatgggagaccattacagggttttgggcagaggagtgacataatttttcggtatttattttgaaaattttcaaacctacagaaaagttacaataatggtacaaagaaccaatgtatatccttcacattgattcatcagttgttaacattttgcctatgcttctcacctaccatacacacttattttaggggaacaaggtaacaagaagttgcagacttcatgaatcttcaccctaaaatattttgctatatatctcataagagcaaagatactgtcttatgtaggtacaatgcatttatcaaattgaggaaatttaacactaataaaatattactatataaaatatacagtccatattcagattgctccatttgtcccttacttacttttgtgacactttgtttttcctgcttcagggtccaattcaagattactcttgacatttattgtcatgatattgtctgtttggtaatcctttattttggaagagtttctcagtctttgtctttcataacattgacgtttttaaaaagatagccagttcttctgtagaatgcctctccgtttggattgtctgattttttttctcagcagtagattcagggtatgcatttttgcaggagcactaataagtgacgatgggtcattatcagggcatcacagcagggggcacgtgttgtcagtctcttctgttgttggtgatgttaactttcatctcctaagatagtttctatcagatttttccacctgtaaatgtgcctttttcctgtggtggagatagctttgagtctgtatgaatatccagtttcccaacaaactgttatctaatgatagcatcctttaatgattcttgcttgcatttattatttttaagatgtatgcaaaatcaacttggattttaaaaaggatcactgtgtckaaaatatgcagaagaaaagggcctatagggaaaataggatggaagcaggaagaccagttaggaggcttttgcagttgtccaggcaagagatgatgatgggcaggcacggtggctcacgcctgtaaatcccaacackttgggaggctgaggtgggtggattgcttgagcccaggagttcaagaccagcctggacaacatggcaagacccctgtctctacaaaacattaaaaaattagccaggtgtgatggcaatatagtgaaaccccgtctctactaaatatacaaaaattagccgggcatactggtgtgcccctttagtcacagctgcttgcaaggctgaggtgggaggatcacttgagcatgggaggctgaggctgcagtgagccatgattgcgccactgcactccggcctgggtgacagaacaagaccctgtctcaaaaaaaaaaaaaaaaaaaaaggaaagaaagatgatgatgatgatagcttggaagaagcagagatggagaaaagtgatcacgtctgcatatattttgaagagccatcaggattgaatataggttatgagaaaaagaatggtcaaggagaaaaccaaagtttttggcctaactgactagaaagatgaagcttccatttactaaagattaagagaggagcagatctgaggagggaaataaagagtttcatttcacacatgttccagttatttggtgaattacagagcttgtcattgaccatcctaagataaaatgtcccttgaacttgaaggttctcagaacctactagtggcacacccctctccaaggagcagcagaataccatatgaatattctgagttaaaattccagaggtaacaaagaaagtgttacctttggaggactagggtcatagaagaattctgttctcttgacaggtttccttgtttccttccttagacgtcgctggtggttacagattcatcattctctaaagattcagcattttgtctcgctttcctgacttttggcattaataattgacacaggtttcctaactgtcctgttaatgagcagcagggtctctctcagaaatcttgtttgctagcgccaaagattgtcccaactttttctcagttgaagtattgccaaaggatcaccagctcattggcctcttggtagagctctccctctagggtggtacacaaatgctaggggacagttgattttgtggttctgcatgtgagtctctctcctaaacagtgttgtttttgttgtattttttgggtcaattgggattatggttttctttgaaagattgaacccaaaggatccactcatcaactcacaaactaagagcttctgccaggtttttttaaaaattgaaacattctttttcttttcagaaatctacaggtaaaagaaagcttttctaaagaactccctaagttaaactcagcagaaggtatttttaagataattgacttctccttttacagtatcccagtagtggcagtgattaaaatcaacacacaggtctctgtatgtttgctgctgggtagcataagttccaacaacattaattaaacaataacacttgagaggcaggcatttctagggatcaataaccattttgagggacttggtataatacaaaacctaccagacactaatcctctggatgtaccgtgttgccactatcatcatttttatgagaagggaagatacgttaacataattataaaaattgtttagcacatgatgaaattgcagttggtattgccagagtgcttcctaaaaacatacgtcctcagcgcctagcaaagcatcatgggccagctgtttttcaacttacctaccgtctggtttatagtaataatttggtcagtcatcaaagcctaagcattttgacctggtatggtgcctccgtaggacttcctctgctctttttaggcaaagagccggttctgtatgggtaaaatgttttggcattttatattcatttctatgggcagcagttctcaaagtgtagtctgggagtccccgagactctttcagggagtcataaaatcaaagctattttcataatgatactaaaccatcatttgccattttcattctcattctctcaagaccgaacagtggggtttaccagatattgcatgatgtgtgatgatgtcactctggcagctaatggaatgtgtacctctgtgttttggagtttaaaaatgttttaatatgctttgtttgtaatttttcatggttctgtaattcagaattgaaagtttttaccagcctgggtaataaagggagacccccatctctacaaaaaataaaaaaattagccgggcatggtggtacgcacttgtagtcccagctacttgggaggctgaggtgggaggattacctgagcctgggaggtcgaggctgcagtaagccaagatcacagcactgcactccagcctgggtgacagagccagacccggtctcaaaaaaaattgttttttaactgctattaacagtaaatattaatagatataactcatataaaagctctctgggatcctcagtaactttaagagtgaaaagggatcttaacaccaaaaattatagggtatatacaccagataggaagtttcctttgggaacttaaataaattatttaatttttattttctgtctttctgccttctgtttcttgatgtgctccttgctcaggagcaaaggaaagtgaacgcctcttcgtttatcccaagtccgtctgaataagatgcccagtttgtctcattcactccatcactgataattttttctgtagttcacataaaacagtctctaaaatcacacattttaaataaactttctaaagacgcagactcaccacttagggataaggttcaagaaaggctgaccctctagaggaaaagagtagccctcagcctgattaaaatcataaaataatgaaggaagaaaatcatagttaatctagggatgaaaccttacctcttttggtgcctagaagttaaactattaggctacattcacatgtaatattttagaacatatgttatcttttttactgtccagtggtcacattttcctactaagaaacattaaaatctgccaggcgcagtggctcacacctgtaatcccagcactttgggaggccgaggtgggcagatcatgaggtcaggagttcgagaccagcctgaccaacatggtgaaaccctgtttctactaaaaatataaaagttagtcaggcgtggtggtgggcgcctgtaatcccagctactcaggagtctgaggcaggagaatcgcttgaatccaggaggcagaggttgcagtgagccgagatcgcgccactgccctccagcctgggcaacagagcaagagactccgtctaaaaaaaaaaaaaagaaaaagattaaaatccatccacactatgatgtatcttaaaacttgtgtagccttttttctgggctgccagataccctagtggattacagagcaggtttcccttggagtgaaattgtaggtccatgacgatgtgttccttcactagtggtggtggagggattacatcatagaaaggaaggattcacattcctctctattattgcttcttgtgcacaatttctgtattagaccttctggcagaatagccaggaaatccacagcagcacattggcttgacttgctgggtcacctctagcacttcccttcagtcttcccttccctggtgttcttatcagtggatttaatcccatccagagaatgagctaggcattgactctctggaaaagacctctttaatagctcttttttttttttttttttttttttgggctatgttctcctcttccaattttaagtagatctgctttattctgatggtgccttctgttcagaggctccagcagacttacctgagtcctaacactatcactgtgatgggggtggtagagagacaggaccagcagaacagactggggctgctcgtctttttccagctggtgaagtttttatagggataaagcctcccagaatagaatggcccattgaacagcaaacacaaaatactggttttaggagaacattgtcagctgttgctttggctttttaaattcttcattttagaaagaactcgcatatgaatttaatttgtttctgacttaatattttcccatttgaactttcactgtatttttttcttcttgagcaagcaaattcaggaaaactccaatatttgtctgtcttctttcccagtccttctaaactccccctagaattgataggtgatgagaattgtttgtatcatattgtgaaacactttgatgaatggatttccgtacctgtaagatttatgatatgtaggttgtcctctaccaaaacataataaaactcttaggtatcgcctataatgttaattttggccttggcgactatagacctctcctgtaaactttaagaatacagtagtcccggccgggtgcagtggctcacgcctgtaatcccagcactttgggaggctgaggcaggcagatagccaggtcaggagatcgagaccatcctggctaacacgtgaaaccccgtctctactaaaaatacaaaaaattagtcgggggtggtggcaggtgcctgtggtcccagctactctggaggctgaggcaggagaatggcgtgaacctgggaggcggagcttgcagtgagctgagatcgcgccactgcactccagcctgggtgacagagcgagactctgtctcaaaaaaaaaaaaaagaatacactagtctcccccttatctgaagtttcacttcttattgtttcagttacgcatagtcaactgcagtctgaaaatattaagatgttttgagaaagaaaaaagaagatagacctcattcccatcttttattacagtatatcgttataattgttctgttttcttagtcactgttgttaatctcttattgtgcctaatttataaattaaactttattgtgggtctgtgtgtatagaaaaacatatttatagggttcagtacggaggtttcaggcatccactaggggtcttggaacatattccccaaggataaggggggactattgtactgtccccacccagggagccttagctatgtggagtgagtaggggcatgtgctattggtgattcctgcttctcttgagtactcctggaacgaggcagctgattgtcctaaaacatttatatgcatctagaatgtgcatgttaacattaaaattttaccttttttgtcctttttcttacctttcctctcaactttatagggtgatattcatgaggatttttgcagcrtttgcagaaaaagtggccagttactgatgtgcgacacatgttcccgtgtatatcatttggactgcttagacccccctctgaaaacaattcccaagggcatgtggatctgtcccagatgtcaggaccaggtactgtgggtgggtccaacaggggaggggccgaggagracaaagacacggccatcaggaggaattcctttcccggggaaatggcagtctcttctctctcccagtccgtctccgggctgcatcttccctgtttatgacacagcacgcaggcgcatggccttcattccctcagaagccctctgccatattactgagctggatagatgcttccttgtatttgaaatgacttgtcttctctttaaaagtcaagaccctttaaagtccagtgtgcctcattctctaggaatggtccagaccaagtatatggttttaaaactcttctttgggaatgaaattaagggaaattgcccagttgattaattaaaataacaccctgggccaggcgtggtgactcaggcctgtaatctcagcactttgggaggccaaggcgggcaggtcacctaaggtcaggagttcgagaccagcctggccaacatggcgaaaccccatctctactaaaaatataaaaattagccgggcatggtggcaggcgcctgtaatcccagctacttgggaagctgaggcaggagaatcgcttgaacccaggaggtggaggctgcagtgagcggaggtcacaccactgcactccagcctgggtgacaagagtgagactctgtctcaaaaaaataatactaataataaaacaacacccatttcacttttaacctattttgttatatcaggctcagagaactaagtgtaaagtgctgtcgatattttatagacttaaaaggcaaacatattagtaactgtcctagcctccctcgttctctctttggtttctggtcgccttttctcaactatgcatgtatatttatgtctttatgattttattataagctgtctcaagtcttttttagaggtaggcaaagtataaataataaataagcaagcccaatagctcagcaagtactgggattctgctcagttctttggaatcctgctttgaacaaattctggttttcccttgtaatattgtcctcatcctgcagcctgtggtgcagcggaacacttctctcactgtcctcctcttgatgctgctttgtgaccttctgacgatttttgacatagggtctagattatactttagtatttggaactaatatttaattttcttggtcaggctgtctttgagggacatcgaaatctaaaattgagacaggcagcccatgtcaggtcaaggacgaaactgccagtggctgctgccatcatgctgatgtgcagcttttgtgttggtggttctagctgtcgggagtggttgggtgtcatgtggcgtgtgtgaaaagataggaatgctcagccaagtcccagctccttctaagcctgggctcaagtgtcctggctcttcctgccttgaacttgattctcctaagctgatatttggaactttttagtccagaaactatagaccagggttttgcaacactgctaccataaatccttcctggattttatctgccagtagccacagataccactgctagctgttacatagaggatgtgtgtttaaacctccttctcaaggtaaaattctaaaaatcttttcagatgctgaagaaggaagaagcaattccatggcctggaactttagcaattgttcattcctatattgcctacaaagcaggtaaggagttatccatacccacttttttgtaagcttccccttgtttgaaaaaaatactggcagtatttgttttattctcaaaagggaatttaaatttaaaaatgaaaaccttttgcccttaactattggaggaaacaaagcaaatgaaaactttttattggataaagtggaaaacttctgtagcatttattattattattattcatttattttttgagacaaggtctcactgtatcaacccaggctcgggtgttgtggcatgatcacagcccactgcagcttcctcctcctgggcccagtcgatcctcctacctcagcctcccaaatagctgagactataggtgtgtactaccatgaccagttaactttagtattttttggtggagacaggtttcgccatgtcacccaggctggtctcaaactcctgggctcargtgattcacctgccttggcctcccaaagtcctaggagtacaggcatgagccatcatgcctggactgtagcacttcttgggggaagaaaatgagatgtggtatctcatttatgtaaagccagacccaagccaccgacagttttagcatactgtacacagaaaaaggaaaagtccaggtgggcagattctctgcactgggttgtaggactcatgggagctctggggaaaataccttctttggcaggcattctgagcacagaggacatttcaaagaattaattgtcaaaaaccgttccttttttttttttttttttttttagcaaaagaagaagagaaacagaagttacttaaatggagttcagatttaaaacaagaacgagaacaactagagcaaaaggtgaaacagctcagcaattccataagtgtaagtaaacctcatgccttcagcagtcgatacataggtgcagagacctaggcctttccaatatacgtaacagtacgtgtgggccccaggctgtttcgggtccttctgtttattaacgtgattaacttgggcaaatgcagtttgccatccagttagagttcagacctcaggtacaggcggccagttggtaggtggtgccttacccaagctctgtaacatcctcttggctttaatcagagagaggattttcagtcttcaggctgaataagtaacagctacaacagtgtagccatggccctgcgtattcctgacagtgtgtggggggagtgtagcgcctcacctgacactgagcagacacagaccaggtcccctcgtgtgattcttcctagtcacctgagcgagtgggcccatccgtacggccctccctcgctctttcttccacaccatgctgattgcatttcccggttttcctgaccagtgtgaggaagcgggctttctagagacaagtattggaagtaagtactgcccagcccggcctgtccaagtgggaaagagggttgtatttgcagcagggggacagaggcttctcccaggcaaggagccagtcttcttttccattgagtaggtcacccttgttggagtgaagtgacctcagccctcatggataccaggtggtgccttgtacttggtggcagttgaactgtcctgcttacctgctttctcctcctcaccatacctacccatggcatgcagatttaacacctctttcctctctttccctgcctaaaatagaagccagcaggtgtgggaagctgagggcaaaagggcaaaagactctaagtccccggctgagcagaaggtgtactggctgcaggcctttgtccttggggcttcgatcctcctaaatgctgctggcctgtcgtctcacttcctgctgccctcagatggaatccagatagcactgtgtgttttccaccctggagagctcagtccagtcctgaaggctccccagttagcatgacagaagcatatcaaaacctgcctaaacaggctgcaggacagctgtgggaactttttttttttttttaaacaacctttgtttggaagtctgatggcggctctgccggtttgtttttaagcgttagtactcctgtgtgttggtgcccgcatgctctttctccctctgttgcctctgggacctgggaccccccagcctacccactccacccgccctgttccttaggtggtagccgcccactccactgaggaacacagcaaggcccaggggctgcacagcagccagcagagcttcttctccctgggcagagagaaggcgctctgctcttaggggctgccaggcctgttagaaaccaggcggctcagtgccactgcccttgtcatttgctgcagaaatgcatggaaatgaagaacaccatcctggcccggcagaaggagatgcacagctccctggagaaggtaaaacagctgattcgcctcatccacggcatcgacctctccaaacctgtagactctgaggccactgtgggggccatctccaatggcccggactgcaccccccctgccaatgccgccacctccacgccgrscccttccccctcctcccagagctgcacagcraactgtaaccagggggaagagactaaataacagagcccctctaggagaagccacgggatcccggcggcaaggagaacagaacactgaagactctagaaaagcaaagccggatttctggaaagtgcagaattcttttggttctttggttccagagagagagaagatgcttgtgccaggtggcaccagagtttgccaattgatccttcttattctgtgtgtacatgcaaagattggaccatgttacatgaaatagtgccagctggaggttctttgccagcaccatgccaagtgaaataatatatttactctctctattatacaccagtgtgtgcctgcagcagcctccacagccacgatgggtttgtttctgttttcttgggtggggagcagggacgggcggagggaggagagcaggtttcagatccttacttgccgagccgtttgtttaggtagagaagacaagtccaaagagtgtgtgggctttcctgtttctaaactttcgctactataaaaccaaaaaaaggaattgagatttcaccaaccccagtgcccagaagagggaaggggagtggctggagggagcagggggtgggacagtgtatcaaataagcagtatttaatcacctctggcgggggcctcgtgcaaggggagactgacaccaagaacagccagtaggttcttctcccctgcactctgctccctgcgcggtaaccccaccactcctgaagcctgcccagtctccttccttccctgcttggtgagtcgcgcatctccgtggttatcccgctgtctcctctccaagaacaagcagagcccgggccactggcccttgcccaaggcagggaagaaggatgtgtgtgtccaggaaggaaaaaaaggtggatcagtgattttacttgaaaacaagctccatcccttttctatatttataagaagagaagatcttgagtgaagcagcacgcgacccaggtgtgtgtgaattgaatggagacgtttcttttctctttctttaatttttgtttttgttctttttttctttaaggaaagttttattttactgttcattttactttcttggtaacaaaaactaaaataaggaatagaaaagctgtttttcaggctgacagtccaattaagggtagccaagaccttgcatggtagagtaggaatcatagtgtcagtgaggtcccgtgagtctttgtgagtccttgtgtcatcgttcgggcactgtttttttatgcaagggcaaaaatctttgtatctggggaaaaaaaacttttttttaaattaaaaaggaaaataaaagatattgaggtcttcctagtgttacttaaattaagatcaaggtaagaaacattgtaaaaaaaaattacaaaagtgctatttgtttcctaaaaacagtgatttctattaaaaaggtgtcagaactggagaaaatgccgtgtagttataattttttagcacagaccctgctgatcacgatgacattttgccgtgtgtgtgtctctagactggtgggccagtctccttgaaggacagaggcggagctccccacccttctctctcctcagaaaagaccgtgctctcttcttggtgcagggatcttgtctcctgttgtgaagcccaaatggaagcgtggatggtatcagggccctacccgtggtcttctcagattctgctagagcaaaaggctggtgcctaaataagatcccttcctttggtgctgcttttggtctttcagccaccagcattatgagtgcctgggggacacctccgagggaactggccagcggagctctgtggtgcgcacgcaccctggccgtgacaggagggtgcgggagtacggctgcatcagcccttggtgcttagaacagaggaggagtgacatgttttgagggtacgtctctgagacagagccccagcgtggccttcgctctgtcttgcctttggggagaggtctgaagctcccactcctttctctgcctgttggctccaggcaccagaaatttactccactccacccacccacaagcctcctgggtgaccctgggctagaattgctgcgcttgcctcggcttggccggttgtggcctctccttgagaaaaccagggttgtgaaagactcagaccattctctcatcttgccttgtcagaagtaaattgtgtcagatttgtgctctcgctggagacctttgccccttgcgtgcccctggccgatgggagggcggtggaggctctgtaccctggccctgctggagcatctcccccaagcccactccaggccctgggaatggccagagtctaggagaggtagaaacgatcctatcagcttctctcccacccaattaggcccagagagacaaagacagatctgaaagcaaatgcaacagagaagagacacttcttagagtaaaatgtgtctcatctctatcagccatcgcctttcatcttcccaggggcctcagaagaaggaattaagttaggctgaacaggcctcagagttaggccctggctgcttgattggctgagggggaaagagttcccttttctcattcagaaaccaaggtgctgtgtctagtcagggagccttggagatgcctggactagttggaggaatcgttggcagaggatcagagaccagcagcaggctgtctgccctgtctagagctcttcccctcaacttgtctgggcccatctgggggttgccacacaacacctctaacttaccttttcctgaaagaagttgggaaaccatcatcactagaggcctttgctcagagaggagctgccttaggagtcttgggtcggaggacggggctaggaattgaccagggctttgcctgccgccctcagcagtgtcgggtacattctgacctcgcctgcagctgggctgtggattcttcctgacattcagatgtgagctgttttgggagtcagctagtatggagtacgagatgcaacccagcccccaaacctacattctgcactcaaattccaaaacactgctttactgtaaagaagaggcccctggcacccaatctccctgtccttcactgtcccctcagacctgggcggggagggggggggggcctgtgaccacctgagacatacgctcgtgacactgccccaccccagccacctccacttgcttcctcctccttccctccgctgctctttccccacggcccagaatttagctgctctgacagccacttttgagaccagctggctttgcagtcacttcagagagctggagcggctgcccactgggccctgactgggagtcccctgccagctcctgatcaggcgctgcgccctggtggcagtgatgactgggagtcccctgccagctcctgtccaggcgctgcatcctggtaacagtgaggccatgttgctgtcatctccacctctgcattcttgctgcctgtgggtcctttttctttcatggagcctgctgggtcttgtctcacctgtgctgagctcctctggggttttgatttcttccttccttatcaggccctttggggtaagcctgctggttgtacctgacatagggaggcagttaggggcagtccctggtggggccgccctggcagcctccagctggcaccatcgtgtgcctggtttccctgcaacacctgcctctctgtccctgctgctgcttggctcaggcccaacaggcagcgtgcatggaggtggttacacacagctgtttccgtgagggtgaccgtgtctgcagcacgcttccgtctccgcatgcacggctgcctctccagccacctctgatacttctctcttggggccatcagagcctcccttgggctgtcacctcccagctcacacacactcttcagtggtttcctctcttcattctcttatagggcgtggtccttcttatttatctaaagggctgaatttaggagactttttacccaggggcaaaaggctcttagggtaatgagatggatggtggcccaggtgcattttccagggcctgggttctccagatcccgtggcttctgttgagtggaggcaactttgctctgtgtgaacctcgcccctgtccctctgccgggcacccctggcaggaagcaggactcccatcctcaccctgacttagactgtcctctgagtcagctcctctccaagacaggagtgggcagccctgggcagtcttctggccccttgctaaagtgaggggcaggaagctggggctgccctccagaaagccggggtagggactctgaaaaatacctcctctaaacggaagcagggctctccagttccacttggcgccccctcccacaaggcccttcctccctgaggaccccacccccctaccccttccccagcagcctttggaccctcacctctctccggtgtccgtgggtcctcagcccagggtgagctgcagtcaggcgggatgggacgggcaggccagaggtcagccagctcctagcagagaagagccagccagaccccaaccctgtctcttgtccatgccctttgtgatttcagtcttggtagacttgtatttggagttttgtgcttcaaagtttttgtttttgtttgtttggtttttgttttgagggggtggggggggatacagagcagctgatcaatttgtatttatttattttaacattttactaaataaagccaaataaagcctctcagcctcatggtgttgggtttggggcaggggagggtgggcaggacacattccagtcccagcctctgccctccctgactggctgtctgggggtggggggcgggggggtgcttgcccttaagggcccaggccctcctgtgaccccagctggatgtagcacctcccttgtgcactgacgccctagccccagagtgcccttgctcccccaaaccaggaacacaaaaaagatgttttaaaactttaattatgaaaaagggataaacaattcaagatgggggaaccagccccaaactggctggggcagagagagaccagtccccagccatacaatagcagcaaggggaagaccccaccccacagatgctctgccccagcccttcccagagaccttaaataatttaaatagcagggatggcggagggcaggttgccctggtgtctgcccaatgctaagatgaggggcagcgccggcccagcctcagcctcgggcagggctctggggctgctgcagggctgggaggtatttgagggcagcagccccatggtggcgggacaagtcctggtggaattcgtccttgagggcctggaggcagtcacgataggtggggctggagcggaagcgggagatgtccaggcttggagcgtggggcagatggatggtgaaggcctcgggcagcaccaggagctcatattcctgcagggtggggcagaggagcagtggctgcctggcttgcctggcctgcggggaaggtgcagctccagagaacaggcttaccctgtagcccctgagagctaaagcaagggccaaagggcagattattttaattccacagaagggggacatttctaacagtgttgcctagtggtgtggtcccccatgcaggtgtcgtgagttccctggacctggaggtgctcgagtcaaaggtggaggcagcaaggtgccctcctcacctgggcatccagctccacaatgtgggccactttgttccagccgaagcccacaaagcgaggatcatagcggggacagtctcgtggcaccaccacgtagggttcatagttggccgcccattgcacacggtacggggcctgagcctcccgccagcgggcatagtctgtgggtgcgtggcctcggggccactcgtggtacctgtgcagcagggtcgggtgggagccaggctgaggctaggagctcgtgggtagtgggggccagtgtgggcaagtgagtggagtgggcagagaagtagcctctcctacctgaaggtgtagagagtgcccgcatccagcaaggccaacagctccaccttggaatgggggaagctgaagcggtagcgcagggtctcgaatgccggcaccaccagtgctgccttgcgccggctgcccagccccagctgctcaatggaggccctgaggaggagcacccatgagcaggggagaagagcggggcatctaggactgggccagtgacactcatcagggcattagccacaggactagaccaccatgggccatcttgcctgatgcgacgggtgggcacaaccacaggtggagctgctgttgaagccggccctggcctccctgttgacagcccagagaaacagcctaatacaaaccccaattgacagaggccactgaggcccagaaaggagcagggacatggaagcctggggtcccacacatgccccgtccacgtccaccccatatattgttcccctctctgcctgcaggcccacctgaggtagtcgtagagagaataggcaggcaggaagtcaatgtcactgaggaagacgtaaggcgtgagggcctgggccaaggccacgttgcgaagctggttgacggggtataggggcccctcacggtacaccacatggtaggccacgtcctgccgggcagcaagcactggtgaggcctcgacgaaatgcaggaactgctgagcttctgcgtctgtcaggtacaaggccaggctcatggggccaggccagtgcctgcacagggcttccaacatctgcagcctatggggagagggaggtcagcacagctctgcccctcttgcacaggagctcagggaggcctggcaaacctccccagttagctgctgctgccacctcctcaagtgacttactgagcacccttcaaatacttttagagccagtctgattgaatcttcacaactacccccaccaggtgggtactttctcatttgagagagaaaactaggggccagagatatgaagacttgctcatggtcccacagcgaccgaggggcagctccgggcatctgaatgactccagagcccaagctctttccaccatatccaatgtctccaacttctggaactccctgagggacaggtagctcactaccacagcatcaggctgccagatggaacctcctctcagaagtgtccaaccccagcccatgccataccccctgggctgccctctgcaccctcaccggtccatggacagctgggccacaagggtgacatcgtgaggccgggggggtggcggttcatggggcaggaaagtgacatgcacacggtgcacagtgagctgctgctgccggaactcaaagcaggggtcttcctcgtccagttgtgccagggcctgctgcaactgagggggcaaggggtgacaaggaccggggatagggcagaacaacacatcccccagacaaggctgggtcccaccaaagcagagaggggcaggggaaggtgactccttctcacctgctcagcaccaggtgggggctggctggggcacacaaagagctc

SEQ ID NO: 96701 - DNA, 391495 bp, Homo sapiens
ttagctctgctgtttgcagacagcttaagtgtcaaccagctcagcactttcttggtaccagggttcttgtctggcatccagaaaaaatcaggtcatgcgcagagttgaaggatggtgattgcgggggggattttactgggtgatagaggtggctctcagcaggatggatagggagctggaaaggggatggagtgggaagatgatcttcccctggagtttggccatccagtggccaatctcctctctgagtgtccctagctgaactcttctcgatgttcaaacactccttatcttctctccttctctgcagcgtcattctgccactcttctgctcttctttttgtctgctcttggagcccagggtttggggtttgtatggatacgggataggggggtgtggtgggccaaaaggtaacatttgggtgtgaaaacagagattcctgtttccatttaggaccacgggtttccagacttgagggtgggccttttgccagggaagcaccttcttctacccaatatttccctgtctcctgttcatatcagtatcttatactcttttctatttttttgtactctgaacccaaaccaaggatatttttagaggacacatgtgttttttctttatatgacacatatccaaacacactgtcccttttcagccatggtataaaccctacaaacacacaaataacatgacactcaaggatctggcaaattgtattgaaagaagatcctaaggaggttttcagggaggaaagggctttatttttcttgttctgttctgtatccccatgcctagtacctggagcatagtaggtgctcaatacgtatttatggaatgagtgaatatacagatgaacatgtacacacatatctgtaagcacacacctatttgtctttggtctgcaatccattgtcacaattcactttttcttttttttctcccttttaagaattagtcagtcaacatactcttcactaatatctcatgatgtacagacatcaatatatgatctatgcgagttgacggagagaatgacatggaattataaaacagttctcatggctgagaagcttgtgatctaatagggcaaacacatataagaataaaaaccaggaaacattttagcactaataatactgtttggaaacttatgagaaaaagggagtgagtgcgttggcaggaggtgggggagctaccccccatgtaccatcccatggcagctagcctacacaaagccatggacaagtcactggtggaggcctcactattctgaccagctgctagtgagaaatgggctcttcccagccagaagaggctgtcagaaaggcacaggcacttaacaggtttcaactgagcttccacagacacatcctctaaggagtagaaaactccattccagacccaaggaggccaaaagggttcccgtatacatgaacaggaatactgtggcaaaaaaaccaataatacaatgacggaaatccttagctttgtgtccagggaaagcttggtttagctgtgagtgagtgaaaccagctcaataaacgtcagcaatttgaagacatctggtctttatttttggactttggtacactgaagaggattatggttatacgatgtagaggccatttagttttgtcaatctacaggatttcttataatatgaatccctcacacttagaatagaaccttgctctccaaagttgcctggaaatttttaaatattaactcttcatctcccagagtgattttctgaaggaagttttatcctcaaaggaaggaaagagattgttttaatagacaaattgagttatggagtagatatttattttaccctggttggtggaacctccaagaacttcaatattctgtgacagccaaaaggaattcttctgttcttcttgctaaactctgatgttattttttttctctctctcttttgtcttctcttttggcttctgtttgtctttagccatcccctacctatgcttaaaaattattaatctgatagttattggtgatctgatatttactttccatccaccaccctttgtattgagatgggaaagttcccttgacccccttgtgggacttgtgacaaaggtggctcatttactcagccatcaagctcaaaccccttgcaggagggggagcacacaggtgagtgagttcaggagcaagggctagtgccaacaggaatgaaccctgtaccatcccatggcagcatctaggggttgtctgtgacctctggagccccaaaggggcatgtgttataatcagtgatcttttagcttttgctgtccatggatggctaagtgttaaacagctcagtggagagtcagtgtgacagcctcttgcacctgcatccagatccttgtctggtgcccaagagcaatgagatcacacagacttgaaggatggtgaatgcagagattttattgcatggtagaagtggctctcagcaggatggggagctggaaaggggatggaatgggaagataattttcccctggaattcagctgtcgccagccaaactcctctctgatcatccccgcccaaattcctctccaatgttcagctgcctcttttcctcttgatgttcagacaccgtttctcttctctcctctgccacactgctctgctcctctgccagtggagcttggggtttttatgggtagaggatggggggggtgtggcaggttagggtgttttggaaaaagcaacatttgggagggaaaataggaatgcatgttctcatttagggctgtgggtccaggcttgagggtggagccctcaccaagaatcctacccttttctaccccgtgtttccctgcctcctgtccatatcaatatccactggctaatgacctggtgcctcccccaaccctctttatgtctcccatgttcccccactttttttttgtttgttttacctttctagcccatcatttctgacattctctacttcccctgttaatacctgtgttgagttccattgcccagggctctgccaggtgattgactgtattagacaatttgtagcaaacctgttgatagcctacaagtggctcaggggcttccccctgtctgataacatttgcattttcattggggatttcaatgtcaaaaaggtcagttggggattcctacaccttggcaggctttactcttgatttttctccccatctggctgcccattgagccatgtttagagcggcatctgctctcaggtcatggctgctgcaagctggttggacttatcgctgtcttattccagtgctttttcagttaacatggtgtttttcaatctattctaaaagcaaagggcacaggaaaagacagtaggcagaggcaaggaaacattgcaaattggataaagagccaggccactgggctgaggtattctgtctgtggaaaggcccattgggtaccaatggtattgctgtccattaaagaaaatccataggctttttaaaaatgcattttcaccttaatatagcaggaacagccactctgccatgcaattcctgaggatttatggctggctggggttaatggtttgaggtgttattcttttctgtgcctcattaatccccaggaagtgcctgtgctgagatggttattcagctcagttgggctccagaggcaccagtgttccccactccacctccaaagtggctgcaggggccaggccacaggagctctcagctctgacacaggctctgtctggaccaccgtgtccctcagagcctgggttagtgactccacaaatggcattatgaatcctaggtgagtcctaggtaagttttggcagccatttttcttggttactggcattgttgatatgactctatggcttccccctttatcctttaccacagaaaatttgaaaaagacacagttggcctcgtctgagaaggagaagtgtgagtgcaatgctccttatccacagatgacagaagggactgatccactgatggggcagaactgataacaggacagagtctttaagcagcacaaggtgctttctgatgatcacaatgtattgcattttggttgggggaattctaactttttggagacattagtgtttataaaatattctcctatacctttctgtcccaccttcctcccttctacaaatattaattgagcacttactaaggtaccagtatagatattgaggacacaaccatgaacaagaggaacaaggctcctgtcttcaggtttttgacatttaagtttgcttgaggtctgtgtgtgtgaaggccagaaaataaacatataaacatttaatcttttaacaaacccatggctcaggcagaataggtgtacccatatctatttcataaataagagacctgaaactttggagaggtcaatgatcttttcaggttagccagtttgtgcattcattagcttatctatcagacagatttaccaacaccagtcatctctcagctcatctcctagacttttgagttataaagatgactagggtatgggtcctgccttccaaggctcacaatacagtggtaaagcagccacacagacaaaaatattctaatctgataactgctataatgggacctttgcttgcaaaataggggcttgaaagaagcatctgcctgagggagacaatcaaggtcagccacaagtctaaggctgggagaacgtgctcaataacacttgttggattgaattgagtcagctattcaaggctggcttcactatctggtttaaaaagtgtccccaggacatcagaatcatatattcaaataaagcaaaaataatctcattccaaaccaaaatagaaattgtttgttccacttttggtcaggcttcctgcttttatgtgattaattaaaaacagggtagccactaagctgcaatataaatgacaaattatttatgtcttatttattaatgtaaaaatgcccagaaattcctcctagagtctgtttcatccaccctcatccttcctgtatacctccctacctccattagtctggctgtaattgagaaatacttacacctagcctcaaccatagcaatgtagaaagagccattaaactaaactcaggaaacctgggtttttgtcccgggcctgtgattagctaaaattctgaccatgggtaagtaacttcagctttttttccccctttattttcctttcctttcctttcatttcctttcccttcctttcctttcctttctctatctccctctatttctttctttctttttttttttgatacagggttttgctctgtcttccaggctggagtgcagtggtatgatcaaatctctgcaggcttgatctctgaggctcaagcaatcttcccacttcagcccttcttagtagttgggaccacaagcatgcaccactacacctggttaatttttaaattttttgtagagatgggccctccttatgtggcccaggttggtcttgaactcaagtgattctcctgtctcaaccttccaaagtgctggaattataggcatgagccactgtgcctggcctcacttaacctcttgatgtttcagtttcctaaattataaactgagattgaatacttgtcctatcttacatcacatgttcttgtaaggaccaagtggtaatactgggtggtagctggagaatggagcagttagcagtttcacatgactagcaaaaggaaattgttgaaatagctgcataaactaggggctgataagatcctgaaaaccagatgtaggctaagctggctaagaccaactggacccaaaatggtgctggatttgacatgggtttcacctataacctcattatatgttcattaacttactaaatcacacacccaccagtgccgtgatagtccgggaacacccaaattggtgtaaaaatgggtggtaccacagttccaggaaatgttcaccttttcccaggaatcttcatgaatattccacctcttagttaaagaaactcataaagatggaaaccctgaaccccactgggcatgactctctctcttgagtaggcacacactcccttttctcgggtgtgtactttttgctttgtgatacatctctgcactttcagtattttccaactcatccttaaattccttctcacaacagtgtcaagagcctggacgccagccaggattgaggtcctacgggtgtttggggacctccccaagcccacgagtatcaatggcagtatcaattgtctgtgacagtgattaaggagcaaaacacttggtatgtattgggggtgtcactactattaccatagcatgtctgctgactgaacaagatgctggacgtttgctaacttggcttgtgcaggggggtgttagacttcttgtattcttttggcatcagagggctgggacgcagccctgtaagcggggatgagcatctccctttagcatcattgttcccatccaagggtcaggctcccacttaatggctcagtttctccagtctaataacttgtaacaaattgtctcatttttctttgataagtgacaacctttggctgcctggtcttcttttaggctgcaactgcttctgtgagctggcaactccagttctcctgggcctcatccaggcctgtgcagggagaccatggaggggattaggatgagggttattcacatcctctgcagacaccttctcatgttcagtgtctgcttggctggcattaaaggcagagggagtgctgaggatgagtgtgtgtggggtgcaggaaggaaaggatgggtaaggagagttctattgctaagcttagggttatgagaggaaaagtaggttgaggcaaaagcagtgagggaggatataattgagccaaatatcttattggaacagacagaagtgataatatttatttcttctatagatgcactgatcatgttgtccagatcaaaaatagaaactgtggactatgatctaacagatacatttttgaggacaacaggacagtgtagtttgaatataaactctctgggaaaattctggaacagtgatttcttatgcctatgacctcatactctcccataatttcttcttcttcttttaaaaatttaacctctaggagtacagaacactcccataatttcaaatcttgctgagtctagttttgccattgggcacagttgagaagtctgtttgtatttattctatctactcattctttctttcctttcaacaagtatttattgagcacctacaatgtatggcccacttcatgggtgtgggatctctgtagtcacacagggccctacacttaggagggccctgtgcttggttcaatgcactgttaacatcttgaaatttgtaatatttctcaaacaagaagttctgaatttttattttgcaccaggccttgtaaattatgtttctggtccagatgaggtacgatattgggtgttgaggatacaaagatgaaaagatatagctttttcccaaactctctctagctgccaccagctctttgcttaggaaataccccaggtgctggacatggctctccgcatagttatctgctaaacactgccttagctacctgggagtttgaagagtttcttcttaactagttcactgtaaagcattccaaatcatataaatagttttttaattataaaaataatagaagttactgtagaaagttagaactatgcagaaaaatttgaagaagaaactataaaacaatccataatcccaatatccatatgcagtggttatcaccggataggtggctggatagtggttattgctggataggtgttttcactttgaattattcatatttatatttttaaataaaagtaggattctaatacacgtataattttataatcttgcattttcacttaaaattgcatatttgctatttcccaagacataaaataatttccaaaacatggtgttctgtgtttgttgcattctgacatgtggatgtgccatgatatattttcttccttcccattttttggggtacatctaagttgttttcaactttttgctgtggtaaatgctacttggatgagcatccctatatataaatctttgtctgcttctttggttattttcttaggatacacttcaaaaagcaagatgactagttaaaagtgtatggagaggcatgacacacatgcaaatcatttccagaagactgcaacaacttatactctcaccagtagtgaatgggagaccctatttcacaggtctccctatactggctattttttatttttcaaagtggttgtccaagttgacaggtgacaacgtttatttgattacttgttagattagacgcattttttcctatatttattgggcacatatatcacctgttttttcttcaaaggctgcaaaaactctgaaatttaattcatacttcaatatttaatacaaagttaccttttttattgtttcttttctactgtaacctcatgcctatcctgacccaggccattctttttttttttttttaacttttaagttcaggagtacatgtgcaggtttgttatataggtaaacttgtgtcatgggtttttttttgcataggttatttcatcacacaggtattaagcctagtacccattagttatttttcctgatcctctccctcctgccactctccaccttccggtaggccccagtgtgtgttgttcccctctatgtgtcatgtgttctcatcatttagcttccttttgcgagaacatgtggtatctggttttctgttcctgtatatcattttttttataagttgtcttatcagactttttgttcattctcctatcagagtgctccactttttcttagttatctataaattagttatctattaaatgtcttaggttttaaaaaatgtattaggcaacatgcagaattaggtctaagtgacagataatacatgcgtgtttaacatgttatctctgctgaagggtattacctttaataattcttcaaacttgaagaattattttctatataaaaacttcatatagaagcttaatgaggtcctatatgggaatgaattattgcaaagaaaatgaaattcctgtaattggaaaaattgctgcaaaggccaaatgaacatcggccaagctrctgtggaaggattcttgtgctaggcaagaggttggactgagtgagtaatgtccaatcatttttgattctctttctataattctaatgataaaatttcaagcaccatcatctgattggctagggtccttccaattctaatttatgagtagttacctcyaggtacattcaggcctccctgggtcaagtaagttatcatattaaatattaatattagtatattatgtgagatgaaaagagattaagtttcaaatggtatgataaagaggaaccatacttacatattacagggagtcagaaaagaaggaatctgatgagtgctttagaaatcagggaaggtctcatggagagagtgagccttgaatgaatcagagtctgtgcagcagagagaggtatgaaggctttctaggtgcagagaacaacaatgtggtttgccatgggctatgaaccccacctaggggtggccctgtgtatctgtcgcagcacagaccgaaggccaaatcagtgcaaaaggggatttgtcatcttggaaagccaaaaattccctgcaacgtggagggagaaaaagagtttccagagccaagggcaacttccctctggactccacagtgaaattctggtgttaggctcacctgttttgcatagaaatcctaaattgtattttgtagctctgagaccatatgggaggtccaacccttctgcgaaacagtcatgtatcgcttaatgatggaaatatgttctgagaaatgcatcgttaggtgatttcatggtcatgtgaacatcacagggtgcagttacacaaacctacactgtatagtctactatatacctaggctttatggcatagcctaccgagcctacaaacctgtataacatgttactgtactgaatactgtggcagttgcaacacaatgacatttgtgtatctaaacacctccaaacatagaaaaagaatagtaaaaatataatattataatcttatgggaccactgttgtttatgcagtccgttgttgacagaaacgttatgtggcacatgattgtaagttcaagcaagctgaggagcttttctcctccttttcttttcagttgtttttctctgagtttttattctcattgttagaagtgttggcatgttgcatttgttggaaacagagaatagcacttgccttgtgggaggtcagcttcagcttccccatctgaactttgagaagctgctttcacattaggaagrctctatgtaacaaggatgggttctggggcaaggaagagagtcttgtcacctcagctgtttgttgaatcaggggcagtggatgcctcatttattcagttgacagcgccaggtgctagtgactataaggtgatgggttcaattcacagtggagccagctaacttcactctgtttcacaaatggtcccaagttatgcttcctatctgtcagtttataaggtcactaatttggggagctaggtttggcacttcagtacaaaccactttctcaattgggtctcataactgagatgctagacacataattggtacttcacgaatccatttgatgagtatttgtggagccactacaatgtaccaggaactgtgttaggtgctgaaaatgcagattaaatcaagacactctctgtacagtggatttgataaatagatgaagaatagcatttgtgwgcagaaacctaagaggggctggctggggagagtaagaggcagtaaagggtgtgagatcaagggtgaccattataaagtggacaaaatgcaatagacagggaccatccaaaaaggagcactatttcaaaactccatttatctcaaggtttgtggattcaagtagcttagttttgctgaattcacatttggactatgtgagtaagcaccagagaggaaggtgatgtttaacacgggcctctgagattcttccatcctggatgtctctgggctctgacattcctccctcaaaatccttttcatgggagagcttcagactgagtttttcctttgtactcagttaagggctttgttgatgtgggaagagcatttgggtgtttaaccagcaccaggaaaagcaaatctgcttattaggtccacccaaaactagggagggggtatcagtttggaaggcagccacatcaatcaactgagcaaattcacattgccaactctttatggatacctttccaggtatatggtcccatctcttctctattcctcctagctaagtgctggcaaagtggtcagggaggttcactcacctagatcagctctagccctcctgcatgtgaggtgggcatggaaagaatcagggggttcagaggcaggtgtgagtgcagcatcttctgcacagggccctctctgtgtaccctcatgccccctcatctttcatgtgaaggcacacattgattttaaaagctgctagtcattggtcacaggggttgacttggccacttaggtacctatctcctttccccctcttgcttcctggtgtgccctttctcaagaagagtttccctgacagaggaatgttgatccatgctaagatttctctttgttctttgggacatatatcctttaaaaagttttgtctcaataaataagaatactatgtttatggagcatatactacctgtctggtactgtttttggcaattcaaatgcatcatttcattaaacactcaccagatgttagtaacttgtaagagctggtaggtggaagaatcaggattcaagcctggaatttccaacttcaagctctgttgctaactgccatcctatcctgcctccaaatatttgcaatgctttcatacactcagtcgcttgcatggtggcagccaacgtgaaaggaagagcattggtctcaataactaacattttttgctgcttcaatttccttgataagcccaagtcttttgtgtaagaaaatacttttccttcttcaggtctttgtggctttctcttaagcctaattgttggaaaaatacttttctgccagaaaaaacagtttctgatcactctgtggtacctattaaatgcactagtcccttcttctctccctcaccttgctttctcttctgtttctgggagagggagtgggtggggtgccactgaacatgaaatccaggcacacgctataacacacacacccctctagtaccccaccaacatgcctgtgagtggaacatggaaaacggcccaggattaacagcaccatgggaagaaatggggaccgcagcttgggtgatgccttgggaagtgcttgtcgtccttcagaattaagtgagcagttgcatacttttcatccagctggggagaacagctcccactagaaaaggcaaagcaacctgactgtggtatttactggcaactggcctcagtgactgcttttgataacatccactgggccaaagttctggattgttttatagcaagactctgctctcacctcccagacacaggaaggtctgagacatttcacacccctgctccctccttaggggtccacagcagttgtcatctgggatgcgtcagacacttcaccacagcccacagtacacattccagggccacaagcacgtggttccctgagctctttgctcactctaacgtgtgaaatgtgtattgtgggctgaaatgtgtactgctggccattggttcccattccatgttgatactccttacatgcctctgcagaggaagctgccaacaacttggtagggatttttatggggtcgaggaagggactttgccttccaaaatactgtccagaaaacatgatggaatttctgtaacaggaaacaaaatgttcagttaagtctccaaatgcaaataataacagaaattcacactaatatgtcaataaaaatcacctgcctccatctccaagcaagaaggttcacagtggtgaaggtccagggtttactggtggggctcactcacacaatcacagaattaagccaagaactctggacattgagaataagcaacttgggctaactctctttttcccctggtgggcatctattttcagctatttctctgcttttcagaggccacattgacaaaaaggtaagaattctcacctctgtcttcacctcaatggacagttgtgtaaaacagtctccttcccttagttcctggtgaagatgactccacatccatccacatttttcacctagcctttctagacctaaaagctggaaaggcagatcagaaggacatgttctcaatccaggggagaggaatgatcaggccagtagacaccagccagaaattaggctgactctaggctgcatggaacactcctagagaaggaaaatagaactaattggaggaaagaatgctttcctgaagaaaggccccatctccctgagggcaacaaaaaagaaaattcagagaaatactcaactcccagtgaaaacggacaagaagcaacaaaaatgtgaaataaaaacactatcattttaaaaacaacacaacaattccaagaatactttgtgcttatcagctttgtcccagccttttccaagtggcgtctcttctaatcgtggctggggctgatttctaatctggggaccactgctttgggtcagtggattttttttttaaaagttttaggttgaaagagagcaaaagctggccccatgctttagttccaagtccccagtggcttctcgggtcaaatagcacatcctcagaatgtgaaggagccattgattctgggacccagggtttgtcttctctagcttttacagatagtaggtgatagcytgtgatatgcctctttgagtgggattcatgccttaaatcaagaagaacacaggaagggaagtgtttgttacttggtacaacaagaacccatatgggagaagtgaaaaaatagcaaagctctgtggaggaaaattacggtggattctgagcttgactgtcttgggcctgagggatttgaggtgctgccaccggaaggatgagtagctcatgcagggttcagagggactcctttccctctaagtcaattaaattttcattcccaactctcatttgctttgccatttaagactgaattcaggttatactacctctgtgaagcttatccagaaaccccaacacactgtgtgtgtctgtgtgtttttaaagtttaaagcctttttaaaaaaattataaaataaaacacaaatatagaaaaccaaacaaaacaagtgtagagcttaatggattgttataaggcaagcactckgttaaccatcaaccagataaacaaacagaacttggtcagcagaatcagaagccctccatgtattttgtcccagttgcaatttctgcctccctccccatgaaagtaatatactgacttccacaaaaatcacttttctttcaccacaactttagttgtggttttaccacccaaatgacatccttaaacactatagtttagttttatctatttaaaaatcttgtgatatatcctttcaatctctttaaacctacagttttccttccaaacttctcttttctgtacaatgtatttgttactcggggcatttgacctgtagagtttcttgtaggccggatgttgctgattggacactcctgatgagattcagcatttactccagcctctgtatttcctgcgaactggcagctggatttggaggcttggtgaaactcagagtctatctctttggcaaggatatgggtggcacattagaaagtatgtaacgtctggttgtctctctttgtgacttggcagatattgattgctcaatgcctagatccattaatttattgtgggctgcagaatattattgcatattatttcttttctacttatttgttggaatatttttgtaaaaagactcatctcttcatctattatttgatttatcagtgttaacaattcatataggaaaggccaataaatgcttgattcttttattcaattgttttcaaggtattgaatgtttcctgttaccctccaaagattaatttttatctaattattatgaactcgtgtatccaygtgttcctatatgtattcaacatatttggtgggtttcaagccattgtaatcattatctttatatagctcaatttgtcccatctttggccaatgagagcttctttcattgacatttgaatccttttcacatgatcctagtagtctttaatagcttctttgctatctcatatgacaagtcagtctaggctcatcttacatattttctgccccaaacatggaatctgccatttcttcaagaatccctggtttcttttaatgggaaatggtacttacaaaccgtaatctaggcacaaagtatgtttatcccgattgtgttgatcattgtttccaggtcttttcagtgggcagagctacaaaatatatatttttagataaaaaataaataaccttatgagctcattttgaaacttccagtacaacttttgtgtgataggtttttacaagcataacagtttcagaacattaatattagtagtactaccaccaatatgattactaagggttacatttttaaattttctgtctgcatttgtctctactttttgtgatttttgtttcaaaaatttcaaatraactttattttctagaggtattttacattaatagcaaaattgagcacaaggcacagagatttcctgtatactccctttccccacttatgtgccaattctcttactgtcagcatttcaccccagagcaaaacatttgttacaattgatgagcctacaatgacacatcattatcacccaaagtccatagtttatattaaggttcacttttggtgcttacattctatagattttgaaattcataatgatatgtatccacaattataatatcctacagaataatttcactgccttaaaaattctctatgctccacctattcatccttccctccttctaacccctgtcctaacccctgacaaccacttatctttttactgtatagttttgccttttctagaatgtcatataattgggatcatacaatatacagccttttcggattggcttctttcacttagtaacaggcatttaagtttctttcatgtcttttatggcttggtatctcatttctttttttagtactgaataatatcctcttgtctggatttatcatagtttatttcacttactgagagatatcttggttgctgcaaaattttggcaattgtgaataaagctgctataagcatctgtgtgcccatttttgtgtagatgtaagttttacagtcacttgggtaaataccaaaaaaatgtaattgctggattgtatggtaagggtatgtttagttttgttagaaacttccaaaatgttttccaaagtggctgtatcatcttgtattcctaccatcagtgagtgagtgcctctattgctcctcatcctcaccagcatttggcattatcagtgttttggattttagtcatttgaataggtatgtagtggtatctcattgctgttttaatttgtaattcctgaatgatatatgatgttgaacgtcttttcgtatgcttatttaccatctcctctatcttctttggtgaggtttctgttccagtcttttgcccattttctaatctcattgtgttttacctacttctgaatatgtgtcatacttaggatcagagtggtaagtaagtgaaacatccagtgagcctaagctgtatcaaccatagacttctgatatttgatggaatttttggaacaggtggctagaattctgaaaacagtaaagtatgtattacttctgtttacctcatatttgatttcaatagagggcattggctatagataaaaatgttttagttcattcttttaaatgattcccctaaaagctgtgtctagtagtaagaataggtcatgttatgatgcagtaacaagtgtcaattcccagtgacttattttttacttactttacatgtccaaggtaagttggtgtgggctttattacctcagtcactgggctcctaggttgatgaaggctgtattattttttgattattactatctggaacacatagtcttcttgatcagagagacacctcaagagttccacattgacctggcctggaagtgacacacatccttcccgtccatagctcattgaccagcgctggtcatatggctgcctaacggcaagagggcagggaaatgtaggaaatgagctggatgttttggtgattccgtggtctctgccatactctatcagatattttgggcacaatggtggtgatggcagtgcccacttggagactacagagtccagcaggaaacggtggtatccagataaatttaaaaggatgcccagcaggagacttcagggattagagggaaatgaggacatttagttcctatccaagactcacacacttactacaagttccataattattacatagcttcatataaaagctaaaattgtcaactctttaaatttgtatagtataaaaatgtgagcaagaggctaccagaaaatatgattgttttcaaacctgaattgtgaatgaagaagccataggaactatttggtgacttgtcatggctctagaaatacctgtgtcttcaagtcccagaaattattactgggaaaagtcatatgttgtgttgataagtaggaaaaacaagcaacatataaaattgtatgtacagtgtgaatacatctttataaagcaactaaaattaaaactaaatacaaaaatagaataaaatacaatcaaatataagtggtggtcattgttggttggtggtattaagagaaattttgttttttgtgtgtgtgttttttatattttttatattgataatcaacagagaatgaatttacacagcaagcacagtacacaaatgctatgctgtaaaactgttcctggggtacgtggctcatctaaaacaagtgcaataggtttcccatggtgagaaagccacactgtcatttgctcctggctggcacagagtaggtggtcaataaatatttgtgaaatgaatggatgattacatatgtgtgtgtatgagtatgacttggcttacaaataaacaaaagcctagcataggtgaggagtttttaatggagtgttactgaaaagaaaaagcccagattctctgctcttggcccaacataagttgttactggcctcagtgcatccttacaggaggaaggtctacactggggagagagggctacctcctttagtaagcactgagaaccatatgtgctttcactttgtcctcctgatacctgggaataactctggctacagatgtttttgtccttatggagtcctccaggatgggaactggaaaaaaaatgccagacatatttactttctaaaaatcccaccagacaggttaaataattgaaaaatgtcatccagtaatatcttgactgggccaagaaaataacccaacattttatattcctttaaatagagattagcaattttagggtgttcttttgctttgttttttggaggatgggagagggaagtggtttagggaggagggaaagagccatggccattggtccacttaatttagaaagtctgaaaaattggagtggtgaaatgttagagggaagaagctgaattatctccattgagacacctaactaatacctatgatgaaaatgagaaacagaaaccaataataattactgggcttgcaggcagtgtgcaatttttcaatattagtagggcactgacttttctgagttactgtagttatttggtgctgtgactttaaaaggtttttgtaaattttggagcaaagactattttataaagctggatcattttccatgcccctgatatcttttctggttaccacacagcatccttttacaagagttagaagagggaaaatattgaaaatccagtctcaagaaagcccctgtctctctccttccaatactccaatgtctgagtccttagtgatgtaaaatgtggttcaaaaaaatatcagcaagcatctgggtttcttgtctggaatgcgtgttccaggagaacagagaccttgcatctagagtaatgtctggcacacagaggaatcccagtgtttatggttcactaaatatactttgttctctgccatacctgtggtcctgaatccaaaagctgaagctcatgtccccaccatgataaggaaaacagatggttactgatattttcagtcctatttctgtgcaacttgttttattgtaatgggacagtgtcagggatggagtctgagtgggccaggtcagtagcaggagagtataaagaatctgtctggcackcctgcctagactcaagaactctggcccactaatacaattgctctagattgccaaaatgcaaagctagcactttggaccttcacttcaagaagccttttcatttcaattgatctcttggctcaactgccagttttggaaccatgactaggatgattttatcagcatcatttacaaagatttaaacaatgacagattcctgggttcttctttagaggttatgattctgtatgtatagggaggatgccctgaaatttgtatttttagaaaagattctaatgtgaaatcagtttgaaatcaatagtctatgtccttctgtttgcacttggatatttgcctggggaaagatggagtcacgtgctcttggacctgatgccatgttggtgagacaccgggacctcgaaaatcctctaaatggttttacaggaacttttacatgagccacggtcatccttaagcaatctctatgtttcctgggcacttttctcatcccatttagcttttcaagggaagcctttcaatctcatctaactgctctcaggaagagaaatcagttctgcatgaaaaagacagttttttattcctttatttctaccattaaaatctaccaccccacttcctctcaggatcatagtctcattgcatatcctttcttgtgaccttgctgcatgctcatactttcctttgaaggctcmagaattgggggatatgaggcttaaattgtaaaaccaggactttcaaacagttactcatgatcaacaataaaacatgcattttttattgtgatccattattacacacatgcacacctaaaataagtttcatgcaacactacttactctaaatacatgtgatatactccrttctctaaactatactatttagtttaattaaaagttatggttgggtgcagtggctcacgcctgtaatcccagcactttgggaggccgaggtgggcagatcatgaggtcaggagatcgagatcatcctggccaacatggtgaaactccatctctactaaaaatacaaaaattagctgggagtggtggtgtgtgcctgtagtcccagctactcaggaggctgaggcaggagaatcacttgaacctgggaggtggaagttgcagtgagccgagattgcgccactgcactccagcctgggtgacagagtgagactccatctcaaaaaataaataaataaaaaacattaaaaaataaataaaataaaataaaataaaatatgctggcctagacatacaaaattacttttatgacccactaaaggggctcaacccattatttgaaaaacattgctataaggatcccagactcacctctgtctcaagtatgggtgaggagaggatgaacaccagagaagttaaactatttccaagttaacagctgggttatctgttcttaaagccatgggacaattatggaggttcaataagtagctgttagaccatctaggcaatacctaatgtaacaggtctggaaactgctggcctgatcaccttgcgtaggaactatagctgaatattttgagtagcttctgctattaaaaagactgcagaataagaagcttgtgccagactatgggtcaggagccatcaaaggtgctttattttcaataagaagacattgaggaatctttgttaagaatccagattgatctcacaaaaccattccaatggaatatattctgatataaaaaattccttttaaaaattacttgaatgtaatttggagtaaagggtaatggctaagatcatagactcagaaggagttggataaacctcaatttggttcctggctctgctacttgttagttgtgtgcccctgggcaagttacttaacctctccttgtttcagttgcctcatcagttaaatggggagaaaaatagaatctacctactgatgtcatgaggactgaatgaaagaacatgaagtatttggcagggtgcattgcagaataacaatcacagcctcatgatagttactggcatcacatcagatcccagatgtatgttcaaacagtggactcatttttatctcagttgggtttgagaatgtgtcttaaccatgagtattgtgccacaatgttcttgagacattgattaggcaaaacagagaatggccagggagactggccagtcctctcctttgaacccagttcattgctcttgagttcaaagataaggagtaatctcgctcaaccattgttgaagtctctcctgctggtcttggatgaggaccaagtcctcatttatattcatgtatgcagaccacattataagtacacatatttatatcacagtcacctatttatgtcacgggagttaaactttgatgaccctttggtggggctggatcaagttggatggagataagatctaagttatacagggccttgagggcagactggctcttttagtatctttacattaatccatcgatgaggatattttctccacaaggacttgacaaggattttttcactcaaaaaacattttagacccaccaataataataagttaactcatttaatgatcacagcaacctgtcaggtagatactattatccccattttgaagatgaggaaactaaggcactgagaggtgaaataattttcccaaggccacacaactagtaaacgaattaaagcacggggccagattctgagagagtgtaaggcagcagcgttagaaccatctcttttggatctaactggtttttggcttgttgttcttcttgtggaggttttggtggatggaaggtgggagaagcatctcttaaggactcaccagatcattaaaaaaaggcagtggtgattcttctttggccttcacagcatcacagcagtgaagaaaattgtatagcagactctctgctcaccaggctagcaggcaagcatccctaggaaattgcaccccctgacttagaggactgccttgggaagggagaggtttagggaggagacagtgtgattccagggcaagaggctatgtgtacccttgggcattcttgtaggtatttgctgggtaattttaaggggactggcttagagaaatgtaatgaataaaggagggtcctctcatggtctgttaattccttgcacttttcttcttgtcagtcatctacaatattcagtacttaacaagtttgaagcttctatagaaaaagtttgaataccttgctttctgcatggaatttaggaaattcccttctccaagcactgcagtcaggaagcctcagcatgcaaggtaaaatacactaacttgatttgtaacattgactgtccttgttgtattccccacatttatagcacatcaatctkaaagcatagaaagttagaaaagaattatattcacaagcttggatttgaagttttagcctgtagaagagaaatacacagggaagtgtccgaggataagagcccctttccccctccctctggccacagagtggcatttccagctgcctgacaacctctgtagcctagtgttgaacactggtgctcaccagctgctgctggagagaagccggctggtgggggaggggtctgtgtggagagcagcctcctccccatgtcctgcagtccacacctacctctctcgacctgtaactgggcctcctccgtgcccagcttggcttggcagtattgctctgtgcaacagtctccaagaagtctctatgcctccccagctcctggggcacccgaaagggcagcgctggataagtctcagtaacacagagcagycctggggagagggccrctccatggcttttgggcaggctgacctggaatgagctggcaggcctgattccagtcctgagggacaggtacccacatcaggaaaccaccatcctaactggccccatttttggcagtccgaactgagaggctaagcagggaaaggagaatgtagaattccaccccaccttaagggaaggcaagtaggtggtggggcatggaggcgggaaggctggaagggccaggtggggaaggggataggcaggggacatcatgagcaccgggagctgtctgctgggcaaggtctgcccttacagatgctcatcctgtacctctttctacactcttgaggggcatacacatttcacagagaatggatgaaggaaaatattttctttctccagcagtaatttccttccatgacactagttaggaccaccccttctccctctccccacccctccctcaggctcttgccatcttgccagcaaggaaaatcctacgttcatacctggaatcatagaccagaccagacgaaaacactaaagccagtcacccgactgtgcacatattctccaccttcccacagcagccaccttcaacgcctctcctgggcgtacctgtgactgcatctgggagtactcctctctcctaggcctgcacctccaccccacagcgctttcctcttgtcacctcgttctgcccttggcctacctgcaccacccactctattaatggagcaggattgtgaaagaggggagggtttctgaaaataagtttgaacgtaaagtgacgaagagggaagagaagctttctgaatattggattaagactggctccaagaatattgatattcccataaggaagccgttagtttgcccactactttagattccatgaatatttcattggttgatttaagcgctgagattttaaagcacacacacacacacacacacacacacacacacacacacacacacacagacaaagcacctttytggcaacagggccatcgtgctgtcctcctatgccggggccttcgacatggctctggagtgatgccgtgtggcagctttgagacggaatagtctgtctacctcacaaagatctaaatttatatccaaccagggacatctagtgtggccagggcaaggtttccaggagaaaaacagtggtttaacatgcacttgtgactgactcaggaagtagatttcctcagctacccattgctgaggtgaccagttgtcaaattagcttattctctgctgcagacttcatcaaaggggcaaatcagttttaatcctagcatttggggctaagataaaaatcaaggctatgacttatactcctctgatcttggacaagaatagatgcttttattgttttgttttctttgtttgtttttgagatagagtctcaccctgtcacctaggctggagtgcagtgccgcgatctcggctcactgcactctccacctcccaggtttaagcaattctcctgcctcagcctcctgagtagctgggactacaggtgtgcaccacyatgcctggctaaactttgtattttttttttttagtagagatctggtttcaccatgttggccaggctggtctccaactcctgacctcaagtgatccacctgcctcagcctctcaaagtgctgggattataggtgtgaaccaccacagccggacaagaatagatgcatttaaaaggttctatctgtacacatttcctaattaataccaaaacaaagagtttttctaattcctttgatcacaatgccacaccactctgaaattctcttttcttcactgtgaaaaaatctcactgcatagaggtaaaagaggacagccattcaacgcaattcagaaaagtctcccaatcatactgaaatctattagtccaaatccttytcttccctaagccgaataatggcagtctttaggtgttctgtgtaaatgtcagtcataatgaatgcagctgcttttattagaggagagtttgatatagtggcaagtactgtttatttagagttaggagacctgtcttatagattcaacttcatcatggatactttgggcgagtcactaaactcatcaattgtttttacttctatagtcgctaattgaacattgttactattttgctcttaactttttggttgtaagtgaagatcattaaattccaacgggcatgaacaggaaaaatgaggtttttaatgtaaccaaaaagcccagggacagcttcaggctcagctaaatacaaggatcactgaaataccataagaatttgttatttttttcctggctctgttttctctgtgttggctttattttcaggcagactctacctttttggtggcaagatgactgctagtatctctgggcttatagcctatcttctcagcttgatgttcagtagggaaataattcctctttcccagatgctccagtaaaagtctttggtttgaatcttattggaccaacttgggttatgtgctcatcatccctgaactgatcacagtaaccaagaagtgtggcactctgaccaggcttaggtcacatgccctgctctgggttcaaacctacccaactacatgtaatgagggaggaggatgggggcatcctaaggaaaatcagagctctagtaccatgaattgagggcaagatgctgcatggtaaaggtgacggatgcccttttcaaggttaccaaatgtcctccatgtggctgaagagcatggtgaattctcattcctcctcgtacrtgatcatcagtgccattggacatactggatcacttctctagtcttgccatgttttctatacttgggattccaggtcccctacctgtctttgtcctttgctgactgctcctttgctggttctttttccctctctgtgactgtatcagtcagcgcccaatcagaagcgacactagtgatctgaacagaaacaaatacaatacaaagaattgttttatgctagcctattgttttgctaatgtattggttaagagaagaggtaaaaaaggactttgagggatatagaagtactaaatgcaaaaagcagctactactagggcctagggaaactgaaaaaaggaaggagcccttctcctcccttaggtgaaactcagacatctttttttttttttttttttttttttttgagatgaagtctggctctgtctcccaggctggagtgcagtggtgtgattttggctcactgcaatctccgcttcccgggttcaagcgattctcctgtctcagcctcctgagtagctgggaacacatgtgcctgccaccacgcccagctaatttttgtatttttagtagagatggggtttcactatattggccaggctggtctcaaactcctgaccttgtgatccacccacctaggcctcccaaagtgctgggattacaggcatgagccaccacwcccagcctcagacatcttttaatggggcgtggttgcctcaagaaagggaagattgccagtggtgaagagatgtcatagagggaatggggagaagctgcaactcgtccacaatggctcctgaggggagggctttccaccctgtgaacctagtcttcagtaaatagcaactctacctttgcagttgctcaggccaaaacagtgaagtaaacctttctttaatatttcatatttaacctgaaagcaaattgtattggttctacatacagaatatacccagaattggaccacatccactactacctycctggtccaacccatctttatctctcacctagacactggcattgtctcctgactagatttcctgctttggcacttttgtctcaacactttaatttcaatccgttctcctcctatgtgcatagtttctgaggacatgtcagatgcagtttctatctttgctcttttgtaggtaacatgtttttccccctctggattctttcaggacttttctttgcctttgatattctgcagtttgaaaataatatatatgtgtatgtgtagtttttttctggcatttgtccttcttactattctctgagcttcctggatctgtcgtttaatgtgtgacactaattttggggaaattaccagtcagtctttcaaatatgttttctgctcctttctctttcacttctctggatattttcattatgcatatgttacactttttgtagttgtcctacagttctttgatagtctgttcaggttttattttcagccatttttckgtttgctttgcagttcagaaatttctattgatatttcatcaagctcggggattctttcctcagccatgtctagtctactgttaagcccttcaaaggcattcttcatttcccttagtgtttttgatttctagcatttcttyttggtcgtttcttaaaactttcatctctctacatctctacattacctgtctgttcttgcatgtcatctgktttatccattagaacctttagcttattaatcataattgtattaaattcccagtctggtaattccaactctgccatatctgagtgtggtttttattcctgatctgtctctttagactgtgctttttgagttttcacttctttcctgccccagcaccagtttctatggcggtttctgctctggcaagttatgagtctctatattcrcctatcagtctctccaatttaaggggcaatggtttgctctgtggctccacttctcttagaagtaaaaagagttgttgatttttcaagttgttccactttttacttgttagtacagagtgacaacttccaagcttcccacatgctggactgggaaacagaaatcttctggcctttttattaccacaatctcagcatcagcaaggcagctaaagtgtccttgtaaaaatataagatagattacatcagtcttctgcttaaagccctccagtgatttccatctcactcagagtaaaagtccttattaataatggctttcaagtccctaatgatgtgtctccccattacgtctctgatctcatcttttttcttctgtgtcactccattctagccatgctggacttcttgctatttctcaaatgctccagccatataacttttcagatctttgcacctatgcttccctgtgcctagaagccacatgattcactctcccactctttcaattatttgcttgtatatcacctactcagggaagcattttcttataaccatatttggacatatatatttttaaagaattgttcaccgactttattttcttcatagcacttaccactcctggcattatatatatatagtttattatctatttcctaccaccctactgaaatacatagatataagctgcaagagagcaggatttttgtttattttgccactgatgcattcttaatgcctgtcatatagtaggcggggggaggaaaaatttatcctctatcttcttaaattcagtgattgggaatttgaaaattaaactgacaaaagacagattaacaagaggaaaggcatacagctttcattgatgttaatctttttatatacatgaaatttcacagaaaagaagtgaaaactcaaagaagcatttagacttggaggcttatgtacaaagggcaataaattgtggaggagtgactacacaaaggaaaggggatttgggcttctaggggtgataaattgtgggaaaatgactaggaaatatatggaagaaactaatggaagttaagggttattttagtaaggtttgtttatataaattcatcttggtgtgactccctgtctccagtgatgaatcagtctcttcttccttgtaccgtgaggtaccctcctcaaagggaaatttatgccctgcttttaggcagataaaggaaagatagagaacttttcttgcatctcttgtttatcaattgcctttagttcaaaataatccttatgccaaagtagcatgttttggagtggcatatctcgatctccttcatgggtgctcaaaaatacttttaaaaaatcaaagaattaatgtcttctttactaatatgtgtgagaatctgtgccagagcctgggatattttagagatggtataacacatagcccttgacctcaaggagtatacaatctagtaaggatgcttagacaggtacagacatctctacagtgcactgtagaatatgtacaacaagagaagttcttggcatcaagtgttactgagatttggaagttagagaaattgtatcaactttatgaaattaagaaagacttcacaaagaaagtggcatttgagtgaaatcttaattctctaggtggggagcaaactgagggctttcaaatggaggaaaatcacaagcrcaggcctagatgcaggaaagctcaggtactttttgaaaccaggtgagcagtccactgtggggtatgcctataggcatggatccagcaaaggacgatgagagggagaggcacaatgggactagattgtggttggtcttaaatgcgagcatgaraaaaagcacacttgaagttcaggaggtcttggagagcccgtgaggacttctgaagaaggaggctttgtaattagatagctcgatagtgtttacaggtgtagggaaaggagctaatgtgagagggggaagtgggtggatttaaaaaaaaaaaggaaacaattgaagtgaaaccaaatctggaaaaactgtgaagtatgagattaagaaccaggaaaacatggccaaaagggcctccacagatcctcaaaaaaggagagagctgaaaagtcctcttctctccctcagtccagcaccctcagataatttgacatcaactatttaaaaacgtatcttataaaatatggataaatgtaattattaagaatcagcaaaataagcaattctaaaaaggtggccctctgtgtcaatagtggctgggttgctggtcaaggccatcttgaccaaagtctaccctagagacatcattccatgtgcactcctctgaaacaggctctacctccagcaacattcagaaagcctgcagcttccaaatctccacatcttccccagagcctaccttctcactgtggaaaactgactcctggaagacctgatgaccttgctactgttctttgctagagttggtttgattttggcaaccttggccaggtactcagaatccaactgggaagtgagttgttgaatttccaaagtaaaagtcctaaagcatgattagaaatcagaaatagccaagtgggtggccagggctggggtcagtattgatggaataaacatggcctgttctgcaacagctagacctggtgagataattaggctggattggttcaccaagaattcattgtcttgactctaataagcatttattgagtgtgactattacaagggcctggtctaggaccttgtaggggtagaggttgaggccaaagacaaataaaatgtgattcctgttccccaaaagggtttagagtcaagtaggggtcagatatgtgtaaataacacaagagaagcaataaaagggacagggaagaagtgaaaaataagataattgggccaagggctgatagtatccagtctctcaattttaaactgaaatactgagttaagaggacacttctaatttcaacagaaacaacgaggttgatgtggaaatcctacctgggattttaggcaggtaagtagaaaaaatggaatgggctgtttttaaattctgttttaagggtaagcagccaaattatctatggagatattaaaccttcatgttattattctattttatctgcatgatattgttgtttctctagctgttctgcrtggatagaaaataggcccaggtaatcctcaattcccagtgtagttaaacttttgtaggcatcttcccttgtttttattttttattttttttaaataagagaattgtagagctggttgggtcataagtcattactcttatggatgttatagctttatccaataatatatgaattgaattgtggaaaataatgaggatttgagattttacatctatctatcatctatctatccccatatatattggtttatataacatataaaattaacttagaagtatgtatagataaaaaatggttatagtatgggagcctctggaagcagagtgatggtggagagggtgtacaagagtgtcttcgaaattagatttgagtacaatcttggcttagtcactcagcagctgtatgacttaataccagcccctaactctcttaggttccacttcttcaccctaataattgggatgataagattatctactttatatagggttcagatgcgaaacatccagcacaayggaaggcccatagcaaacagcgagcactttgtaaatactatcatttgttctactcctttgtgaatgaaacatggttgttcatgggcttgagagaagttcagtatggttagtgtatattggtgaaagaagacgcaaaggtttggttcctctctcccccacttcctccttgttctctttttgccttctgccatcacctgccctctccatcagaatcttgggtgcattgtgttagggttggggaggcactgaagtgggagtctggttctagatttaggtagaacactggttctagttttaactctgccactaatgaactgtaaaactctgggcaagtattttaacttctctggatctgcgtactctcatctgtataataaggttggggtacatgctgtctaatgcagtgattttcaaactgtggatcaccacccatactttacatagtgaccaagtgtgtatgcatgtgatgtgtgcccatacgcaaacacgagctgtcacattcatgaatgtaacaaaaagataagttttatgacacaatagttaacactactatatatgctatatcctgatattttctatcatgccctgttctgttctctaatacataatttaaaaattgcatgttgtggcctggttaattgatttcaagaccagccatgagttggaattgaagttcaaacaactggtcttagcacctccccactctaatgtatgggattttaatgcatagaggagcttcccaagggctgcagtctccaaggccttgagtcaaataccctttatgaatactttatagaaagtagatttcactcagaagtaacatgctttggagatattaccatattgatcctcttagttctccagagaggctggtgacacgttataattggtaggtaaatgcctgaaatctgcagcagctgtccatatgttggagtcctatggcagctactgcagatttggggcaagctttctgactatataatcctctgtgtctgctctccctgtagaagatcagaatcatgttaggattattagctttgtagtctaggtatgtgggtctccttttagtgatttatttttagtgccaagaaataaaagttgtgaaaaattggacaagctcaggtccattgctgccttctctgtaatttgagctttatattgaccatagcatctatggcactaaatgagacttattcgtttatatatttgtctgcccatcattaattccttaaaagcaaggactgatgctcattcagctatttatctctgcatcttatcaaaggacctagcatgtggtatatattcaataaatatttgtcagattggtttaggtgaatttgtgaaacgacttcagacaggagctccttctggatcttgttctatgccagctagaccagactccaggaaaacaaggctgtcattattagaacagattagaacaggtgctacttgggccatgttacttttagagtaagtcctttgggagttttggaaagaagcaaagtttcttttaagtgtctttttttttttttgctttggttctctttttccattaatgataagcctttcttccactgaggtcccaggacccctctgctctatcttctacctttcaaaggatttgataaactagtttatcctatgatgaatgcattatcccttccaggggaatttaataaaaacaagaagtgtcaattcaaatgagtgatagacctttagtgttggatcttcagtttgcaggcagcctgataatagaggtattttggggatagggctgggagaacaggaaaggtatttccattttgctgaagctccacaacaaaaacaattgtcctctctgcttgcctgtaaaactgtcccagcttatatttgtgatacaaatgtagaatcataaaagcaggaaacctatgtctgtttggcatactttggtcctaggttatatgttgccrtgcattttcttccaaatatttcatgtgtgttcatcttctcccttcagggatgcagactccattagttgatgcggattgctcagggagcatgtttgtctgaaatgaccagagttcaaagaagccagtgcaggaatcagctggctcccttatggctcagttctccctagtgtggacttgcactgtcatgagaaaagttcaaaggacccaggccacttgactgtttctcctaaggtcacaccatatctgtggtaggagcccacagtctagctcgatctcaggttcccaacgccccaaataaggctttgttttggtttttgttaccatgcatcccagtctgaaatatggactaacttacctaccacaagatgtctggtgactatgtggtgattttcttagcctgaaacctgatttacacatgatcacatgctggctctgcctgtaacctcaccaagggctggttctctaactggctttgctgcccaaaggagaaagaatgaatctctatttcataaccttgttgaagactgtagctcttgagaagtcgagataactttgttctttgatcagacatttactacatgctggctaagtgccaggcactatggaaaggctggagattcaaatatacatgggtcagtctctgtcttcaagaagctaacagtctggtgaggaagaacatagagctgtgatatattctgatgtatgtcatgcactatctgtgtggattagatgctataggagtcttgaagtgggaaaaattagtttcatttggagaggagttgggagctgtcttcatagatgaggtgtgacatctaggctgggcttgaacataagcatggagttagaggagggaggaagatatttgcatgagaaaaaacacagagttacgaacatgtccgacatgtctggaaaatgtagaggctgagtgtggccacagcattgaatgagcagattgggggaaagataaaaaattcagtaaaaaattgtaggtagaaccagattgtgaaaggtgatcattgtcaaaggaagttatttgaattgataagatgtatacatgagaaaaataaacattgttgctattttatatgtatggtaaaggtagacatcaaaagagaacagtatttattattactattagttccttaaaagcattagtagttatttgttttgctcctattagcatcattctgttttgggaaatgcaagtatttctaatttttactcagggcactttaatcctggagtttctgtttggtttcatctggtattattgaaggaggaaaatgtgatacagacatgaaatgatttagcaaaggtcacatgaggaagtggcagaaatgaaatatgagccgaggacttccaattctatgccctgcacttgtcaaacacagcagaacccaggctctttaattctgggaaagcttgtggttttatgtccacaggatgctcctgaacatcaagcatggaatcctgtgtcaaaatgccaatgggtcaaatgaatgagattggaaacagcaagatgtgaggatttgccaatgacaaacatccctacaactagagggcagactcaatggtgctcacagagcatgggtgcagagagcccagtgctgtatgtctcccttgcacagccatgcacagatggctgaagagttggcttagacacggtcgttctccttcttttctctgctatgctgcctcttagcttaggcaggatttctgtctcctcagtggcctttagtttctccactaagagtgagaaaaatattttcttggtattttcagaatatataacaatagttgttttgatgttgatgatattctgagactcctagaaattaaataatttgcctcaagtcatatagttagtcagtggaagagctaaatttggatcccagtctgtgtaacatcaaggtttgtcaaaactattatccttttctgcaacataaaggtgcttccaggtcagaatttcctttgtttctaagcccaacttatctggggctctgcctacacactacatagcatcagtagctccttggaggagtgtgagtgtggtgggggtagtggtgggactgtggctactctttcacgttggagagatgttcagatttgaaagtaagctagctcagatgtttctcaattataataatcataaagtaatcataaagtaattataataataccttacatatggtttgagcttaatggtttccaaagcattttatttgcataatctaatttatcactccttggcttggtggatagagtgagtattatccttaagagaactgaagaacaggttgaaggttgaatagaaatttagaagaactgaatagatttgaaatatttttaattacaatccacaatagaaaatatattttctgttgtgattcaggataataccctctagtgtgatctattttatcctattctatttatttcagtaaagaatgttggtcacaatccaataaattgattatataatatgctaaccaattatgactttcagtttgaaaaacactggataagaaaacctattaaagtttctcctactgcaatgtgattatgattccatgatatggtggagtgtggaatcatgaattgttcatgccatatcaaaacaagtttgaactttgaagtagagtgagggcagtgatctcttgctctttcctactctgcacccctgaatctgattttcaagggcaatcactttcaacccctgatatttgcctccctctttctaagtaatgctcttagactgttagtttttaatatgtcagtttcaaacattagcgaatgagtttttgtacagcaacctccactcattaaagtattgaattgacagatgtcaagatggcagctctattgctcctgaagctattgaggaacatggcttatgtgtgctggatttatgaataccaatctcctgaacaaaacagacctcacccccagtcacaggcaatgctgcttcccttctcaggagcaaaatcaatagcatgagagcagagaagaatacatattctttgcaggcaggaagataccacaaagagagtgagaggaggaaagggctggattggatgtgttctattctcccaaatttaccatccacaaaacccagtcttcttctggagagaagaaagtgagaagtgacaagtggctcagaaggctctgctaggttatgtcatccacaaggaaactcacagaatgggagacacacttgggcatgcatccatctaagttctaaataaacagttcaggagaaaatcctacttctctggactcaaagcaggaaatatgactttgaatagctggttaaaggaagcagaaacatcttagttagakaatttttttggattattggcctggctcaatattgctgtttaattgtgttttaccattcaaaaccttattaccagatgctcaggtctgggaaacccaattgttaacatcattgcacaaaattaaattaaatttccaaagccacataaatattaagacaaagctatgggtatgtctgaacataaattagactgaaacttagactgaatactctaagaatgctaggcttctaaatgtcattacttaattcaccgatcatctaaggtggggagtggagtctgttcagcaccaccagctgattttggcattgttgttaagacccagactagaaatcaaatctacagcagacaatgaattagggctatgtgttaggcttttatctgaagccacagaccaaatcttggaatcattcttaaaggtctgactgcaatgggaggccacacacaacacataggcacaatagcattagggccttccaagttaagcatgagaaatttagtcatttaattatatggcctgtgcaaaagatgagattgccaacagaacagtattctgttgcattttcctgacccttggggattacatttgcaacttgcaccagcaaaacttttggcatttaattctattaaaatcaaagagccaaatttctgcctcctgttacatgagcacagttcttactgacgtcaatgcaagctgtgcatgcataactgagggcagattttggcctgggctatagacatgtgagagctggcacaccatactcacatcagaactctgtcccacccggccttctgataacacggcctcctcattcgtcactctctctgcacacactgggagctgggccttaacccaaaacayaaattagaagcatcatctaatacagaaatctaagccggatgcaaatttaatgtagatgtggcacaagcaacctgagtggggaaccatctaactgtaaatttcagcaacagattatgggtcagctccccttgaagcaaactcagtgtcatttctgatttatgcatttaattaggtaggtgaaggaggcttgcacccacttccatcttactctttgatttttacacttgagaatgcactgcctacactaaagtcaggccccaaaatgctaaaaatattactgtgcctggtacagggcctgggtcagaagatacagcctggtgaatacttattggatgaatggatttttgtaaggcaagagatgatgataataatagttcacagtacacattgctaactatatgtcaggtgctgcctcatatatattacttaatccttatcacaccctatcaggtaggtttactcttttataaatcaggaaactataaagaagttaagaaacttaacagctgcctgtaaccccagcactttgggaggccgaggcaggcgaatcacctaaggtcaggagttcgagactagactgaccgacactgagaaaccccatctctgataaaaatacaaaattagccggacatggtggcgcatgcctctaatcccagctactcgggaggctgaggcagcagaatcgcttgaacccgggaggtggaggttgcagtgagcsaagatcatgccactgcactccagcctggcaacaagtgaaactctgtttcaaaaaaaaaaaaaaagaaaagaaaaaaagaaaagaaacttaacagctagaggatggtgactaggatgtgcatccaggcagtcttactccagaggtcaggctattattcactctgctgaagtgcctctcagttaaaatataggtattgtttattaccaattagttattagtcaaataatatttattgacagctgggcaatcccactgagaaagacagaaatatcttaccagttagaaaaaaataaataaattttggtgtgaatttttttttttttcattagagatgggtggtgcgatcatagctcactgcagcctcaaactcctgggctctagcgatcctcccgctccatcttcctgagtagatggaagtataggcatgagctattatgcctggctctgcagtgaatttgtaggacaaattttacatgtatcacatttaaacaaattttaaggttacactgactattcaactaatgtttctgtagtcactgttttatttataaattaaatatattcaggctatgacaatgttaggaggattattacaacttttttaaattttattattattatactttaagttttaaggtacatgtgcacaacgtgcaggtttgttacatatgtatacatgtgccatgttggtgtgctgcacccattaactcattatttagcattaggtatatctccaatgctatacaactgtttttaatatgggtagtagccatttttttctttatgggagcatgtcagaagctatagttgagtttaataaatatatatgatttgatatataaatattcacttttacatagaggtttgaggggcacacctacaaccagaagatgaaacctttgtccttgcccaaaattctacaggcaaaaatgggaagagaatggtcctggtctcagaagttacctggtctgtgtggaggagtttttgagctttggtttggtttttgtattgccgagtgttcctttacgaggcctgtggctcagcaacaggcctgtttctcattctgggcacctcgttgtctttggtgtcagttggaagttccttactttgtcctcctacactatgaacccagatttcctctttagcttattgctcatgaagtcatctcagagatgtcccttgttgtggtggacaaatgatgagccacgggaatctaggaagaggtcgaatttgactgcttcacatgaaatggggaagtcgagaaagggagcctaagaagaaaggaaagtagggaatactattttagcaatattgaatttgagatgatggtaactcattcaagttrtttggagagtgaggcatgggacttgtccacggtcacattactcaagagtaacatgagtgaggacatgaatccaggacacttaaccatcaaaacctttatactaaacatcccaaagcatggcatagggccagaaacattccctcaaccttttttttttaactagacagaaagagatttggacttacatctattacaatcctatcccattgccaggacctgtgacacatatatgttccatgtggtcttgcctgtacttagaaatattgtgttgctttggctttcattattacctctttcaccaatgtgtctaagtcccagttagattatataaagtcttcacgtgttatcttctacttctttagaatctctcacagagaacattttctgttctcatttaaaaaatttcagaggcaatctgtagaccttcattttgggcttctacgaccacctaatgcagaatttatcttcacagtgttccttagtgatggtcagcagcttctctgtacatgtttctggggacagcatatttactacctcacaaggcatctactacatcattaccaaagacttctaattattaaaatataaataaattataaagatgaaaaactcgactcttaagaactttgagtcactagctctacattttggagcagggatttcaatctggagccccaagggggatctttttcaaaactgtattttgcttgacccacaaggtgtttttaaaaataatgagccaacattgaagaaattgagagttttcacacaaaaaaaaggtttttgtggctctttttggaaaagtatggtcttgaaatactgcacccacatttccacagggcaacaattaactggaccttagtgggggttgcctccttgagatgaagaacaagttctccaggtctcaacagtcctccactgcctagagatttgcatatcctagggctaatacttgccgttcattatcatgcatgtactatcattttttcaacatctggttagctcccttatgttacctttctgaatcctataggcaattatttacatttctgagccctagaattgggcagcacagactaaatatgcatctttccctacagaaaagactgttcaaataattgaagtccactgtgtctttggtcctctttttgtaaggtaataagtttcagttccttctagtgccatcactgctctgcacatccctttaattgtctaggcctcttttaaaacatagtactcagaattgaacacagtggtggagagwtggaatcacagactcccattattcttttcaactctaaagttaccgttttttcttttttttctttttcttttcagagtccgataaaccttaaatgttgagtagatcgggtggatattttctgttttgtctgcacagtgtccttttcctcggggcatagcactctcctcttctctgggacctgctcctctccaggtcccactctgggaattgctaactgcttgttagcaattctctctccttagccacagagattcatcccagcatagacacctatcacaaacctaaacaatcagattttcttttctgtgatttttctaaccagagcttataattttggtttctaagatggtgaggatagaaatctgaagctggccgggcacggtggctcacatctgtaatcccagcgctttgggtggccaaggtgggtggattgcttgaggtcaggcattcaagacaagcctgaccaacatgatgaaacccagtctctcctaaaaatacaaaaattagccaggtgtggtggcgggcgcctgtagtcccagctactccagaggctgaggcaggagaatcacctgaacccaggatttggaagttgcagtgagccgagatcgcrccattgcactccagcctgggcgacagagcgagactcttacctccaaaaaaaaaaaaaaagaagaagaaatctgaagctacaggtggctggcttccatgctttctggaaatgctggtcagaagtggcacaaggaaaaataccaggtagcatcgttgaaacctctggagccactcacacctaaggctgtcctttccacattttggttatttcagccagtgtattactattactttcccttgtttttctccctccttcttttttctctcccttcattcttatttctttttactttttttctaatattaatttaccttgcttttctctaactggcaactaagtgagaaaatcctacctagcrtattgggtgacgcagaggtgmtatgactgcargaaaagaacaaatagttacctggctgaatgagaaactcttcccctaatagagttgatcatgaattttctatgatttctagtctattccaattagttcaggaacatgtattttgggaaacaattatttaataatgtgacttcaactatgtcttcttaaattcttgtatccaaagactagtaaattaaccataagtaatggttcaattaaactgactagaattttgggctatgtggcaagtcatgccatagtctcattgtagataataattgccttaatctttgcatattcagaattctgcctcaaacttattccaaagatctataaaactctgccaggtggtttatcacacacattttgggcaagtggtttttagcttatctttgggcctggagacatatatttaaatgatcttagtgaagaaaagggcaggactgttttgtgtgctctgatctctacttctgtggagtgtatttatgatctcctgagtttgacttctagcccagatctggcttccagctggggaggggagaccatggtgaacagctcgatctaccagctctccttcataatgcttccctctcctatacacagaaaaggattctgaggccagaaaaaaaccattgcaaggagaatttgcctaagggttggtcttaatcacagtctatcatactttctggacaagttggctaacccatggtttaatttactgggtggataacaaccttttggggttgtgagtagcttactgtccctctcttagcttgtggtaactgaacaaaggcttgcaacattttcctgggtctgagtcgtgatgtgtccctctgtgtgtatgtatgtattaggaggtcatcatgttctttcaataataaatgagaacagcctgctcttggtttggaatgtttacacccttttgcaatttaattagaaataaggattttaagataaatgagtgtgtgggtttacatggataattgtactcaaatcaaaggagaggtgacatttgtgaaaattttcacatttagaaatatgtaagtacataaaaagttgtgaggttttgtttaccctgtaaaaataagatacctttctagatattttcttccttttcccacatctctgaaattggaacattttcctatttacttttacagttccatgtattttatttcaaaaataagaaaaacaataagtttataggtcaaactaaattaaacacagtatattattttgttcctaagcaaaaggaaaaagtgactttagatatggaaaggcaccagaagaaaaaacatttcaatttcctaatatatgctatttctaaaagcttttttcactgtaattgaattttaaaagaaaagttaaacctctaaatatgtgtacatatttatatatatacatttatatataatttatttatacatttatatataatttatttatatatatttgtatacatataaaactagttaacttagttcacatcctatttatgaactctttactgtttgcaataacacttgtaatttaggcctatttatttcaaatctttttgaacagtaacatgaattcagaaaatttctagctaagattagaggtacattctgcagtcrtgcaataagtcaaatayaaccagttcctactggcattaacttttgataatgattcaataccaatttcccctaacctatgtatgtgataacataaatctaaaccatggttactgttgacgtcatggctgacatgtcattgagaagtcatccggaggcagcttatttaaaatattgactaatatgtgctttactttgctaatagccttagcaaattggttttcctttacagtatattagtacccagaaggttgctaggttagcattaactgcgtactgtcaaccttactagtttccaaatgttaaccataaaatatgttttattttataacatatataggcatatacaatatattaataagtatatataatagaatatattaatatttataatagaataatatgatatatattatacaattatatgaaagaaatagaaaaccactggtaagactgactccagaagttaaaagcacagaagtagcagcatgaaagcaaattcccagacttaatggaaaagctttttctaacagctttgttatctcttaaaagttagtggcttctgataaatatctccctattttttagttatcacgtttaacaattagtctctattattttgaatggtaattacaaagaaacaagaaatgacaggtctttgctataaaatctgttattactacaaaattgatctaggtgaagttgtcctgtccctctttgtccccatttccgtccctcaggccacttttttgcaaaccccaaatttacatcctcacttctgtccaaactgatgaaacatttaaaaaatctacagaaacttaaaatgggagcaaacaagctagtaatgtactactgcccccttggcacttgtaagaccttttctctcttgctaaagtaattttccagtaagaaatggggaagcctttctcaaggttatgtcagtgcaaatggttgtagaagagcccagagactccattttattctttgtaatagtcagagaagagtgattgcttccttgactttgtggccttgaccattccttaagtggctgagtaaaaaacaacaacatgtctcagaggagagctttctaatggttttcctgtggtccattgcccctggggtgcttccatcacagcgagtcaccrtggtgatgccacagtttgagccttcctctgaaccttttgcaatagtgacactgatatcatttataaaattaatgcaccctggttcagtggcatagttgctaagaaaagacaatctcttatggaatacatgagtgaaaaaacaatgaacatagactaacacaaagaataacttctgatgtaagttttttattaagcctggaatagctcttaagaaataagcaggattgacacttctcatttaatgtaggaatgacctactaagcaatgaacaaatcttgcaagttttgtcatttactatcctccagacatctgattcaagacttgatagctgtctgcaccaccctttcagaatctaacaaacaatttgtttgaaagcattggaatgaggtggtgatgccccaaacaaggtttttgcccatatatctttaaacttaaatgatattagtgaagtctatgtttgtcatttggtgtagtacaagtagctataacatagctgtgaagatagggattgagttacttgtattctcagcatttctgatgtacttattctatctaaaactttcttcattgggaatggctaatgcaattgatatgatcaatttttaatcagcttttcttagaaaaagatttattttgttgggttataccaaataagcttgtatgtattattcttaatagtatccttacctgtgtcttgctccacccttgaacaactagatactgcatctggtcaaactttcaagtaaacaacaatcactaggtatgtttcagatggtggggcaagatattaggacaacagtgcaatctctccatatgaaaggcaagtaagtgctatggaaggtgtgcatggcaagactaagttgtttttctttcaaacaacttacttcacatctaattgaaacatgacctattattggatcttccaagttacttgtgtgtcttgattatcaagaggacttccaacatttaatttgtgtgaagaaaaggggtacaacatgattaggtgcctgtagagtccatgtcgtaggtttttcttccagttaataaaaccggttcatgtcctgagtatgatgcacccagtaatctgtatagttaaacactggrgaataaacattgtattacttgactattgctgctgaaataaattgctgcaaatttcgtggtttaaaatgacacaaatatattaccttgtaattctgcaggttagaagtttggggtaggtctcacttttacactgggtcaaaataaaggtgtcagagggctatgttccttctggagactctaggagagaatcaattttttgcctactccaccatccagacactgttgacatcccttggcttgtgaacctcatccatcatcaaagcccatggtgactggctgaatctttcttatatttcatcactctgacagtgatgaagatgaggcatcttctgccactcacttccactttagagaaccctttgattacagtgaactcacctggataatacaggatagcttccctattttaagatcagctgatcagtaatcttaatcccatttacaatcttaattctcatgtaacataatttctttccataatttgmcatgtarcacaacatatttacagattccagtgattaggaagtagacatctttgggtggccattcttctktctcccacattaacacagaaaaattttaagagatggttaattagaatcataaaaaaatttaaaacatagccatagaggtaggtgtgaaatttcctgattctcactataaaactcagaacttcttagttaatatgttcattattccagtgtgrcattgaccttgttcttgtgccatagctccaatattgtgaagtgaattctggagaaagcagtgtctgttctttgtaaggattaggcagaggattggctcttgccattctggaaagtcaagttccatgctcagaaggcagatgttgcagaatgcctcctcagattaggaatagttcatcagtggcaatttttgtgggagaagaacatagcaggaaacaagtagtacaaataagcattaagctctgttttatttcttctacaagtgtatcatgaaataaacatctctacagaagtsggatgaaaaaactcagcatcaatgtcaggacataaggaagtcacttgaaagttttatttcatgtacattttttcattaggttaatctctggaaactatgaagaacttccttaagttcatcttggttatggtcattctgtggtatggttccatatctttaccctctatgacatactgtgacactgctgggggaattgactggccaatatcaaactcttctgtgtacactaagcagcaatttttgaaaagtcatcaggaaaaaaataaatagccttgaaaaaatttaaacagtacaaaagagtgtataatatgaatatttctctgaatttagactcctatattctgtttcagagaaacattttcctgcatattatttcagaggcatcaattttctgtgcattcttttagaatatttctatgctatacatgcagatatataaatatattctgttctttacacaaatgaaagtatgttatatacactattatgttatcttccttttgttcacttaactatattttcatggtatccacatatcagtagatatagatcactttttcgtcttgctaatggctgtggtagtcatttaagcacagactgtgttcaggatggagtccacattcaaatgcttagctgcgttccctgatgctgtctagttttttctgtaggagctaatccaagacagaagatcagttgctgttaatattcacaaaatactgttttcttacatttcccctctctttggaaagactttatattcttggcttattaaagcaatggatagccatgtgacctgcttagaccaatgcaatgtgtcactttcaaggcaaaagttgcaagggccatctcatggttttccatatctcttttcctctaccatagaactgtttatgtcycagatgggtactactccttcagatggatgatgaaatgaagataatacggaacagagctataatctacccataatgggtgggcagcataagtgagaataaaacgtagttatcttaagtaactgctattggaaggttacttataaccacagaatgatctagcccatcctacctaatacagggagttacctaaggaacagtaaaacagtgtgaaaatccttaataaaacagtttttcctgttgtgaaatggctttctagtggccttgtctttcctaattccttcctcccaagttcattaaataaaatgacaaaaaacccgttaataaataacataacccaatactcattgacatctgtagcattttcattctatttaatcaattctttcaacccttccaaggctattttgtcctcagatcaaagtaatcaatgcatttgtgctttaaaagcaaacaaaagcacatttggggtcaatgtcttcttctggtaatcatggggttattgggtccagatttcccctcccattataaacgactaaaacaactgaacaaagtacatgagacaactgttttttggagtttggaaaacaggcagcacaggactgtgattcttgaaagtagagaaacacgtgaagtgagccatagattgaccaacttttgcctggagacactttccacttctggttcaaagaaggattctcaagccaagtagggcagaattgctgagttgcagagatagagactggagttcacacaattagaaaaaattagattggaggttacacaattagaaaaaactattctaaaattcatatggaacarcaacaacaacaacaaaaagcctgaatagcctttttacagggacagagtgagactctgtctcaaaaaaaaccaaaaaaacaaaaacaaaacaccaaggtgacttcagttatcaagatagagtattggagaggagggagttgcacaggaaatgaggttcaaaaatatcacagggattctcttgagtctgttgttgaatacttgaacatgcatgcaaaggaataaatcttacaagaccagtaaaaaaatgataaactgaagggttcccagagctcacaaaaggctggaagatactcagattttaagcagttagactggagaattcttgttaagaacttggggcatcttggattaatttgtgtatatagtgaaagataagcacccmatttcattcttctgtgtgtggctagccagttatcccagcaccatttattgaataaggagtcccttctccattgcttgtttttgtcagccttgtcaaaaatcagtcagatggttataagtgtacagcttcatttctgaattttctgttctgttccattggtctgtgtgtctgtttttgtaccaataccatgctgttttggttattattgccttatagaatagtttgaagtcagctagtgtgatgcttctggctctgttctttttgcttagtattgctttggctattcaggcttttttttttcttccatatgaattttagaatagtttttttctaattatgtgaagaatgacattgctagtttgacaaaaatagcactaaatccgtaaattgctatgggcagtatggccattttaatgatattgtttcttccaatccaggagcttggaatatttttctatttatttgtgtcatctctgatttctttcagcagtgttttgtagttttccttgtagagatctttcatttcctttgttagccatattcctaggtattttattttctttgtggctatgtaaatgggattgtgtgcttgatttgactctcagcctaatcactattggtgtatagaaatgctactaatttatgtgcattgattttgtatcctgaaatcttgctaaaatcattcatcagggctagcagcctttttgtgtagtctttagggttttctaaatagagaatcgtatcatcagtgaagaaagatagtttggctttgtaagacctcaaactataaaaatcctagaagaaaagctacaaaatgcccctcttgacattggtcttggcgagaaatttttggctaagtccctaaaggcaattgcaaccaaaaattgacaagtgagacctaattaaactaaagagcttctgcacagcaaaagaaactatcaatagaataaacagacaacctacagaacgagagaaagtatttgcaaactatgcatccaacaaaggtttaatatccagaatctatagggaatttaaacaaatcaacaagcaaaaataaataaccccattaaaaaaagggcaaaagacatgaacagacactgctccaaagaagacatacaagtggtcaacaaatacataaaaaatgcttcatgtcactaatcattagagaaatacaaatcaaaacaacaatgagataccatctcacagcagtcagaatgactgttactaaaaagtaaaaaagtaacagatgctagtagggctgtggacaaaagggaactcttctacaccttggtgggaatgtaaattaattcagccactgtggaaagcagtttggagatttcttaaagaacataaaacagaactaccatttgacccaacaatctcattactgggtatatacctaaaggaaaatagatcattataccaaaaagacacctgcacttgtatgttcatcactgtgttattcacaatagcaaagacatggaatcaagcttaatgcccatcaatgatggaatggaagaaaatctagtacatatacatcatggaatactacacagccataagaaagaatgaaatcgtgtcttttgcagcaacatggatggagctggagaccataatcctaaacaaattaatgcaggaatagaaagctaaataccataggttctcacttataagtggaagctaaacattgagcccaatgaacataagcagggatacagtagacattgtggactactagaggagggaggggagggagggaggcatgggatgaaaaagtacctgttgggtactatgctcacaacctgagtgcaatatacccatgtaacaaacctgcacatgtaccaacatatctaaagtaaaagttgaaatttaaaaaaaattatataaaaagcagaaaagctaccagaataaaaaagtaaaaatcrgaagaaaaacaaactaaaaacccctaaaaaccttggggcatttggtcaagacctcagagaagtcatgccttcatagtggggctaaactatccttatagtaaaggctactcaacagactttataaagcttaaaaacaatcttcaaaaagatcaagctgatcttccagtaatgtaattgtttaccagaacaaagtgtagcactctttaaagaaagactacgaaatccatcattcaaaacataaaattaaccaaatgtggcattccgtaaaattactaatcatgtgaaaacaggaaaatatgattccatatccagtaaaataaatcagtcggtagaaacatactcaaaatgacagaggtgaaagaattagcaaacaacaatttaaaaacagctattgtaaatatgcataattatttaaagaaaaatatgaacactgaggataaaaatgacatatagagaaaaacataaatcataaattctaattctgaaaaataaaatatcttgaatgaaaaatcactgcatggaattaatagccaattagacaatgtagaagaaaaaatggggaacttgaaaacataaatgaaaactatccaaaatgaagtatatataggaaaaaaagtaaaaaaaaaaataatgaatagagtctcaatgacaatgatatggtttggctctgtgttcccacccaagtctcatatcaaattgtcatcctcacatgttgggggagtgacctcgtgggaaatgattgaatcatgggggtggatttctcccttgctgttctcatgatagtgagtgagttcttatgagatcattttgtttaaaagtgtaacactgtcccccttcaccctctccctcctgctgccatggaatatgtgccttgcttccccatcatcttctgccatgatcataagtgtcctgaggcttcctcagccatgtggaactgtgaatcaattagaccttttttttaaaaataaattactcagtctcaggtagttctttayagcagtgtgaaaacggactaatacaatggcttttggaaaaatttcaagcagtctgacatatatatatgttagatgaaatataatatgtataattagagtttattatatctaatatataattagagaatatgtaatgtatatttaattagagtttcagaagaatggagggggacagaaaaatatatgcaggaatatgactttgctgggcatggtgaatcacacctataatcccagcactttgggagaccgaggctggcagattgcttgagcctggaaatttgagaacagcctgggcaatatggcaaaaccccgtttctacaaaaaacaaaacaaacaaacaaaaaaaaacaacaaaaaaaacacattagctgggcatggtgacgtgtgcctgtagtcccagctacttgggaggctgaggcaggaagatcgcctgagccagggaggttgagactgccatgagttgtgatcatgccactgcactccagcctgggtgacagagtgagaacctgtctcaaaaacaacgacaaataaaccccaaaaacaaaaaataagaaaaagaaatatggctgaaatttttcaaatttgatgaaaactataagctcacatatttgagaagtacaaggcatttcaagcaggctaaacacaaagacaaatatactaagacacatcataacaaaatttgtaaaaactgatagtataaagaaaattttaaaaagcagataggggtggggaacatgttatgaacagagcaacaaagataagaattatcatcgttttctcacctgagcctatttaaaccagaagacaatgtaacaccatctttaaagtactgaaactaaagcaaacagaacagaacaagaaaattaaattaacaaaaaccttctgttaaactagaatgccatatcaaatgaacatttcttttaaaagtggagtttaaataatggcttttcaaagaaaagttgaaagaacttgtatttatgagatctgaactacaagaaatgttataagacattcttgaggaagaaattagagctacatacagacataaagaaccctacaaattgtaaatatatgaataaataaaaaattttacttaagatttttttcaaaagataactgaagcaaaaacggcagtcgttttatagtttataatacatacagataaaaatatataatagtacaaagaatgggaaggagaaaatggaagaatatcactgtaagtaatataatagcactgaaggtagactgagataagctaaaatgtatattttaaaatttaaagcaacacatacacacacacacacacacacacacacacacacacacacataccccaaaaatgaaaaaacagagggagagctaataagccagagataaaacccaattataaaaacatttaatttaatccaaagaaggcagaaaaaaggaacaaaaaaagaattaatggggcaaattgaaaacaactattaagatagttaattcaaacatagccatatcaataatcataataagtgtatactttctaaacacttcaattaaagggccaacattattagaatggattaaaaaaaagaaataatcattcctgttatagttttgtgttgtctataaaatgtgtacagtaaatacaaagtcacagataggttcaaaataaaaggatggaaaaaatataccattcaaacactaatcaaatgaaagctgtaattcatatattaatatcagaaaaaaggacttttcagaacaaggtatattgccagggattatgatacagaaaaagcatttgtaaaaaatatagccctcattcatgattaaaactctcaacaaattaggaatacaagtccagtttggtgtacttctgatttacagggaatctgcaaaaacttacagtgaatatcatacttaatggggaacaattgaatactttccatttaggactgtgaacaagtcaaggatgtttgtttttataacttctgttcgacactcgttgtcttaactggttgtgataattttatgtgtcagtttaactaggcaaacggtacctagataactggtgaaacaaaatttctgtgaaacatctgtgaagatgtttctaaaagagattagcatttgcatcagtagacggggtaaagatgaccctgaccaatgtgagtaggcatcatccaatctgttgagggcctgaataaaacaaaaaggcagaggaagtgaatttgctctctctgctttagcttggcatatccaatttttccgggcttctgacattggcactcctggttctcagaccttcaaacttgaactgggatttataccatcagccttccagttctctggtctttgaactcagactgaaacttacactattgggttctctcctacttggtaggtgatgattggactttataaatatcagtttttttcctttaaaaggtgctattaaaacattaaaattaaatccatagattaaaatactcagaatacctaggtcagacaaagtacttgcaactagaatatataaggaacacttaaaacttgataaaaagaataaaaaggacctccccaaaatggcaaaatatttcatatcatttttcagaagacataagtggccaataagcatgtacaaatatgttcaataaaattattcatcgggaaaagcaattaaaaccacaatgagattctgctacatctttactaagactaaatttgcaaaaaaaaaaaaaaaaaaaaagaccacattaagtgttggcaaaaatgtggagcaactggaactttcatrcactgttggtgggaatgtgaaatggtacaccagtttggaaaaaagtttggcagtttcattaagtggcaaattatgatatatccatgaaatggaacaccactttgcaataaaagaaatgaactactactaacatatgcaacagctttaaggaatttcaaaagcattatgccaagtaaaagaagctagccaagtaaaagaaactagatacaaaagagtgcatactgtagcatttcatttataagaatttcaagaacagatacatctaatttataacaacataaagcagatcattggccgtctgaaacaaggggtgaagagaatgactacaaaggaacatgagaaagctttttagggtgatgaaaatagtctacatttttattaatgtattgattacactgatgtgtgcatatatatatgtcaaaacttattgaattatgtacttcaaatgggcattttagtttatgaaaatcattgttcaataaaattgattaaaatatttttaaaaacattaataaaacattttgagccctttacatttcagcctgtgtttacaaattaaaaaaagcaatgtaagaggtgcaacaacaggtcataacacaatgcttctgggtatcagactgagtgccattctcaccaggtattttgcaggaagctgatgaatttctacaacagtttcaaaagttagggatagcctgatccttctgcaaactgtgaaggattacatgaaggaccagaacttataccatcagctctcttgcttccaaggccttcagacttgaactggaactgcaaaatcagctctcctgggcctggasttaacttagcctccataattgtgtaagccattctttattatacatttctgtctatchtcatcatcatcatcatcatcatcatcatcatcaccatctatatcttctactgattcagtttctctggagaaccctaactaatacagatgttccttcacttgtttttctcactcatattccatagctttttggataaacttgttacttgcttatatttttctaaattgttaataattttttctttattttttctttcatttttcttttttcaacacaagcacaaagctttttcctatttctttcttaaattgtttcaaagagaagagtctacctctccttctcttttgccttcctctgatcttccctccctgcttctcacttgaggcatttatcaaaatggaaatagaaatttcatttctgagaagagaaagcacagcacgatatgaatagaagttggaagatctgagttcccatcctagttcttctgtgaaccagttgtgttatcttggtccagttggccaatctctcattccacaaatttttctgattctggtctcaatttccttatttgtaaaatgagagagttgaattctatgatctcttctgtttcttacaattattccctgaaagactctagaagcctcataattattctcttctcatttatatactacatcctctgttagatagcagtttgaatcttggtggaagctcaagagggggaagaaaatgcattttaggtatctgtctaggactcagttaaaggcagacagctgaagcgagcatgctgtccgaggagtcatgactgtaaccactttcttcaaagagcatcatccatccacatgcaccacaaarggctctcatacatgccatctcaacatgaatgagggatggaggcttattaccacaattttatggatgactatttcagagagacaacaagatactccctgtgtttgtctgttttgcattgctgtaaaagaatatctgagactgggtaatttataaagaaaaaatgtttaattggctcacagttctgcagaaggtacaagaagcatagtgccagcatctacttctggtgaggcctcaggatgcttacaatcatggtggaaggtaaatggggagctggcacatcatatagtgagagagggagcaagagagaggaggcggtgtcagactcctttaaacaacagctcctttaaacagctcccatgggaactaacagagagggaacccactagttaccatggggagggcaccaagccattcataagggatctgccccatgacccaagcacctcccaccaggctccacctccaacactggggatcaaatttcaacgtggatttggaagggacacacatccaaaccacatcactcctggatcccccggaccttaacccacgtctgcctctgcagtctttcccttcaccacatggatttgacttaagtcaaaacctcagtggagcaatctcttgggctttcaatcattttgactcaacccttgtttcactgcagcctaggctcatcactgacaataacattttgacaaattatacgacttaaaaaacgaggtgtagacttatttatccatagcattcttcatgggatgaatctgtttcaaggaaattttgactttgaatcaaattttaggcatgcctaggactaaaaggaggctcagcagaaatgcgatgacaaagcccatggattacagaaagcctctccggcttgtgcatatctctggtagagtttgcccattccagactggccttgctgttcaggcattttcctccattccatcaagattattcttattcagtgtttacatctctatcgagctcctagtgtatattaagcattgaggaagagatcacagtraatacgttggcctctggagtccaaataccttgctgctaatcttgctttgttagttgtatattaatgggcaagatattcacaatattcactagactagttttaacatcagtaaaactgrgagaattaaaatatatacctcctaagagtaatgagagtgccaataaaacactgagtgcaatatttggcacttggaaagtcttcaataactgttagcaaatatcatcattatcactggtggagagggacttgcaaatgttaatagagcaggacacaaaataaagagtcattatttctgaccaggctaacgggaatggcttcccataaagagagacacttgaactgcactggaggatgagtgggagtttgatagccaggaactgtaaaagggcattctggttggatgggtcagcaatacagtccccatatgatctcatccaggaggattgtgatcacccagactttttaaaaataaagagcctgaagctcacaatgggagcaaccacagtggaaggacaattaagctgcagcctgttcacgggcttcctgccaaacctaaacagatttctcagaccagtgactcatcaacaagacaaactacatgtacctgttgcatcaatccggtgctttctgtttatttttatcttgtccctgtgacccctctttgctccattgttaatacccactgcactgggcgaggctggctttgagatgcagtaagcttcattttggctttttttttcacttgtgcattttccagccaaaagagagtgagttccttaccactccatcttcctttcttctttctagagaaatgttcactatgccatgaagtagctgtcacttatgcactccattccttggtgtggaagacatttccctcttgctgggataaataagtggaattgatatttactgagtcttgcactaggcacttgaagactctcatttagtccccacaacagttctcggaaggaggtattactagcccattttatggatgagactaaaagtggtggagtaaacttggccaaagtcaactagcctaaatgtgagatagtttgcttggtgactttctctagtggctcttgttctcatcacaggacaacatgttctcaagacacccacaattgggaagagcaactgtgtaggggaagtagagcccccaaaccatttcctccttcttttaattcagatctcccccaagctcaagtccatggttgttgagtgtctcaccacaaatgctgctaagattcccttttctgtcctcggagtcaaatgaagagagtttaattctttttttttttttttgtgacaggccttcatatacctgaagaaagtttaatttgaatacctcattctcatcatttaccatcctccccactcccccatcccctgccttaatatttcctttttaaggcaaaacagtttccatttagaagcaaagaaaggtaagtgactgctaagatttgaatgtttgtgcccctccaaaatccatgttgaaacttaactcccaatgcaatactattcaaaggtggggcctttaggaggtgattgggttataagtgctctgcccttatgaatgatatcagtgcccttataaaagagcttgagggaacgaattctgttcttccatcccttctgccatatgaggacatagtgttttttccttcttggggaccacatcaacaaggcaccatcttggaagcaaagagcaagcccttaccatacaccaaaactataagaaagtccagaactacgagaaataagtttctgttgttttcaaattatccagtctgtagtaatttgttggaccagtgggaatgcactaagacagtggccatgtgtctatctctggaaatctgattggttctcaaagatcctatgtaggtgaatcacattcatttgtgtggatagtttttctcagctatggtcactgccattttcagctttatttctcttaaaaatgtctgttatctggttctccaagtttctgttctgtgatttccagcatgaatgaaacttaggaaaactcttaaaaattagtaaaatttcaatgtgaccaatttaacctacaattcctatctgttctattcctaccatatttatagagactcttccttgaccttccgcaaaaaccaggaaaaaatttccgttagtaaaatgagctttttcattaaaaagccagcactgcaatggtatttccccctttcttttcctgcctgccttgctttgactggtgggattaattgggtcttgatcaatctgctaaaagacagcaaatcgggaatggcaggtggaaggaggaaagcatgaatattaattagctaagattccaaacagaagccttttaattatattaaaatgcacaggcctgcaggcagtgagatagttcctgctgtaaatctgtcgacaggccattacctcagcaacgtcaatgtcttttaataaatgaatatatacatttcaagtgggggagagaaaaatactttggtgtttataaatattaaaaaggaaactatcaatgtgaggagatacccatgacagctcttctcaggcaggaggtgtttagggaaggcagtgagtcatcccaggctgtgaaaccaaagcctgtggctaatatggggactgatgcaattaaaaacaggtgactgtgaggcagggcaagatagaggctcagcttttctgtaggtcagtgagtcaggcatttaagaaagttgcattgacttttcacctcactttggaatcactcaccaccggaaacaaggcagtcaggygcctttcattggtactcctcacatgaagacagcatttaaaggtcgaagggtgactggccaccttcgacatggcagaaggaaaccataaaatgagaagagctcagaattccagggcaataaagaaaggaaattttgaaagcaggtttcagtagttctagagttgccttgaaaatatccatggaagaggacctcaggaagaaccagaaagttaatgagaaggaaaggccagtcatggattactagactcaaagggctcgaatagaacttagtgaccaactgtctaacccccttcattttagagagcttgaaacaggccaaggtgggaggattggtagggaaattctatttatctgcttacctacatatctacctacctacttacctattcgtctgttcatgtactacttctttctataaagcctttgaggcctcccacaggtctctgactcacaatctggagaactttctaggacttcttgccaccctcctaactttaaataagaatacatttgaggaaattaggaatacctcatgctgtgtagaccttatgtaatcatgaaagcatccacgtcccaagccagaatagttcaacccaaatgcgaagagttgataaagtccattctgataaactggaatgtccagaaggamttcagtgcctttatggagttacctgtaattgtggaaagcttgacaggtaaaaaaaaaaaaaaaaacaaacaaacttaccagaagacaccctgaaactttcaggcctttaagtttgacttggtgggtttgaaaggaagctaaacagaaaataatgcctttaagtgcagttaaaaataatactatgcatttgaaatccaatcaagggtccttattttgaaaagttgtttttgttttttaaggctaaactcaggaaccatctgcatttagcatattcstgaacatgagcccacatgtgtgtggaagtgtgcatgtaaagtgttggtgaaaacaaatcatatcttggtcccatcaggctgtgagactgcattcccagaatggacatacatctcacaaaaatctgccttaggctcaataggaattcaggagagaatgtggatgactttgcaagaggtacctcttactggaaaagcaacttaaagggcacttaaaaaaaaacagtagaaaagtactactgctatatcagaatgaggtaaatgttcacatatgtcgttctagagagtggagaccaggcagacttaaaatgtctgagatgtacttaacttacaatcatgactataagacatactaatataatttatttggtaacatggaggaaaatgaggaagatggtaaaagtcacacagagtatggtaaatatccttgcagttcaattcaatatggcctcaataccttccatgtgcyagacatgacattagaatctaattttgcaaaatagagtaagacataatcctgctctttatcagccaactcttctcacaagtcacatgaacaggtaacttcaataccatggtcaagtgcagtagtagtagtgtgcacagggaataaatgagcacagaagagctacactcggccctccctgtagggctgcgggagactcctggagactacagagwctgagaatgagttgaataggtgaggaggtggggctggtggaagtgaaggaggcagggaggggagagagcatgacctttagacctaacagcaataccaaaggtatgcttttcccagtgtatatcatttttctcattagggaaatgcctattttgctgttcttgcttcagatgaaggtccagggtcatctaaactagaaatttctccgtccatgccatgaaggcaggaaaaactaataaaacataatattatatatgcattgtcccgagttgctcatttttggaagacttggctgctggtaatccccaggaagtagaaacaacatgactgcctatcacctgtccacataattaatcacaactaatcaatagaagccaagatatggtgatttatcacaaaccctccacatttgctggtagtattttttccattttttcctttttaatattcttaaccagacagtgaagttgaaagttggtagttggctgggagctatagtaaaaagaaacccttggcattgttcctttggttgttatcaagtactcttctacttgactgtgtttcttctataaggtgagcaaggagcagagaagttagcactgagaagcttggactgggaaaagctgtaccttatctttggctcaatttgtttaatcagggacagtccttggggcaaagtcttagaagttggctcaggtcagaattttggctgcacagagaggggacaagaagaaggtcatccytttgtagcattaccagttttgtcttactctagacaaggaacaaagtgggaataagaaaagttacatttctattcttcctccttgtccaactctgcctcttgcttctcccctctccactcctcactcctgctagtcttggatccacatacaaggctggttagagactgtaccatgctggagatttgtttctggtcaaaaatgttcaccctcttagcttctcagaactaccagaaaattcttgaactaccccaattcagttgggtttggaaacctgacttactggaagtctttctaatgtcatccaggttctgacagttaagccacactttcagagagcagaattattgaggtagaaatagatttggggaacttccagtgatacatggctatcaccaacattgaagatcctgtcatctctgtgtcagtgttggatcagtagcagagacatttcatagttaacacttataaaagatggaatgtgcagatctttctgattaaggtgaactcatgttttttgggtaagctaatgacataaaagtttcaagaagacatgcaaactttgtgataattgagctggttgcagagtaagtgtgagtgactgaaaagcaagggagttaggggagaagaagactgcttggtggggaaagactgatttagtggactggtcttgcaaccagcctctcctggaattgtttctaaggcttaaggacctgccaaatgtaataggccaagtgagttgggcacagtagcgtgtgcttgtagtctcagctactcgggagactgaagcaggaggatcacctgagcccaggggtttaaggccatcctgggtaacatagcaagactccttttctaaataaaaaaataaaataaaaaagagaaatagacctagtggttctcgtaagactttctctttgcaagagcttgaaagtagagggatgctctgaggattgatgtaagaaagcataacactggagtgtgtgtgtgtgtgtgtgtgtgtcagaaagagagacagagacagagagagagagagagagagtagggcggtgtagtggattaaagataactacaacttttattttccttttattttttccattcttcccattaagaagcaaagtttattttccttcctcttggacttcgccaatataatgtagcagaggtgatgctatgtaacttttgagtccaagtcttcagaaatatacagcttctgctttcacctttcatggaatgctccttcttggaactcagcaaccaccctgtgaggaagcccaagaaaccacatggtgagacccattagcaggaaaccaagtctcctagcagcaccccacattaactgtcagccacagtgaatgaggccattttgatcttccagttatcccactgccctacctacaccacatgaagcagaagaaatgctcagtcaacccaaggatcatgagaaataagaagttgtgttttaaaccactcagttttgaggtagcttgttatataataacagataatcaaaacctctggaattcccatattttggagggaatagtttaactgacgtgcagctttggcaagggaatggcaggacagccaccagcttattacacctgtggtaagaggcaggcaccctcacaaggcaacaagggaaggggggaaagtgatgaccaccaagtggtggcagatagtccttatactagaatgcatgaggaatgccttcgagaaacttctagaaagatttggggggactttgatgagactgaaggtgagatttagagtgcacaataatgagaaggcatgaacgagagaaccccagcctgtgctggttttcatgttagtattgtaatcctgatattatctagggcctccctctccttgatatctgataagtcttgcacatcctgtggaagactccccaacattactatgaatttctaggggaactatttccctcttgttagacctagatccaaactctggcttcctccatctgtggaaagtctcactgtttcttttatgctgtttctgtttcacttaaaatcaacctgaacacagcatttaaacattccttttatttttacaatttctactcataaaagcaatctttgtgactaacagactaataagaaatttgagggtataagaagaacattcaaacttgtagcaatatggacttcaaattgaaattgagactatcctcattcttcaaatgcctttggttgccatgctgggggagatttttccaagtgacaactctgtaagtactgcctgagcctcattctatgtcatggttcctctctctcccttccatctttcagtagaaaaaactcctttcattttctcatatagaacagctatctgcttattatgctcaacgctttacccttcatcctaagcagcttgtctaggtatgttagtccataaagacagttgtcccccaagagacaattaygatgtcagttgttatagtaataaaatcagtcttccactctctgccctactcaaatcactgcagtttcctgcaagggtgcccagtgctgttctctctctctctgagtgttaggcaagaggaaaagcaaacataataaacctgggcttcacctgactcattgccatgcctcttgcttcttgctcttagatgggggagatgatgtcctggtaggtgccctttagggtgttgtttctttctaactcttccactttgtgtagacgaagagggaagagtttctgcaacttccaacacagaggatctgccaccccacatcagccttctctgctagactgggggacatcagaggatccttgtggcctttggcaaacgaggggcatgggtgggcatttctcaggatcaaacacagcaacttcttagcttgacatgaaggatccacttttattgtgctggattcatcaggcaaggtttcccctgatacaccagataaatatgacttcttggtatgcctgtttacatgtgcgcttgcttctctgtgggcagggtgggctgaatctctagcctagctttcaggggcacctcaaccaaaccaaatcaaacagttttgttcttggtgagctattgagtaggctgatgagttctagcatctttttgtgaagtctgcacatgtctgaggtataactgctgctatatctgataccagcmttttcccactttccctacctccactttctcctcccaatttcccaagaagtctgttctctaatctggcatggaaagaactattcccttggatggtagctaaatttcccctaattcttccactggtcacatttaaaatgcccagagactgtcagattatctctggtttctgaaagtaagactgtgtcaagcttgagcctctcttcacaggttaagcctgattcatcaccagctcaacattatttgtcttctttgggagatgctgacacttgggaaatttctgacagaaatgatctgtgctcacaacttttgagtttaatttttttaaacaatttttctaagtgactaccagagatagtgagtggtctctttcatttggaaattcatttattcattcattaaatttttatttttttgccatgactctgtagtagacattcgaggaagtcaaatatgaataagacatggggctccttgttaaaagagcttatgattcagtagaagaaataaaacaattatacctaccccatttagcaaagttgatgcccctgtggaaatgggagctgtaactgaatcagagacataaggattacttatggcatagtccctgtagaattacatccccacttttgtaccttggcaaatggctcttctcttccctccagattctctgaagttgtgaactgcagtgttccttcagcctcattcatacaattgattgccaccctgttaggtgaccgtgatgttttagaccctgtaatatatcaaagaactcccaccagtctctactttccctctctgtcttctcatccatggccatttccttgaagaattttcaagctgctctaaaacttaccttttaacattcagcatggcactcttgcatttctttgcagcactgtcgttttcagactttttttttcagtcattatggcttaaaactgttgtctataaacacatggcatatagcagatctgatgtaataagccatatacgctgcagagtgcactcagctcaggctagcatggcagcacctcctctggcagggagaatttgcaatatggtgccatgacaatgtccaagaatgctggaatctggctgctctgttggctttcatgggccagccctcaggtcatgggaaagagagctatatgagtagcacattttaatgaatttttttcttaaattttcaaagaaaacagcattataacaactcaacactacaaggaagatgatgttaaaataaatatgcaaaaataggatagtgacctcaaataaaacaatattatagaatactattatttttggctctgatgattgggaaagacttcctgaaggaggaaggctttggtatgacactatcttcttttaatgaataatgagactgttcagcatggggtaaagaagtttttttctaggtaaataaggtgtgattaagagagcagaagtctggttctttcttatggagctgcatttgctcctcataaaatgttacagccttggtcgggcgcggtggcttacgcctgtaatcccagcactttgggaggccctggcgggcggatcatgaggtcaggagatcgagaccatcctggctaacacgatgaaaccccgtctctactaaaaaaatacaaaaaaaacaaaataaaataaaattagtcgggcgtgatggcgggcgcctgtagtcccagctactcgggaggctgagacaggagaatagcgtgaatctgggaggcggagcttgcagtgagccgagttcgcgccactgcactccagcctggcctacagaaggagactccgtctcaaaaaaaaaaagttacagccttaaaattttaggagcattatacaggacactttaaggaagcaagctgtggctgtaggttttctttcttgaaatataggaactatctcttacttatatttatattcctagaccctagtacggttgctggcaaacggcacaatcataacttgctgatggattggctgaatgaatagatgaatcaatcactcagttgagcaagactcttctggtttctgaccagttccatatcttcatttcaagcatttatctgtgaagtttaaagtgcctatactcacaattggtgcatttgcttgtgtagttcatcacttcagaaggtgtgatacattaggatataatgtratacattaggatacattaggatataattacaaagaagttaaacaggaatgtcaaaaagatgttcaggatttctttcagtaccttaggatagtggctcctaatgaggttaatggaaaaatgccggtatgactaccttagaatcacctggagaacattaaaaaaaatccagatttctgggccccacttccactgtaattttgaaaatttcctcagacaattctgatatacagacaggtttgaaaaacactaccttaatctttaaaatacaactgaaatttcaaaattcctagttactggaaattttctagaaatcaatcatgtggcagaggcccattgagggtacagccaggtcgcttttgagagggaagtctgggtccctctgaaagttacacttcttgctgcaggtattcacctggttcttccactaacagtgtatttcttgcgtgttcaatctctctgaatggttttaggtaatcctctactttggaattttgaaccagttctagttttaggtgatcttccctgttcttctcctgagtagaggtgggctgctaggatctgtattttacgatgaagctccatgcttatggaggttataaaagctgcccagtgacctgaagctcttgaggccatgtttgcctcactataccctgttgcctctccttggtgactgctgactgagggcttacaataactctgaagctgtttatggattcctctactccttgcaacaaccctgaaaagaaaatggtctctggagtcctccattttgtggatagagtgttccaagagttgaccatctccaggagattgctgctatgtaaatgctggggccattgccggctgtggaaaagactgctttgtatccactaaacccattgctgtttctcatgaccacacagctaccctatgtttcccagcatcccttgcagttaggtgtgaccatgtgacagagttgtggccagtggaatatgggcaaaactggtatgttccacttccaagtttagcactttaagaagctccagtgtaatcctttgggcttgttctcttttgccatctgtaggctgaatgcagcaaaggaaaaagccctagaagatgacagtaccacatggaaggagagctactgtggagggagctgggtctctgaatgattgtgtggaccctcagtagatgatcttgtggggagaaaaccttttactgagttaagacactgaggtttcggggtgatttgctacagcagagagcttcccctgactaataaagctgccctccccttgttccacacctctgcaactgtaatgacaatttttgatctgagatccctaagccagtgggcaaaaggaagaggtctttcacaggagctactaggagagtgacatggcacagggcttgaggttggaagaaatgaattcaagtctcactttctgcctaattgtgtgacataaactaaatgcttgtcccgccagagattcttcccctgtgaaatgggaataatatgagataacatatgtaaaggtatctggcaatggtgctcaatacaactttttatttttactttttaatttgtttttattaaacttctttttgtagagatggggtctcattatgttgcccaggctgtgctgtacttgaactcctgggctcaagcaattctcctgccttggcctcctgaagtgctaggattacaggcatgagccactatgcgtgtcttgaataaaactatttaaacctaaagagtctttagaaatgcagcaaaagtttagcagaggtgaaagatattgtatcgaagaagaacaggttgtagcttcaaatagcaagtccagaaagccagtggatgccaccacagccatattgtgcagagtcctatgtgacaggctctatagtgagggcttaacctgcattatcacatttgacccaatgacaactctgtgaggtatgtgttatcatctccacactggagatgaggaaattaaggctcatcaagtgtaagtttgtaggtggataattttttgagatgtttcttcctacttctgtcttgcttcaggataaagatagatagaatgtaagttccatgaggagagagctattgtctgtctttttctccctgtatgccaagcatctatcacagggcctggcacagagtatatgctcactgcatatgttttgggctgaatgattggttaatatctcagaagaataaaagagctatttgttcctttggttttgcccccacactctattcctctcacctgcaggtagaatggctaagcctatatattcagatttctagacccctgtgtccctagtgttatttgatgactgttttagagccaaaaagaagtttccattcagaagaaaccctccaccaagactggtgctttgatttaaaggggcagaactggcactgagagataggagggtagaagcaagtccattgaaggctggcagctctgcccagctccctgacagacctctgtgcgggaacagagcttctgatggagtagatgtgagagccattggtttggtggacattgaatgccaggcatggccaactcatttcaacttgtcctggacttttctggttttaaaacccaaagtcctgcatcatggaaacccctttagtcctgggtaaaccatgacagttggccactctactgccatatctgaggatttatagtgaaagagcatcatgccaagcttggcattcaaatggaccctgcattcaaatgggctgcattcaattggactgcatttgaatggttctgcattcaaatggaccctgagggctccgacattaagaactcaagtggtccaagatagactgaagagcagaagcccttcctcatagtctggtgactatactctcctgagatttttgaactttcctatggagggcagctcatcccctgatccccttacacatgatagagaatacatttcttgctttcttttggagatccagagctagatttaatttgacttgaagaaagaggcaatgtgatgtttcttatacctaaggaggtgagcaaattcatatcagcttcaaaagacttgcccaaaggcccacagctaaataatagaactaccatttgaatacaggtgtgtctggcccaaatgttggtttctttcccttaggaggcatagtggycccaaacactgaatgagaagtaatttgtccattcaagtggacttttagatatgcaatcattcacaattctgtcttttgttgtttcatctgattgatttgatttacatacggcaccaatttcccttccctccagtccaaatttcttagtctcacattcaagacttccctggtttcagccctaacctatcttctctcaggtctacagtccatgatttcttccacataccttttccttctccaagcaaggctacttcatgcttccccyaccatgtgtgtctactttgccatgccttctccctrgaatgccctttcctccaacctaccttatcaagacgctgccatccttcaaatcctcgtgaagccttccttgatccttcccttttatgattccctgcagttaaaagcaccttgcatccagttattgccacaatagcttgtcttgcttattggattccaagttacttgtgggcaggaagcagaccatgcattttattttgtagcctccaaaataacctagcatagcaatctgcacagaatagacactttataaatatttgttgaaatgcagtggaagaattaaggagaaaaggaagtctttagattttccctagagtgtgactcagaactgggacaaaagctaatttggtgaagtgcatttgaggaaaatcaggtgggaaaaaaagagacgatagaaatagaggtgagagagtgcagccagcagcccatttctgagtgtccctgaaagtctcagaacgagccagaaactgatctctctgacctttatccaagtgttggaacacattgccctgtggtttgaaagcccactctgaagctctccttccagcctttagtaaactaagggaggcagacaattaggggaatgctttggatctgatctcctggctgccgatttcaccgagatccacactttgaagtactggggatgtcagttacataaggttatatggcattttcttctatgctggggcaaggggaggaggagggaaggagagcacctattagctcaagagagctactgcacaagctggtgctcagcaagagcccagtgctgccttcccttgccacacacacatctcttccaaatgtgccctgacgttgcattctccatcccaaacaggacacctggagaaaaatgattttgtggctagctctgttttcaataccgtggaacgtttggcagcatggtgatccatcaccagctttttttttttaaaccttcaagatggccacttgccttttttatcagcaagtttgcatgcgttttgctacttactgtctcttgaggccaagtttttttccccctgattttttgccatctgtgccatatttttaaagagtttttctcctctaatcccttctttgatgccaggagaagcaataccaatggactggagatattccaaagcttaatgtacagggaccagctaaaaacctcaacaacattacttcacacacattctctctctttcgtttttgcaagtgggcatgtgataggggccacaagagaagataaataaagctcacaattcaacagggctggcaggctacctgctcttgaaacataaatcaggaggcccagggtcctggctgctgcctacagtcccagggagacatgattttcccagtcatttggaatggccaaacctacaagtcacaatttcaaggaagacaggttaaaacctcacattttccttgggctttgacctttggctaaagtcaggagctatgaactctgtgaagcttaagactcatctactttttaagaaaacttagaagactgctttaacccacacagttactcaatgggacaggaacagtgaggaacacaagcaagggccaagccaattagaaatcgattaattaattaaaaagaaraaaacaactccagaagtcagcatcccatcctctagagatcctggcttactttgtgcctagagaacacttggtaactattgtccatttttaggtcttgttaaatcaaaaataaagcaatccatcttcagtaagtttgtagaaatatattcatctcatgcaaaaaaaaaaaatctgtagaactcttcttttccccttaaattatgtggtagaaagaagctgagactaagaaacagcaacatccaccaaatagctctgtggtcttggaaaaatcatttaaagtctctggatcttcacttttcaattgataaattacatgagttggaaaaatgacataattctatattaggggcatacatttcatggagttcccttagagatgggggttgaattggtatggaaaatagggtctgaacactggaacccaaatttgataagactaaggaaatttatgcattttttcttttctttttatccctacwtttgtacatttctacttcttgcttccaactgggagaatcaattctatgaccacatgaaagtctcattaagcacaatatctcaggccactttggtagttcataaaagacaaccaaagttttagttctgtctacatgaggctaccaggccaaactggaactgaatgttctaatttgtattgaattatttgccaagcaaatatggagctcttttgatgtaaacaggagtgttcacaccaacacagtttctagcagcaggcaggcaagccagatccaacttggattctgcctgtttccagtagctcttcattaatgttgatgtaagtcagtccagcttgctcctgtgggatgttcaaggttcaccatcattggttttcagtgtattgtatcaaagtccaaggctgtgggacacacgacttcctgaacaaggctgggatctgagaaaaggctctgtctgggcgctagggtgtatagaatgcttataccatgacataaagatggccataatcctggaattatattctgagaattaatcaatatttactgagaacctatcctaggtgctgggatagcactgatgactttctggatgtagtatttgtctgtttcaagttttcccatagtgtctagattttcaatcaattttatcaagcaaaccggccactgttccaccttcatgaagaacagtaactgagatggtttcctttctagcatttgtggcaactccttacaaggacatgctgaggtcactgttgaacaagcaactgatatctgactttggttagggggtctagatgtcagtatttctctttacacagatccccaggattctcttcccaactgaagtgggaatggtaaacagatcagttaaaaaatttaaaagacacaaatataaaatgaaacgagtactctttagtattttatagcactcatactgaatgttcactggctctctggcacatgtgggcactgactgacagttggtgttaatgatagcacatccatttcttgggaactgggcttcctagaggcctcctgtgtaagggctgcctggggctcaagaactggccctgacattttggcagtggtgctgaagaaaagctgtctctcactccgaggtttttcagtccataaaccagcagcaatttggttgtggaagaccccggcagaaataacaagagaaaattgaaaacacataagcacatttgccgggtttaatagccctgctccctctctctacctccggtaccttaggcataaattgctgacctctatttaattttctgaactgcaagaattatgggcccaaagttcagtgaattggaagaggtaagcttttatgcctctgagccagcttccccataagcattaaatctacaaataaaagcaacatttctatttatacttcctggggtttgtgtattagggaagccaagcacgtccctgcagctctgcgaaggtgactgcatggtcaaatctgcgtccaggtaatgtgacggagctttcccatctgggccagaggaaacaaccaaagcagatggacaagagatattaaaaataacacacgcaatttcattcggaaaaaggcacctgcttaaacagtgtttgtttgattctccttctggccgtgggtaacaaatgtgtgccaggggaagtcttacgtgtatacccttcctgggtactcacctttaatcacaacaagggccaaaaggcaacccagcttcctgtccccacatggtgtgggtcaacgcagcatcactctctcacttcagacgcagtaagggtgtgattctggctgcttccaggcatgcctgacactcacacagccacgtcatgtcatgttttttatgtggcctgacctgactttgttctcggctccctagatccacctctgcctctgtgtctgtctccatctctgatgctcagcatcagtataatcactcaattccacacacacctattgcccaccccctgtgggcaccctgcactaggcttccagcccccctgctcactctagatttgcccatggcaatcttgtgggtggttcacagtgaggcacatcaggattgttgaggtttctatttgattcctctctgcagcccctctgcccttcctcagggtcattctttgcttgctttgtaactcaaaactttcccttattcctgtcaaagctttggttttctactcctttcctcctgcctgtgtcctgcaaaacaaattctgaacatggtgtaggtaagcctatgagcctccctcttcaggggtgaactttgcacattgccagaggctttctggaaataacacctcaatccaaaggtgtgagtcaaatgctaagaattttaggcaccttggcagagtgttgaagaaattattttgggagcaagtacatggttctgcttgaaatattccctgtgactctgtccatagattctgccttggcaaaggactaggtcacggtcaccatcaccataagccattttattgaagctgagcccatagtgctggacaactgaaaggtcttcagctactgctgagatactaagataagtgttttgtttcttcagwccactccttctggatctatttgttattcaactgtagtgctatttaaattacttttctttgaccaactagctggaggcgtgaggatgttttgtacctcctccctgccacttctacagccatggttataccttcataaacactcgtcacctaaaacttccttctacatggattctgcctttgcctacagcagcatttctcaatcttgaatgtacctatcacttgaagagcttgtgaaaatgcaaattctaattcagtggaatggccctcgattcagcaattttaacaagctgtcaggtgatgctgatggtgctgctctctggaccacactttgaacagaaagggtgtaggcctatgctgtccaacagagcagccactagctgcacgtagctattgagttcttgaaatgctgctagtctgaacagagacttgccatagtgtaaaatacacaccagattttgcagacttagctcatataaaagaatgtaaactgtctcattaatcatttttaaatgttgacttacattttgaaatgataatattttggatatacgtatttgattatacaaaatttttatataatgtttctttttacttcttctaaaatatggctaatagaaaatttaaaattatacaaagggctattattggatagcactgatctggagaaccgtacccacaggaagcagtagggaaaagtagcttctgtcagaattatcccatgttctggtacctcctagcatttctcccctgtcaccccaggatattggattcccattagctccctgcctgtttttcccaggttctaatgttagagtctgagttgactgctaatttctctgtgttctctgggcccagcctactcatttgcttctattccagtcccgacctctctcagtatccatgatccctagcttcccacagcctcagcaagacagtggttaaaatctgcccagattggaagagcaattctggctgcctagaacaggaaaagaatgtattgtaaggatcggctgcctttagataagaaagaggtaagaaaataatgaacacatttgaagatatttgataacagatagaataggctcacaactaggagggaatcatcttacttaggactgctaactacaagaaagccaatatcaacatgagctgtggctagtctgaatggagtatatgagaggtgtgtgcttgagagaagcaatgcggtttatctctgagagtagcaagagttccagattcagagcagctttctcatgggtatccatttctaatggagactcctaaaactttgtgaatcatgtgcttcaactgsaagtatatagagatgtggctttgagggtatcttgaaagaagaatgaaggagaagaaggaaggttagcaaacagttggaatagagatgcttagctctgggaatcctgcttgaactacactcaaatcctttgcaaattgctgaatgtcttgcttactggggtgcgagaggatccaaaattactcttccctgtgttccttgtgctctggttcccatcaggaattagagaaccagagggagactgtagaaggttgcaatacaaaatagagagtgccaaggaatgaatcagcttcctacagggtggagaaaaatgggaagaaggaagcaaaaaagaggtaaaggataaaagaataaaatgtgcgaaaaaagtgtcctcagaagaaaggggcatgttctcttctcctttcttccttactgctggctagaatgtggatgtgatagctggagctctagtagccatgttgcactatgaggcagaagcatgtgttgaggttgtagagcaaaaagagagagggaacccagattccagatgactgggaagcccatacccaccctattttgctaacctctagatttcatttttgtaagagcggaattcgacattttctaccacactttctctactacttttttgagtttgctctcctttacagataactaactgtactgataacagagacataatacacaaatagcttgggaaaaggagtgtggtatcctaaaggcacatgagagatgtgggggccagtattctggtttcttctgagaacaggtttttacaggagacagagagcagaagagcaccaggccagaggaagagggtgcagtgtggggccagagaagcagtatctatagcagctatgagaatgggatcagacagacctagttctaatctcagtgatatcacatactagccatgtgggcttggaaaagtttgtgtcacttctctagtcctctagttttctcatgtatatattggggctaagagtaattcttgcctttcatatttttgtgaggaatatatgagatattgcacaaatagtgcttatcatagggcctggcacagagtaagtgctgcctgtcactatgtgaaagtgaaggcaggaagccccaggacatgttccactttgtgccttcgattttgatggtctcctgacaagtgcttttttagaacctcacactgtaacgtcccagggaaaacatacatggctagcatctcagctgatggaagaagctctctgctcctcactaattaagctaattaacaattcatcataacagcctgtgaggttyccctgtcacgggtatctctactcacaaaaaaataatagcatcattagcaacaacctgtcaggaaaacaaggcacaaagttctgaggaagcagtcacttacttgctttgtctaatgttttcttttctctctctggaaagaataacaagttgtgagaaagatattttgccctggactgctaggtagggtccgggtgagcttttctgcactcctcttaaaagtaatgactgtaataataatgacagtaacaacattgatgctgaacaacatgttcagttatctgttgccacaatcatgctacataacaatcttatacaaaacctcactgacacacatggtatagatttatttagctcatgagtctgtggggtttaggtgatctgacttggctgaccttggctagactagttcatgcttccaaggttggctgcaggttggctgagtggctctgctgatctaggttagatttggttacctgtgtgggcattggctagatctagaaaggcctcaactgggatgaccaggagcactccttactgttccatggttctcattctccagcaggttaacctgggcatcttctcaagaccatggcaaagcagcaagagaaagcatgcccaatcttgcatgcacttttcaagcatctgcttggtcacatttgctaacatcccactgaccaagcccagagtccgagtgggagggcatagcaaagtccaatccaggaaagagtaaagaattggaaccatgaagcaatacaccacaaatggcattggatatgtaggctctacacgggcactgtgctaagctcttgtcacatattatctcatttaatcagttcataaccctatgagagaggtacaattatcattctgattttgagaatgaggcctgaggcttagggcatagacatagcatttggtagagttctgtgtgaaccttagttatttaattccagagcccatgcattcagccttcataacatactttctccattcatggccccattgaggtagaccagatattttcctagagatttgttttctaaaggaaactttctttatagattctcctagacctggctaataatgaagggtaagcatgttgttgaaataattttgtactctaattgctcctttgctctgagtatacatggtatggatttaattctgttccccagggctgactcaatggacacccactggttgctccccagccctactcctctcaaggcagtggacaaggctcacgtgttagaaagtgaaggtactgaaatgtcatcatctatgctgtaccatcttgcaactctgtatccaatgctttctaattagtcccttaagactttagttcctttcacgccaattcatctggcatgtattttaaatgggtcctctgaagacaacagatgctcaataaattctatactctgacatgttttaaaattcctacacatgtgcctggcgcatcaaagaaggtgtacagaatggaatagaccttgcaccttgtccatgcaccaagtcctctgttctaaaacttattttccttctttgttgagcagttaaggagccaagtcttttgacttttggctgaaaagagaaagtaaacaagatgtccgtttcaaggcagtaggtatggagtgtgtgtgtgtgtgtgtgtgtgtgtgtgtgtgtgtatgtacgtgtgtgtgttaacgctgtgacctctgggaccctggccctgatactcagacccataatgtcatcttgatctttctgccttttaccctcttggctacttggacttctgttgcttctttcatctccacccacccctgcataatttaatctcatgtttcatggattccttcttctactggagttatgtgtcctgaatccaaccattcagccagacctactatatttctctctctttctctctctccctctctctctcctttgagaccctgaaaagctttaaggaagactctcrcctcaactctgcttattcaccttctcaatatagtaatccagagtgttacaaaccttgttttgacctcatgatttctcaccttctcttcctaccatttcattcygttcatacacactctcaagtgtcaggattacctcttccaaatctcccctttctcctttcccattcacttccccaacagttgggatggaccccaggaccatcactcttcacatgtcttgagcatgtgttaggtgtcaggagtgaaccaagcacttcacatttattttatttaatcttcacaaccaccagtgtggtcagtgctgtactttctccatgtatagaagtggaaatgaagatgtggggaggtgaaggcattcatccaaggtcacattgagagtagatgacaatgccaggctctagaaccacatcagaatcatgccaaggtctgtgccttgatccactcttccaattcagatttcttcctgaagtcaaaccaagttagattttcckctgaacaaggtctcatgattgcttttagagaggagggggagaaatggaacgtataacctttctccgtttcttttttgtttctctcagttttcttcagtctctttcttcattcctttccccatctccacccatggtggcccaagtttcctcagcagaattcacactcaggcaatctcctttaaaagtttctttgcctcatcactagacaatatcccacaaattcaagccacctataaaccctactgccagctcttcattcatgggtctttaaaaggcagactcataaaagaagccagctgagatcctggttctgacagtcttatagcctgtttttgcttggcctcacagatttaaaaagttttggttaaaattatggctgttgacataacctttaaggattatccctcagattcatgatgaggcttcagtcatctctgagcccttttcctttcacccacatgctaattccatggctggttctaaggctcacatactgatgagtgaaacggagattcaagtttaataggtgctaagtaaagtcttttatttcccttctggataatcccctcaccaaaccctttcatccagttcaaatgccygggtgctggtgcagytaggcagacgagaatcattctgacagcagagcttaaatgactcaggagtcgctccaatttcctcatctggctgccaggatttgtatggaacgtagggtatgagctggggctgaataaattgtatggggtccagccagagaggcggttgccaggggcaggttgaaggcacatgaagtgaagcacaggctcatgtcatggtggcctgatccagcaggagccacagatgccaccctcagcagaggaaatcccttacacatggcctctattcctgtttagttctacaaacatttactgtggctcctattttgttgtcccggctctgttctaggccctagggacatacagctaaataagggaaggtctaccccattaagtggctcacagtctggggtggagggaagacctctagaaagagaaaggaatgttcaaggtgctggttatgactccagctgagtgtcatgtgattttttttttcctaacaagctatagtatgctttgggcatatgagtaggagatttgtgcactaggaagtgggtgctgctaccccaataaaacactcttcctcctgggccagcaaagatccctttggacacctgatcttctgcccttttcccacggggaatccactttggtcctgttccattctcaggagaactcatgctggatggaaagtcacagaacattttgctgtggccatgcattgctttcaggtctagccttggctgagcctgatgctgaaaggagaagtgaggatcagttagccatttgctattcaaatagtatttgttttcattgtctcttggaaagctgtgggtactgttccaacctttgtatcccctttctgatcttagtctgctgggaaggactccaccttctttattagcaagaagaagaaagggagggaccatttgcttctctctaggaatttcttttcctcaatggtcaaaatttctcatggtttcatacttgttttttcagatctctgggaatacacaaataataagacacaagtaccatcctcaattgctgtgcagggtcattgggtagaaagacgtaactgtaggtaaactgcaagacattgcaataaatggtattttggaggcttgaataaagagctactggggctacctacataagctgttccctttctagaaatgcccttcacttgaaaactccttgtctttgtttaagaccctgctcaaaaatcactctgtctttgaaatgcccttgattactgcgtgaagagttgattgctttattcttagtgcctagcagtgcttcatttgaaattctgagatagcactgatagcaatgtcttacaatttatacactctgtgtctttctccctaatgtatctgtgaggcaatccagagcggtgctagtatgtcattactggtgtagccccagaatctacagtggtggctggtatctagaagggctcaacttatgcttcctggaagattaggtaaagccacaatgacttaactttcttttcactcaagatctagttcaaagggcaagatgaggccaaaatgttgagttgagatgtctcagtaccatacactaaactctgagtcatgtgaccagataacctaaccttctcaattcagccaagtaaagtgagagctccaacaccccccagcagagtgcatgtgtagcattttatggaaatcatctcccaccagagacaactagagcctccccaccatggcttctgagttcttactggcttacctcaagaagttctcaaatcctatgttgatcctggcctctgtaaccaacatttttcagtgataatttgaggcacattatgtggcatttggggctaagaaccagagtcaatgattggagtttcaagatctataatcttggacactgttctctacttattttttcagtaatgggagctcaatggaactgagtaaatggctgcttgagcaaggataagcttcctggatgatatttagaaaagtgatcacttgatagaatgtgctctatacatctgtgtatatataggggacacacagttctaaccactattgaggagcatgtgcttcagctttatctccacaaaccatacagagatgcagttagaggcttccacatgatttctccacttgtggatcttgacagtgcattaacagcgaatacatttgtcatcaggattcagccagaataccagaataatctgcacagtattttggccttagtttagatgtgtggttctcaatgggggaagtactgtcccatagggacattttggaaagtagtaagggtagttttgatgtcacaatcattggaaattaccactggcatccttgctaagatcaaaataattggaaatcacccctagcatccttgggcaggcaccagggatcatagatattcctctagtgcatagatagtgccactgaataaattttcctgcatcctgcttgactcttgaatgccatgccaaacatccacgtagatgaaaaatgcatttataatgatccacatcgagaagctcattccatttttgatataaacactttaacgagaagtattttttgtactctttaaatatacattcccaagaaggcagctaccatgttattgaaggaagcttgccttttgatttgttcactaatttcaccaagagttgttctccattttgggaagtcacaccattgatgcaatgctgcccacagtatctgagtcactcagaccacacaccagaatcagcctcgtttggagctgttgtagtcatgctgactctacaaatacatagtgatacactttgttagcacttaattcaaaatgtcaacataaagaaaaatacctatcacgtttgttgaatagtttcttattttcctgaagtctgaacatgttcacaggaagtaggttcaagcatttgattactttgtcttttaatctagttgtgtcagaagtatttacacatgaacatttttattatttcattgtaaattatttcctcttatagatagagcattcactttttttgaatttatataaggtaggtcatactatgtttggattttcaaaaccaaatatttgccataaaaatgggatttctgagactgacaagattgagtgacagttttagacaaacataggagcaactgggacataggaaaggattaattatttgagtatggtgagaaatgatatcaaaatggacccttgggagtgacagaaagtttaaaataaaaaaaaaatgtaggattgaagatttgaagcagctgacttctttagtaatgctaatgtttatcaaatgcttcctctgtgctggatccattgctgagaaatgttctttgttacaggctgtcagacagcctgtgctgtctgatgccacacaggcaataggggcagagcccagactagaacaatgtttgccagtctaccaagcctgccccctcaacgataccccattggccagtttagtctgtggaagacaagcttgaacttccccctggcccctactggacaggatctctgttgaatgggtaggaggacatctgacaagcttacgggctcagactgccttggtttgatttcctgctcctgctatggctgagatctgtggaaaggttgggctggaatgggatttaggaagggtaaaatgtcctgttcagtaggtctgctccttttcctaaagacatctaggggcatatctgttttgaaatgatatttacacatgaaccacgtttcatcagtaaaacaaattgtttaataacagaccagcaacaggaactcctttccaatatatttaaaatcttgtaggctctacaaaagttctccagtatgagttcttttaattccttcaaaaagacagttttaactttgcattgccacaacttcctggactgtggctcctttccttgcagtttcaaagtgtgggaggaattccacaaccacctacaacatctctgttactctatttcagatagagtgaaaatgaattctaaacatcagtgttggcttcttcacgttccccgtcgtcttgggggtggcactatacagaagtgcagttatgatgaagaggcagctaggctttggggagtccatgtgtggccacctattcttccatatgtgtgtcaayggaaagtgctgctgtcctgtccatgctgtccccagccctggaaccagcccactctcacctccattgctttgtacacaagcactagactctgtttaaggaaatccttccagagcccccacctggagtttaccctcaatccccttgttctcctttctctgccttctcaatattgagccccacattccagcttcatctctgcacctggcctcttctgtttggtcactttctggagcctcagactccccttctaactttgtggttgatgtcttcctgtggaggtttagctcagcttcttattcaattttgacttctttgaggaactaccccaagactttcagaacctcactgactaggtcagaacacccccaccttcctctccttcatctccaatgccacacctggggatggtggaaggactgagagtgttcttgtggcacaaattgtctgtcagggattctatgcctctcccatggtgtagagttgtaaggacgctgttgccagcaaggggttgtattttcagcccattaggtttgaggtgaagacagtaactatttctttccaatgacgtgtgatctgtgtcacttccaagatggagtggttaagaagtgggccatctctctttccctacttactagctgaaggcagtggacttcaaggctgtaagggagggtggaagccagatggcaggggtctgagtcactgaatcaccactcatcagcagcaactcttgtactgggtctcagtgagcaasaaatagactctatcatttaagtttcttaggtttgggatttagtgttagatcagagggcatttccctagtgtgtccccagtttcctcacctctagatgctggactttcatggggatatccagagcctagggaagacctcaatcttgatgtcaggcttgtagaaacactgtgtaactgagacctgctgatttacctcactccggttgtttgcagtctgtaatagtcttggacaagtgtcttaagtagttcaagtgtcaacgcttgcatacataaaaatgacaatattaataatatctggctctgatgacaggatgcatggctagtgcttagtacagaaatgtaggagttgttccataaatgccagttgttatattaacacttgatttggaaayactgatggcctatcttagagtcagctctgatctagaattccaggtgttagctcaggttctaaatgctgagtggtactctgtgtcattcctcaaatactttcgagtaggaaatcccgactgtttttctttatattcatatgcaatacctctggccaccaattgagtggcgttttctttcacaccaagcaattcttcaattctctgtggatgacaactggatgtcctacaattcaattcaattcccgcactatctacctgggcttagtgcagatcccacaagttaagggctcagtcccacaagattgctctcccccaactttcagacaccaattgcaaatgagaggttacccacaacttctcttcaacctggctacaaatctgaggttcccataaacctccctctttaggttcaatcatttgcttagaaaagatcacataattcaggaaagcagattattactagattcctggcttactgaaaaagtatacaactcagaaacaaccagatgaaagaaatgcatatggcaaggtatggggaaggggcacggagctcccatgtcctctccagccagccaactgcccagtatctccatgtgttcaacagcctgaaagctaattgaacctcttccttttgggtttttatctagccgtgattgattaaatcattagccgttggtgattaaacttaatctccatcccttctcccctccttggaagtcaaagaggtgaggctgaaaattccagccctctaaccatatggctggtttcccttataatcagtccccagtcttagggctttccaaaagtcacctccttaacataagctcaggtgtgattgaaggagcttgctacgaataacaaaaaatgctcctttcacctttgtctcccctatcacttaggaaatcttgagggttttaggagctgtgtgccagtacctgggacaaagaccaaatatagtcgccttctctctgtataactgtgttcctcatccatggattcaaccaacctcagaaaaaawaaataaataaataaataaataaataaataaataaataaataatacacctgaactgaaactgtgcatgatttttttcttgccattataccataatcaatatagtataacaactacttaacagagaacctacattgatttaggtattgtaagtaatctggagatgatttaaagcatctgggaggatgtgtgtaggttatatgccaatactacatcattttatataagggacttgagcatcctcaaattttggtgtcctcagtgggttcctggaacccattccttatggaaactgagggatgaccatgcatacttcttattataaaccacaatgtcatagccttcttttagctaggatgaaaaggtgggcagtgaactagagtttctcttactctttttcagtcataattattttcttcctgcttgccttctggtgtcaaattattgagtctcagttggtgctcagcccaatgcccagttcttaatgcacacatgggtctccctcatggaaatgtaatttctttggattcttttgaggcacacttaccaaactgaggaaggtggcagtgtgcaagaggaaggcagaaacagagcattaatatggcatttgttcctggaatatcaatttaactcaaggttaattaatgtcaaaataagtatggacaggttgtactgtagagtaacatgcacactttatttatttgtttactttaaatgataaaacatgagatttgctctcctttgtctagggctgcttcctggacagctggagaaacactgctctaaaacctgtaatgccccttgctgaagcagagtgatttttgctacccattttgatgccataatttagatatccatctcacctcactgcactctctttacctgggacattttggtggtgttactttattttctcttctcctctggagtggatagttgagtaattgaaaacaatttgggtggggaatatgatagggcaatcagtcctggataagagagtagttctagaatatttgagaaaaaatgctcacatttttctattagtcaaaaaaaatagtcaaaaactttacccaactcctaatgaatattaacaataggaatagtcaatataatcagtctgataaggaataaaataaaattgcacatttatatgtgaatttacacatgaaacatttgtcctgggaaaattggactcagtagcaataattattgcaaaagagaatgcaygacagttgaagctgtaattgatgtctcatgtgaacaaaagctaagaattggtttggatgaaaattgattttagtgaaataaacatacaaatagaaaataatgaaaatacttaaccacatcgataggaattgatcaaagaagtaacatgacttaataaatttccctcttgaaatataattacttttggaaaaatgctgattttgtgattgctttttattgctaaatcaataaatttcaaattttagtatttatttttgtaatgtgaggtaaaattgtttccaaggaccaaaaatggtgtcattgaaatgatttaatgggtcaaaatgatgagatcaaaatgaatcaaaacagtgggccaaagtattctgaacctttggcttgcatgtggaagttttctggtaaaagttaattaataaccacaatcctcatgcgtgtctctatgccacccactatacaatgaagttgccatgtaatatttcatgaatcctttggataatctgtgtgatagatgttagcacctctcttttgcagatatagaaactttatgtcagcctgttcatatagctcatctgaaaagactcagcttttcatgggtctgtctcctaagccttcaatacattttaccccactgccacccacctaccaaccattctgagatagattgaaaccctagggcatcatttcattcattgcctcaattcagttaagtaagttgtggttaattacactactgttcccaataatttgctcctatccctgtaggaagattatataatcatgtctattgctatgtgactttttgtagactatccttgtgtgaggagtttcctgccctgcctcaatgacatctgccttggttgtcatgacttactttggccaatagaaaacaggtagcaatgacctgtgccaaacccatgcaaaaactttaagagcaactgcatggtttgtcattgctcattttccctctacacagggtctctcaacctcactattaacattttggaccagataattatttgttgctggtggagatggggtctgtcttacgcattggaagatgttaagcagcatccctagcctgtacccactagatgacagcagtatccatctctcagttgtgactaccaaaaatgcctggagacattgataaaatatcccctgggaggtgatatcatttctggttaagaaccactactctaccacaacaatggtatgtcccatagaagctattcctttatcctccattccaggattttttaaaaaatgtggggtgccgacccacagctacatgtaacatgtacgaaaaatcaaccttttctcttgtctttgtgattctggggttggttgttagcacaacataacctagtgaaagctgactaatacagacatgtggaggaaagtgcaggatacattagagatggtcatatcttattaattttttaattagatgaaaatgaaatattttaatagataattgttaagactatcagctcatagctgttattagtataaaaagtcagtatcagttaaatagaaaacataacatgtatttatcttgtatgattcctcctaaatggagttaatgagttggggaaatgactggttttccatttatatttggttggctatttgtctcttagattttaatgggggcatgttggatctgggggagcaagggtagtgggaacaagagctcttggggaatctctggaagatactctagcagtggcggaagtgggactttccctamctgctactgttggctgggctacatttcttggagacattggaccctcactcaatagagactttaggaaaagtcccaagaaagatctttccattactccagaggaatcactgagtcgtacttaccaggaaaagtctggttttgtcatgctgggagtcaaatcatggcgtgtatttacacccttcatgaaaaggcagtgcagtatggtgaccatgagtgagagctctggaaacgcgcagttcttttccaggcgaatgaacttagtcgcttgactctgtgctttggtgtttccatctaaaaatggggatcatagaggagctatatcacaggtttattgttgaattaaatgagataatagatttacattgatgctacactgggcatgtggtatgcgctcaataaatgctagctactactgttactagttgtaaatggggatgaaaatgggctacatttcttggaggcattgggccctcactcaagacatgaaaagtctggttttttcatgctgggagtcaaatcatttgaaaatggggatgatagaggcacccacctcacaggactgttgtgaggattgaatcaattagtatatatgaagtggccagaacagtgtgtaagtaaaaatttttattattgctaatactactaccatctcagggaaatcaccacattttaaaattctaatgcaataccaaatttaaaaagctgctctcatgtaagtgttttcatactaatgccatgtgttctatatttgagttgcaaaatatgtgataatgctacagatgcataggacatctttttccatataatagcaaagctctaaaactcttcacacagtacccctgtttctgcatatcagtgtttttaataaagtcacattcgaatatatggctttctttcaggaccaaaataaatgtcataggtgcccactgctaatgtaaacttgagtctctggtatatttataggaaatgagcactggctgtcttttataaatgagaagatagaatcttagaaaagtgttgggctgaaaaataagagaatctcaagtgtgacctggaagggaacttagaggtcttctattccaatcttctcattttacagatagctcagagaagttcattaacttgcccaacgtcaggcagctgttgaatggcagaacaggggcataattgtttatttggtaatagagtatttgatttattgaggccatctgggttgatggagctggaactttaagccagcttagtgctccatccagcccggctctaaggggtcccctcagagtctaggcgagatggccagtggagagttcaggcacagagcagcacctaaccaccaccaagcaatgtcacacaatcttttggtctttgggcacctgaaggatgtagatagaagaatactgtatgcaaaattaaaagaccctagacttacccctggctctatctgcccacccccacaacatttactgaggcataatctacatatagcaaccttttttagtacacagttctttgagttttgacaaatgcatacagtcatgcatcatcaccacaaccaagatagagaatagctgtgtaagccccaaatctctttgtgctttttctattcaactatttccccaaccttcagcccttagtaaccactgatccattctctgttctcaaggctttgcctttttcagaatgtcatagaaatggaatcgcacagtttgcagccctttaagtctggcttctttcacttagcataatgcatttgaaattgtttctggctgtgttcttactgtctgcaggtctgtgggtaagtagtttaacctgtttcagcctcagtgtcctcatctgtaagatgggcattaacacttgctttgcattcacgttgttgtggttagaaagaaagaatgcatacaaatgtggattaagtaagaggaaatgcaagtgtacaaatgtactcattatttttgttatgaagttgccttttgaagagattccaggtacaaaggcaatcctaattgaagtataaaccctgcagagcctttgtttgtckgatgagcggggaagaacccagcatcactgttaagctctcccccagccaaagggctccacgagctagttccaagcctcaaaatcttacagaaaacacttacccaatagggactgtcaccagggaatgtagatctctggcatattgctttcaccatactgctcccccgaggtgttgggaaacttaacctgtccatgacatactttratctatttggatggaawgtagcttttaaaacatgaccattaacactgctaataatttataatggtaattgtattctggaaaaaaaatgaatatctgacatacggagcaccaaacagttccacaagaagatagggcttgtcttggctcaaaacgcacagggaagagggtgaaatccagatttgcatttccttctgagtgttatgtgattctgagttatagaacacatatgaccaacatatatgccctgggcatttttgcygggatgtggaacctgggaggccagtgttcgatactgccttcccatccaattgacaaatggctggcaaaccagccagacaggtgaagacagtgcgtagccagagaaggcaaaaaagctgggcagagatttaggagacctgatgctatgtctggccctgcgattaattgtgtgacttagtgcttgttcccttacctgcgaaaaaagggggccgtagtagattaccctgaaggaatcacaagttacccccgaaagatagagcccgactcccatctctgagcaccagagccaggggagcagaaagcagcaaccctgagccttggagtgaaatctttcagagaagctccctgtttccagcactagctgaataagattccaataaacatattgctgaaatgtttgtttccgrgtgtcattttagactgcaagtagctaaaacagatctggcttctatatatagattccgcatttggttgtgttctaggaggcttttattactacgctccctggctggctcccagctgagcttttccttcaagggatcagattttggaaccagaaagtcaaagaggatcagtgaccacattaaggggcatctctctttctstctgtcttgctctcgctctctctctcgttctctctctgctaatgctgtatactgcaggtggatgccagcgtggactggctcctctctttgtgcaaagactcttaataataatgatgacaaagctaatgaaaactgaccagccccactatgggagtaaatataagcaaaacactcctgacgtcctgggcttaaaggaaacatcatataatttgggttgaaatgaagtgcagatgatcacaaacagcccaatctttagataagaggacccaggaacctctgtggatagaaataaaggaaggggctgtgaagaatgggtttctttgggggggtgggtgtctgaattttactcatgaattctccaggggaagatatgctggaaatgaaaggtgaaagaaagaaggtggaggtggaagttggaggcagagatgcagggagggaaagcggagggaagaggagttcccttaaagagacaatgttgaagccttgcaatcggattttgtaaaacgtgtccagtcactaagagacagtccccctactgtgtgtcctttgttttctgtacgtaaaacctaacctcgaccccatgttatagtgtctcctcccttcacctgcctctgagatttctttatgtttaatcatcatggatctaactgccttcctggtctccatatttttgtgcctcaccatctctttctagtttttcttcctgtttcattcttccctcttctcttctctacttctcttttccagttctttctcctcccagaatcttctctttttcctagtcctcctaccctcccccttccattttaccctctcctcctccatctctcccctccccctcgccttgctcccttcccctttccctctttccccacgcctccttctttcttctcttttcttccccccttacccctgcctgtccttctccccttcttttctctctcccctttcccatctcctcatcccctctcctctctctcctcgctttcctcttttccctttccctccctttccctctccgtcctggtccttgtttatctgtaagctccaatttcttgccttatagatttacctgcagaacaagacaccgctcctcttgcaaaaaactgtttaagaaatccatatcctctcccttcattccttgggcatttcagaaatgatattcctcccccaactacccccgtcaaaataaaatgaatccagccagctcctgctgtgtgtccttaaatccattccctctagcttcgctggtttgaaagcctgtaccctagaaggggcctcctgcatttgctggcaaccctgctcagtctgatcgccacagatagtgctttggagtgaaaaaaagggggaaaaaccctctccttggagatttcaaaacagattcgaccagctttcaagtctgtgcacttgcggagtggcagagtttggggaagaggggtaggggacttggggtgtgggtgtttgtcataaacaaatagcaacagaatttatgtctatataaatttgggtttcccttggcatgtctagtgtctttctccctggcatcgagggtgggtgctgtgcaagcctgacttccctcacacttttgctcgggggtgtgtatgtgtgatggaattgaggagggggttgctgtgtttttgatctgattcacttgacagattatttgaatccagcccacctttccgcacatgtcaaacagatgggatcattgttaaaagccttgagagagccgaggctgagcggtgggtaaggcagggagggggaagagaggaggggggctgagggagggagggggcaccttctagtagctttgtgtttttcacacattggaactgacaggagtccttcttctccgtggggtggtgtgttgcgggtatggggctgttgaggggtgggatggaaaggagagggaggtggggtgttggtgggcagggttatgatgtcacagcaaaagttacaacaggaggaaaacacagaaatggttcaacatttttttttaacttgggactgccaagagctgaaggagagtggtgagcaaaggaatgaagggagagagagagaaactaaactggaagcttgagttttgtgtagcttcttgaaaccttatgaatggattactagaagctgagagccaggagagacctataggggatgcaagatccctacacattaaaagggggagaaaagcaggcggaattcttcttcctggctgtgttatccctccttcctgaaatgaatggtaggaaacctttttctgagggttatggggtggcatgcgggagggggaagtttacttcttttcttacctgagtatcttccctttacttgaactaaacctcctctcttccttccctcctttcttttctgctttctctctctctctttctctctctctctcccctctgctttcctggttttctctatatccccctccctagagccctaatctttattcttgagctgcttcagaaagagagggagagagagagagaaaactgagtcaaaagtaaagggaaggaaaaagggcagtctaggattgaggggtatctgcttagtaacatccatgtgcctgagttgatatcttcttgggggacttgcatcgaggctccagtggatgctacataaggaaacaggacatgctggggatgaggtgtttaagatacagcatttataatgcaaacaagtcagttcttagctggggtagaggagtttagaagatgatgatgagactcaaggcagaagaggcagtgcgatcttactccagagtatgtggactgcatgttttagatgtgggcaacacaagcagtgactttaaaagtgtaagtgatttttcttattatgtgaatgaaggacccaatgtgtttctctactgttttgtaccacctgtggtcagatatccttacttgtgttaagaattcagaaccatgccgtgtgtttgtccatgtatacatgtgtgtatttgtgtacacgcacatgcacttagggtgtgggggccctttgagaaagcctttatctaggcatctaggcaaacactgcataggttaaaattatgacattttcttccccatcctttccatccatttcaaatcaattggaaacatggttccttgggtctagctgttcatttttgtaaattacttattttgaacatctcattgtttatttgctcactcagcatatggtgacttttagtaacttcagattgagaaacttctgagataaaaaggagacctatgtagtatgaattcatggcatttccatttagtacttctcacagcaggatacttgatttctcctttctcccatgtccgatttaaagtgaatttaagatattgttcttttaaatccccaatgattgaacaaagtaagaaaaaatactttgttttgtttgtgacaaaacaaaagaaaaatacaagggatccctaaaaggttagtgtgggcttattaggcagtaggtagatctgttcacagtaagtgtgtgtgtgtgtgtgtgtgtgtgtgtgagagwgagagagagagagagagggagaatacacacagagaagagtactccaaaacactattgattttttgctattgattgtgtaggctgcggctgctgaaagagaaagcccgagatgtttactggggaaaccaagagtagcgtctgtcccctgtgccttggtgaggtgggtaggttttcaggaggaaggaggggacagggaggagtaggtggagtgatgcattgaacttactagctttgacatcatcattgtctttaaatgaaaacaaaaacaaaaacaaaaacaaaaaacaagaagatatttacaggcagacagaaagggagccaaggggagcaggagagactggagagaacaggtcccctgaagtgtatgctcttctttttgctcttttcccgatcttcccaggaacccacaagactcccagaaggtgaagttaagagctcccagactcataaggttattagaacagcaaactggcaccccaaagaactttacggagacttgcaacctatcaacaagttggatgagggattaaaagccttcaacaaccaacaaccccaagcatcaaactgaaggaaacattctaaccttcacagacagactggaggctggatggggacctggctgaagacatctggagaatgaaagttaagtaccagcttgcatttttgtgcccctagattatttttgcattttaaaataagaagcatcaaattgcgtgtctctgtgtaaaagttctagcaatttgttttaaggtgaacttattttggcttagggactacaaaaagagaaggtaattcctagggaaggaagaagagaaagaaatgaaaattagagaataagattattttgaatgacttcaggtagygaggmgtgtgtgtttgtgagtgtgtatttgagagacttggctcatgcctgtgggtcttctcttctagtatcagtgaggggagggattactgaagaagaaggggggraaaaaaaagaaagaaatctgagctttctgggaggaaattcaaaggaaccaagagaaattaacttcgttctgcaaggactaaartacagcaagaggagagaggtcaagcgagaagcgtgcgggaagcacatgccctggggaggcatagaagccacactggcagagcggccagcacaggtagccagcagaggcattcttggggctatttgaaaaagtttggtctgtgaacaaaacagtttccctggtgactgcaaatccattgctagctgcctctttctcgtctgcccatcactctggtgtggtacccagaagttgacttctggttctgtagaaagagctaggggaggtatgatgtgcttaaagatcctaagaataagcctggcgattttggctgggtgggcactctgttctgccaactctgagctgggctggacacgcaagaaatccttggttgagagggaacacctgaatcaggtgctgttggaaggagaacgttgttggctgggggccaaggttcgaagacccagagcttctccacagcatcacctctttggagtctaccccagcagggctgggaactacctaaggccctaccccgtgggggagcaagaaatccatcatacaggacgcagcaaaccagacactgaaggaaatgctgtgagccttgttcccccagacctgactgaaaatccagcaggactgaggggtgcagttgaagagccggctgccccatgggtaggggatagtcctattgggcaatctgagctgctgggagatgatgacgcttatctcggcaatcaaagatccaaggagtctctaggtgaggccgggattcagaaaggctcagccatggctgccastactaccaccgccattttcacaaccctgaaygaacccaaaccagagacccaaaggaggggctgggccaagtccaggcagcgtcgccaagtgtggaagaggcgggcggaagatgggcagggagactccggtatctcttcacatttccaaccttggcccaagcattcccttaaacacagggtcaaaaagagtccaccggaggaaagcaaccaaaatggtggagaggrctcctaccgagaagcagagacctttaactcccaagtaggactgcccatcttatacttctctgggaggcgggagcggctgctgctgcgtccagaagtgctggctgagattccccgggaggcgttcacagtggaagcctgggttaaaccggagggaggacagaacaacccagccatcatcgcaggtaacacccttctcctgggctttctgaaatcctgagggtatggctggctttatttctgacgggttagacatagggagcgaggatgggaaggggacccaacaggaaagccagaaagggctagccagggagagggggaagggcctttattaatcagcacggcaggattccagacaccatcaaaaaggagataatgactctagccatatcagcctctgtaccttgtattgatctcatgtccttgtatacattgtgcttgcacttaggagactttagctctcttacctgtctttaaagggatagagctccttggttctttgccaaaagagaaggggtgtcacactccatttccggtagaccaatatgagatacccaggcaaccttgaagacagatgagaatccaaggacctgagcaatgagtcatgcctgggctggtccaggtggtgaggaaacaaggctgctaggtacacagccgtcaggtcctgcctggtttccttttctctgagtgccctggatcttggcagaaaggtgccctttggtccaggtcctggaggtccctccactttgtcacaacaatcatgtgtccagcttaggaacagtagggtccactggaaaaagtgagcacttacaagccaagatcctgacttctaggcctgctgttgttgtaagaaggacctaaaaaatgaaactttttataactccatgattttgatcaggagcactggtctgggaacatgacccacatttgtttgcactacacacagatcttgcttttcatggaaagtcacccagaagggcaaagaaaaatgaggttaagagtaactgttccctgttgccttactgggaaagttggaatgaagcaaggggtcatggattagacatgatatttcatcatttagtaccttatccttttgaattccccatgacagaacctaacacaaagcaaggtgcacagtagaaccatataatctgcttaatttgaattatccacagtgctctttcatgttttccagtcccattatattgatggggaaactgaggcaataaaaggcatgccaggcaggctgggaatagaactccaggacacttgaatcgcttgaagattttccgaattaagaaaatattctcaggttactggatgcctgcaaagtttcagactagggaaagaagtcggcaaggagggagcctctttcaagggggtgttgctggaacatcccttccggacactctgtctccccctctttggctgtgatttctccttcggaagctgggattcccagacactgagcattctcaagtcttgtggttttgctgtattttatttttgggtgggagagggagtggggaaaggggagaaataagggttgggctataagttaggtgggggaagagaaagagtagaaggaaatccttattctggggccaaatggaagaaataatgagatgattatctgatcagagttggcagctccacaatttctcccagatgacatcttcttgctgcttaatcttgcttcctagtacccatctgccagggaaactgtgtgcttgcagtctagactaagacccacgactctgcttacccctcctcttgcagtagcaacataaagaccggggatcaattccctggctgaaaaaaaatgagagaaagatccaataggagtctatgtgggwggctctaaggggctgctgctttgggttactagaggccaaacctggggaaacttgacccctgtcctgtccctcctgtgtcctgtctgatgctctgcacagaggaaagcagtgtcatgatttgattccagttacagcatttcttgtggcacctcccccatccccaccccaggacgtctttctaccttgcccacctgtccaccgcctccaacccctgccaacactgccacagcacacactcagatccttctctaaagtgcccgtctgaactcttttaaccgtaagcatgtaaaattgggcagaaaatcttttgcagactgtctagcttctgaattttccttctcttcaaatcaaagtgtcccttgtggtgtaccagtatttcccctcttaggtctacaccagaaaggttgagggcagggaatgcccagggctatctcatctccacttaccactctatatttttctttagatttctgtacatcagaaaatattcagtaaagatgtagggtaaaggtctgggaaagatggaggttgggaacatggtttcattctttgggattctagcaacagggctgctgagggcttgggcatccttgtgtactcactgtgcttagctgcttacacttcacctgtgctctccatgcctgagaaccataatgttgccaaaggcatttaccctaatctactcatgcctgtggacagaccagtccatcttccttctcttaccatacagcactcgcccctgagctggtcattgtctattcctacgatggctggccttcacctatgcagaatgacaatagaatcatgtccctgggagccacatacaattcagcaattctgctgttccacttggaatgatccgaggtgctgcaagacttggcccctacacttttttcaacagctctcaaagcgtagcttctacctactcaacttaaacccagtttcccaatccttaatctacccaatttagggcattttttattcaacagagacttcaagcaatgcagccatagcaatttacagaggaacattcccctccccagccccagatgcgggggtcttagaggatactttctacacggaacactaggtggcagtgttgcttcattcacaggagagtaggcagccacgtagtggggaatgtctctgatttcttggaggactgtcctgccctggctctgggctgtgtgtatttaattgtcctctcccagaatgttgttcgttggcatcccttggggtcagctttatgcaagtgtttttttgcggggcttatgtgaaagggcaaaagtgacatttttggggttgtgactaacttgcactttagcaactagtaaagaaaagaaaatcaactaaagtttcccctctccctcccccactccaaactcccacattcttccaaaatagaaagttgaattccagaatgaattgccagaatacatttatttagagttgaggacaacacggagctcacaggctttgggtgctgaacgtctctctggccctcagaaggcgagacgtggtacctgggtccctgcaaggtagatcttctgaagtggcctatttcccatagcggagacagaacaaccaaggtgtaggagaggactgtgtacaactgctccactgtagagtcctctgtaagagtagctagtcaggggcctggcagctcagggccatgtggccacctaggagtagactgaggtcaggagcccatttggttgggccattggaactgagaactggacgtaagccaaattctgtcccatccacgtgtgtaacttttaagctccagcacccaaccttgaaaccatcctgttcctttcccgccttctcaacttcctttcctctcttttaaccccaacatacacaaaagagaagattttaataggttcctcctcacccataattgatttcaaatgttccctgaagttgcccagctgagtaaccacctgcagctccaagttgcaggagactgagtcactaagtccatggcagaattggagcctgagcccaggtttcttcatccgacaaatatttattgagtgccttccatgcaaagcacggcaaggccctgtggggagcacaaagatgtctaagaaactgtccctgacatgaagacaagttttcctcctctgaggatccgagcattagagtatatgcttgtgtagaacttgggaggcaggccaacctggcaacagattccatctctgacgcttatcagggctgtggtcttyrgcgatccattgagcttttctatgccttcatttcctcaaatggaaaaaggagaaaaatatatgtatacaaaatatcattccatttaaataaaaatgaaaaaagctccaaaaaatgaaaaataagacaaagtcttgcagagtcgttatgatgcttgaacaagtcatgtatgtaaagtgcccaccatagggcttggccactgtgtttactcatggcctggcaggagctaacagtgggaggcaatcattactgggagcagcacgttaacctgcttgtctttggttctaacccactaacctatcatttttccttaggtggaatattcactttaatttcttaggaattcagtttgctarattgtaaaatgagaatgatggtaaacagactttttttacaacacagtctaatgtgttgtaaatgcagtagaatcagaggccccaaagggctcatttattttatttaaaaaaatccattctttttagcctgagcagtactattttgaataaattggacaacagtgctaaagttttctggaggccataaaaccttttgaaaatctgatgaaagctatgtccactccctagaaaaatgaacatgttcacatagttcacacaacgttcagagctgtattagtctgttctcaagctgctgataaagwcatacctgagactgggtaatttataaaggaaagagctttaatggactcacagttccacatggctggggaggcctcacaacaatggctgaaggtgaatgaggaggaaagtcatgtctcacatggtggcaggcaagacagcgtgcgcagcggaactcccatttataaaaccatgagatctcctgagacttattcactatcacacgaacagcacagaaaaacccacccccatgattcaattacctcccaccaggtccctcctgcaacatgtgggaattatgggagctacgactcgagatgagatttgggtggggacagagtcaaaccatatcaagacccttcacgatttcttgatggccagggtctgctgacattatgtataaaacctattgtttaaggcctatattggtaagtgttgttgttgttgttgttgtttttgacatctaagaaatgagatttcacagaatgctgaaacatccccttctcccaataagggaggtttgtactcaaggtggagggtgtcatccacatagaatatggagcttcatagaaggcagattcacgtagatgtgaagagaatgtaaaaggcaggccacgtgtgggatctctccctttatccaataggactcaatgacaggtgaagagacaaatctatacttttcccagaatcttcctgaagatgaggtttgcatggccctctcctcagttgcttcttcctatatcacagcaaggtttgaagtcagagtgtttgtcctccaagaatcctgtggaactgtgcagttccctccacattagaactctgctccctggttaggatccacatgtgcagcaaagtcatggccacctgccctaagcatggacgacccatggatgtgagggcttgctgttggtttctggggatggatttacccacagtgatgagtacgagttgcacgagttgacttgtgtgaacagggcatagcccctgatggttgtaaattagcatctttgtgtagaaggttttatcatgtggctatatggccctcaagaagagagtaacatggaggggctgtatgatatctggtttaagaagtgaaacagactgtgactatgaccctttttctcgaagcctgtggccatgcccctcatccctatgggaaagtaattttctctatgtctctgcttccagggcccttcatgtgtggtttcctagggtgcatattgcttcctgccttatttgttatgtgcatgtctcatttctatccactggtaattcctccagagscaaatgcatgtctgattaacttttgtgattccaaaatatctagcacagtattagggactctcagttatgtttgtagaatagacaaaatagaaatttagacagctgactgtccattaaggatgaataaaagggtggagggaactttctgaaactggagtctctttgtgggatccagggcagtggctttcagattctgtttttgctgcctactgaggtgtcttaggagcttctgaggggaaatcactgagtacagggctccctttccaccttcaataggagcatcccctcccttacctgtttcatgtgaaggaggggcttaattactttaaggaagtttaaaccccagaactctagagcaggggttggcacattatggcctatgggtcacatcaggtctaaagctgaagcttgtttttgtaaataaagttttattggcacacatccacacccatgttggttatgtgttctctgtggtggcttccctgctaactggtggaggtaagtagttgcaaaagaggccttctgacccacaaagcccaaaatatttactgtctggccctttgtagaaagtttgctaactcatactttagagcatttcttctcaaacttcagtgtgaatagagatcagctgagactattcttaagatgtctgccatggcaatacacctggcagcaggtgcaatgtaagtacgtcttgcacagtgcaggcagtttcatggaccaaggaccccaggcgctgtgctctgaaacacatcactgcattttcactgaggccacagatccctggggtggcatggttaaaggcagaccagttcctgagagacagtcattgactttggctggaggactcaaaaaggccttgcaggaaattccttagactgcactgtagtcaacaacacttccatcccaccttccttccctcttttttttccttcagagtcagacttgcagcaatgactgatgtctctcccagccttttcaggatctgtttatatttcctcggaattgtcccccccagtaaaatcctacatatttaatcctgtattggcatctacttcttgtactaacacaactaccttacgcaaatgcagatttgggttcaataggtctggggcagcctgagattctgcatttctaacaggcttcaggtgctgttgctgttgctagtatgtggaccataattcaagttgcaagactctagactcttgagtccaagctcttgagcccagggcagaagacagcagactttttctgtaaaaggacagatagtagatagtttaggcttcttgggccatgcagtctctgttgcaaaaaattcaactctgttgttagaatgtgcaagcagtcgtagatgatatgtaaacacatttctatgcctgtgttccaataaaactttattcacaaaaagaggtggcaggctagatttttctcatgagcagtagtttgccaactgctttttccaccatccttttgtgctttgctttctagtttcacgctatgcaaaataactccaacagagagactgtggcactatcagtggtgggacataccttttgttcaagtataaacagaacttcccagatatttcttgcaggaaacaagtcatgctagtttcttggtatgagcattccaggcagagtttatatttatttctttccttttctttttttttttttttttagaaaaaagcatactgagatgtaacttatcttaaagttcacgtgtttaaagtgtacaaataacgtctttagtattcttacagacttatctcaacctattatctcaattatctcaatcaattatctcaatctaattttagaatattttagtggcacccaaaagaaatgctgtacccattagccctacccacttccctcccctcctttccaaatccaccatagccatagccatcagcaacctactctctatctctatagatttgcctattctgtgttatttcataaaaatggaatgtatcatacaatgtatgatcttttgtggctggcttctttcacttgaggcttatccatgttgcarcatgtattggcacttcattcctttttattgttaagtaatatcccatgcatatactrcattttgtgtatccagtcttcaattactggatattttggttgtttccactttttggctgttatgaacattgtgcacaagtggatatttttctatttcttttgattagatacctaggagtggaatttctgggtcatatggttgctatatatttaacattttgaggctctaccagactaccaaagtggctgcacaatttagtaatcctcatgaatgcatggaggtttggttttatgcctctgaccctctaaaatgaaatgggggctgggcacagtggctcacgcctgtaaaactagcactttgggaggctgaggcaggcagatcgcttgagaccaggagttcaagaccagcctgggaaatatgacgaaaccccatctctacaaaacatacaaaaattagccgggtgtagtggcatgcacctgcggtcccagctactcaggaggctgaggyggggggatcacctgagcctggtgaggtcgagtctgcagtgagccatgactgtgccgctgcactccagcctgggggacagaatgagaacctgtctcaataaaataaaatgggcttctgcracatcactggtgagtatggtttggccactgttagcatctgagaatacttcagtggtcttggagaaatctgccattgttgcacaatgaggagagacatctgggctctgatgctgacgcctctgaaatagcagggagtccttcctagttgaagtgggttctctcaccaagctccctcttctggcttcttgaaggtatcctcagatgggccttttcttccctgaaccttcacctttggcctgaagtgtattacttgctattacctgcaacctggctgaaccctcartgataggcatacaggaaacactcaggtgcttagaagtcacaatgcatcagattctgatgcagcagcaccttcagaaagaaaaagagaagagaaaccgaggggagaagggaagatgaagctcacatagctcacatagctgtgaactttctcctagattccagctctatgtctggccccagctgggttctttggcagaccattcagggtttggtgtctgactcacagggttagatctgggcctttggggtcatccagtcgtttggggtgcaggtgggggaaggagaatcacttccaggcagtggtgtagaggggttttctgtaagaatggcctgtgattatcctattcaccacactccagcttcagtgcctggcacctgttactgcctttcctctcctcattccccaattttcatttactgtaaaagattctcttcctggtcctttgcatctcagggagacaatgcagtggatgaggctttgactgacccaggtggcaccattagctgctcacctccccatcctctgggagctgtgtgttctttctcagaccacaggaatgagatggaaacccatggagactctggtgtagttctggggtggagcaaagattgtcaggttggaaatattcaggagtgacagaggcagggctggaaagtaggaatcacttttggcagcccacatacatccaactattctcttgtcaccagcaataatttgtccttcctcacctcctgcctcctcctttttgcacttctttcttgtttctttgggctgaccatgtgattcactcagaatgtgtgtgccaggaggtctgactcctctttcctcttccaatctgtgccttgaggaggccaaataaacactttatttggtgtttactaacagaaaggcaacaccttagtttggctcctgagcctgtataccctgcacatccattagcttcagttcctgatgtcataaacaaggacacagattccatactttcgctcttgagtacatggaattaacattattctgggggctcatcagatttgtttcagctcacatcatacaccccctggccctagaaccttccagaaagcatatttctatgctaagtttgtatccaaaaaataacagcatcgtttctttcccatgtttactacctgtctcaaaacaaccttcctttttggattttttaaagagaacatccagtaaagaaaactcagtgggcaaacaaaaacatcctagttctctttatgagtcagaattgagtggtgaagaaaagtggttctgcccaaatataaaatgtggaaactggaatccaaagtctcagaacatttgaagtattgccatggcaactggttgggctatcaagacgagcaagtatggctcatttctgcattagaaatccagttacctgatcagaaggaacgttgcagagcctataagttaatcagttagtgagtcatcattcaagtggtgactcagcatttgctaactttcctacaaataattgctctacattctgggaaggttataaaagtagtttagttttatttgttcattcaatatttattgagcttctattaagtgaaatatcaagcctttaaccacatgttggggaatcaagaactactaaggcaggagttatgcctggaaggtgctcagaatttaggcctgtaaactgtaaacggattattaaatttgttttaataacaaattatatgtgtatatgtaaacagattattacagcctggctactgagagtaactggtcctgcctggataaaccaaaaggatttcttgaggctaggaaaggagagctggtaaccagagaaacagaacaagtactggggagtagcagaattagggcaaagagaaaatgatagttttcaaagtgtcaaatggcacaggagcaccaaataagatatcaggcctaaagtaggtgcattggatttagcagtcagggaatcatggatgactttagggagagcagtttcacacctcagttgtgggtgcatccacatcacattaagtagagatatgaatgagaggtaaaggagtgaagacaaggattgcactctatgcagaaacttggctgtgatggaaggggcagaggagatgtcagaagtagatatgggttcagagagattttattttaaattcagaaagatgcaagactcaaggtcttgtattaaagaactggtcatctaaagtaggagacaacataaacacaggaaaatgatggtagataaagtaacagaaatataaagcatgcaaatgcacgctcaatcactctaaaaaaatctattgcataaattttcctttgacaagtggttctgtagcacttactctgtgccaagcactactgtggtctgtttacaaatattaactcacatgctcccaaggacaactcaaggaagaagatggagaaaccagagcacagagagaaataggatactgtccaaggtcacacagctggtgcaggcagagccaagatgtgaacctggacatttgtcctgagagttcttttccactgtgctatgttgtcactatcttttatctcaggagcagtgaggagtgaagagccccaaccttcctcaactgaaccctttatccatctcacatccattgcttgtcctgttttctgtatctcagcaaagggccaagaactctaggagttcctgtctcacatcactgcccctcactctccacatgacatgtaatgccagtaatcaatcaccaaatcctgtctggttggcctcttcagtttatttggccctgttgtgttcatcccaataaccaaactaaagctaagtttcggtcacaataattctgactgtctctaacccgagagatcaatttattcttcagctgtttgattgcaaccaagaggagcattttcaaatacaaagcagcgcaagtcactttcctgcctacaaccatcagaagactctgctgcaccctcaggataaagttcagcttccttaaggtgtcatatgagaccctacttaccttttcaatctcatcactgactctacaatagacacacacatacccatgcatactcatgtgtacacatgcatgcacatatatacaagcacactcacacaaacttgcacatccatatgtacacacgtgcacacatgtgcacagatatacatacacacccacccacacacccacaccttcatatatgatacaatcatgctctcacaccatgctcacatgcactcacgcatatacttccaggccaatttctagcaacaccaaaccattagcagtgccacagatacagcactctccctggcctctagcccctgatgtctgtcctttgtaatttttctcctaatatgaaaccactccccgaaaccacatgcacctgaattgttcttatttaaccccctagatttttagtgaatatgacatctctttcaggaactcttccttggcctctctaaagactgatttaggtttgcttatgttttcctgataccttgtactgtgccttatcaagacactaagagaaacctaccgtaatttccattttacttctcattaattgaacacaagctcattgagctcctactgtctgccaggcactggactgggtgtttgacgttaaataagcagacatggttccactgcccagtcatttctattctaggctagctcccactgggctgtaagctgtctggggtcagaggctgcatctgttccttgctgccttcctagcacctagtgctttgtgagttaataacaaataactaattcaatatgtatttgataagaagatgaaggatgaactaattctatttggaagtaggcacatgaaaacctggtaatctttaagttctattgatgttgaagatgactaggaagtttaaattcccctcagtagtatctagaaggaggagttatccttaccttctacctcaactcccccttcctcatccccacaaatctaggtatacctgacaaatgtagactaggaatttgtctcctagaaaaactggatataatttacaacttggtttaactatgtttatttctaaactttcagaaattatcttttctatttatttgcttcttctaggttgtctttttctcattctcatagaactttcgttttgtgcacattattcccgtgggcgggaggaagaggagtktatatgcctagagaaaggtaratcttgctacctgaagacgaagccactgggggccaagaaactctgcttccgttccaagtctctccagcgtttgcaccttctccggccctttgaaaatctggagttttaaaaactctcttttgggggggtgaaattcttttaacatcaaatgtgtttatagacagttcctagctgagtttatttattagccatatgctcactcactaattcatttattcagctgatgcttcttgagcacaaagtaggtattcaattactatttttgaaattaactccaacttcatgcagaataatagtaaacactaaccacagcagagctctattttagacattgtttgtttcaaggcacattaataacttgaaataattgcacaatagaatattcttataatccttataatacaacccatggcatggatcctgaagataaaagggaacttgggcaatgctccctcctgggtgtggcagccttgctgggcctttggaccacctccttgtgccccctcctctgccatggctggtccctggctgaggtcaggcaggtgacagccaggtgccatggcagaggagggggcacaaggaggtggtcccagcccctctggctctctgcttacagcatttctgggaacttagcagctatgtcctctactgtggtgtgctgccaaaagccaagcacatttgaggaaggcagctgttcgttttgccattccccgcccttctgtgaacatctcctctcctgaccctgcctccctacactgctgctgtcctctcttccacactgttctcccttcctgaaagtccaagctgcttagcagtggaagccttcagattgtctgtaggcttctgggggcttctgtggatctccatcatctgtgtgcccctccaacacccagggcagggcctgcagcagtatgggcaatggcattgaatggacgcatggaggacaatctggctcctcatacacacagaacttgatctctcctgactctccagaatgaaccatgttcctttctcttctctccacatgacccacccattacctgctccttaagtttgtgcaagccatccatcccctcaccttaattgtcctacctccacctcctcatccatttaagttctttccctcactgtattagttaggaatgcagaatctggagtctgaaggtctggattcaagccctttactagctgtgggaacttggcaaattgaagtccctcatctgtaaaatggaggcaatggtaatttctgtctcagaattgttgtggttaaataaattaatacaaactatgtgttgagagccatgcctggaacataagggcttggttaatgcctgttgctatttcacccttctgtgaagatgtgatgtcacagaagggacccaggacttgctccaaagatgctgccatccaaactggccaggtctggctcatgttcctcagtcccaaggccttctttacccattctagtccrtgcaaactctcctcctgaatgcttgttgcatgtatatcaatgtgatataacttagcatgaaattatttgtagtgagattttgattccacagattccacataaccactattctcaactaactmtaatattttagttattctgcttcttaggagatagagttatgtgattacaagwtaaattcaaaagaagaatccagtagaaacaaaacctgcccattaacttatgggttcagcccaatcctttttaccttctctggccacatactcagggtatgggatagtgagaagtggttagaaggctgatgatcttaaagcccttcgagataaacctcgagatgaagattcygggcacggaccgtcagagcatcacaggccaggtgacaacccagcccatctctgcttcacagatggggcagtgagacccagagagggaaagttactttcctgacattacacaggggcagactgagaccccaatctaagtacttggctcctaatttggtgttatttccactcttccaggatgcctctgattaatttaagcctcttactggaaagcagaagaaaacattttagaaggagtttcaataagaaaatgtatggctttagtccttacttaacccgtgtcaattccttagatcacttagtttccttgacctttctctttctcactcaggggccaagcagccaaagctattgcacagcagaggttgacccagaggtcagctttacacatcctctttgaacactgggctctgaagactcacctgggttcaatttgagaacacacagactgtttcctctagtttcctctcagactctcaaaccagtgagggaaaaaagagactctgagcctttaggttctgattggcatagtatttggttttgtgtggtccctgggttgcctgacatcaccaacaagttgattcttagaaagcagtcagagtctccttgggttatttgtgaccacatggtagagacaaaaacaaaaaacaaaaaacattcaggtattattaagtgaatatgagtaggatgtgtacattgaagcaatataagaaacactggacaaatactaatgctgtgaaagtcatacaatgtttcactttaagaaaacctgacatgtgaacgtctaactttagctgatggataaactgagaggtcatgttcattgcaataggattttcttcatgcttgctttaaatagtgtctcctataatgtccctggatcactgagaatatatttaacactatttaaatactttctaagggtagtattaattctataaactgtacctggtaacaggaaccccaaagaaaatttctgagagggatctcaaaattatttatttgactgagaagagaaacatccgggaaattggtgtggtgctgccaaagaaccttgagagagatggggtgagggtggagaagtgctgaggcatcctgttgtgggtgccaccaggtctctgtgtctcttccaggacgacaggtgctggtcactaagctatcttatcaaggttaaggaatgtggcccacttcacaccccctaaggtgtrtgacttcttggcttttgcatgagctatcctctgcatttggggatgtagatcctgttgtgctactggaattccaagcacatgaattcctatttttgtttaggtggaagatcatcttgatagaaagagaagcctacaggtagctctccacttctgttgaggaacagcctctgacatctcacattctagatgcccattatggaaactgcagccggttagccattggacattgatgtgccatttatggaattccatagtcacaggaccagcagagaatatagaatgctcaggaaatttcacactggttgtccttgaaggttattaaaaatgatcgaaatgacactccaaaaaaatcacgtgtttaaaattactcaggaagtttctctttctctctctctgtctctctctctgttttgggggtaatgacaagacatagaaaatatattactttttcaactaaataatttagttgcaggaaaaataatttaaagtcgctgaaatgtactgagataatggatggtattggagcaaagtaatgactctagagaaaattgtccaagatgagtggggagtgacaagtctggttatgactcttgattcttcctgatccctagtaggtaatatcaaagcagatgaaaagctggcatgctttcagaggggggcactgtgggcagagctgtgctaggtcaagtcagtaactgttctcgttgtggagagtgactggtgtatgtatgtgtgtgtgtgttgggtgggaaagggtaataaatggatttttttttttaattaggggaagtggaatttttagagtgtcatgtgacgcatcattgtttgagaggataccgttgacatctctgctaactatctcttgttgattcaatccattagtgwattacttayttttaccataggcaagatgttggccttgatacaaatgaatgtggagaagtacaaggcaggwtttgccagctgtcaacttataatacagttgaagatataggcctatatatgttaaaatgataataatattagccaggaataataatatggaatatttattatgtgctgagcataataagtactgttttacatgtgcgaattaattttgtcttctccaggaccgtataaattaatactattattatctccatttactggatggggaaaatgaggtattgaggatttctctatgttgctggagactgtacagctattaagtttggtttatctagtaattgagctagttgatctagctggtggctctagccccaccatttgattttttacctaggatattgtttaccatttwaaaaaaaattttcaattgactgctgggcagctccctttggctatttgtgggtctagatcaaggcttagagagtttgggaagttgagaatggggcagacttgtcctgggagattctcatgaggctcctgaagctattggctactctctggaaggcacatgataactccaggttgactacctaggtagcttttactgatccctgtgggttactttttctgcaagaaaatacagggatgctttgcataatgatgtgttggttaacaagacaccatgtgtacgatagtggccacataagattataataccatatttttactgtaccttttctatgtttaggtatgtttagatacacaaataccatttgttttacagttgcctacagtatccagtacagtcacatgctttacaggtttgtagcctagaggcaataggctgtaccatatagcctcggtatgttctaggtttgtgtaagtgcactctatgatgttcacacaatgacaaaattgcctaatgacacattcttcagaacatatcctggttgttaagcagtatgtgacacccaggcagtaggtgatgagtgcctaaagccatgtttattcttgctggatggccaaggaagcttccttaggaaggagacccctgctgctccagatttatctgaggtcaatggcatgctggacctggttctttgcagctgtgggcttcacagtgacccaagccctttgctttcttgactttccacagtgtgcaaaattcctttaattaaccccaagcccatgcagaaatggaaatggtcagtgggcaaatatttatctacgtttgtcctcacattgtcattattattataattttttaatataatcattataatttttaacamataaatctgattagatcaccatctgccatgtcttacctctgaaatccttcagtggctcctgatttgtcacccagagtgtaaagtcaaatctggttcactcttattcaatgtcctttatgatctactccaatgaacatatctggttttcatgccagtgccctgcatgcagtgcgtgattcactcatgaatttgtatattcaacaagtatttattaaatatgcaatatgtgctaggttctgttccaggcactggagatatggcagcaaaccaggcaaaaatgcccataattaataacagctaacatttttgagttactgtagttaggctttatgtgtattaatgtatttaatcttcaaatgaggtagatatatcattagttttattctagagatgagcagactcrgataagtggtttattgtagaagtttaaaaaatacttttcctgtaaatctgtacttaggaaattaacacctatttattattttataccatttgggtcagagcatacatattgtcccagaacttactttgttttctaataagtaggctgtgaatattttcctgtgttcctaaatattcttctcaggtgtgattttttaatggtagggtagtattccattgttcagatggactgtactctttctctattataaataatgctgtcatgaacatccatattcatccttagctcttggattgtttccttaacaatgattcctagaagtgaaattacagggctggagcatgaggctgtttttggcaaatggttgctaaatggttttctggaatggtttactaactytctctcactccagcagtgcatgagtgtgcccttttccccagtgttgccaaatctagagactgttattgttcttactctttgccaacttaatggacaagagttttaatcttgacttcatttgcgttttcttgagactaaagactgaaaatttgtatttcttttttgagttaccccatcagtgtctttccaccctttacttttttttctattgctgtcacccaatgttactgtgcaggtgatatgtaagtagagagaagtgtcccaaatggtcactagggaaacacgtcaatggggtgtgtgtgtgtgtgtgtgtttgtgtgtgtctgtcataagtgaggtgaaggtaggagtggagactaacctgagtatgttgattgtattgagccactagataagtctctgtccattactcactgctaacaaaggcccatcctcaggaaacagattgtggtctgccctgatttggagtcctgctcctcagtgtatggtttgagattcagcagcatcagtttctcctgatagtctattggaatgcagaatttcaggtgccgtttgagacttgctaaatcagaatccgcatttattcagatccctgggttgttcatatccacagtaaaatctgagaagctccagactcgtctttccggaggtctgtgtgcaatttcagcttgacttctgacaggtgctgctgattttagatagtgtagaaaatgttgctaaatcagaatctgcatttattcagttccccgggttgtttgtatccacagtaaaatctgagaagctccagacttgtctttcaggaggtctgtgtgcaatttcagcttgacttccagataggtggggctgattttagatagtgtagaaaatgttggtgcttctgatttagctccctgcacttcccccattcctaatgactaataataataactgtaagagtagctaatatttattgatactgtgccaggaaccacgccaactaccttctatgggcatcatatgcagkccacctcttcaactcctttagattcttatcccccatctcaccattctatgttttcctgttctctcaggcaatcacaagagcaagccccatgctctccctgcaaatctgcttcattgacttccaccctgcacacgggtggcctaaggaaagccaggggaatctcctctcctgttttctagtatccttgcacatgaaagcatgactataataaaaatagactgtaatgagaaggtgaaaaatttactggaaaggtgctagtgaaacagtccccaggaggtttttccctctctgtgctcttatttgtaaaagcttggagtcacagacaaaaagctaagcctaatcctgtcttagaggaaagttatctagaacagctgaaaaacacctccccaagcttcttttttcactttctcccactcttcctgctcacacagtcctgctgtctgccaggtttgcttgatctttgatggatggcttcttttccttctcctccttggtttttttattcccctcatgctctctctggggggtcggggtgttggataagtagttctgcagaaggctgcacgtacatgtgtgggacggctacaggcataacatcctgagagggaccttgcctcgtagcttgttgatttatggtcatgacctaacctggccctgtttttgctcattttcctcctaaaaacaaacttgcaccacacagcatgtttttttagttaccagagttgatgacactgcatgactcctctgtttttttgaatagagcttcaccttcctggaagctgatggggcttcttggagaagcaggactctcactcctaactttaatcctcccagaggtacagarcagaactctgccatgggggtttcctggaagtgagattccatggatgtgtctgtgccaagagcagcatttctgcctggaccttatcttcatcttctgccaccttggcttgttgttaaatgatctcctctgtgagactctgccatggataaatgttccctccagaatgagcctttgtccaagaaaagctgtcaataagatttatcacatatgctgtaatctaactgtgtaggatctagaagaaagcatcttagtatgtgatggctgtgaaaaagctcatctaacgttatggggaaaatcaaccacatgtagttgcagagcaaggggcgtgctcggtccccttggatcattcttctaggtcagatgcacttgcaaggttactagggttccccaagactggagggaaatgctccttttctgagtcaagactctcatgactccatttgacttcaggagcagagtgggaacaaggaaatacaacccatcctttcttgttcctgtggyaaattcatagatgtctaagataggctcttgtcatcaagggactctcagatttcttcacaaatagcagcagttcaacaaggctcagcaacctgcaacaagatcacttttactaaggtagtcaaggaagacttcatagacaggatgaaacttaaggtaarttttgaarggcatatccatataagggaggcatttcagacagagagagatacgtattgataacatrtatcaggcctatataacctctcagaaaggggcactttttgcttttccatttatgtaaacactctgaaataagttggcacaatgttcctgaaatacctggctttgaggaagaaaagggtatgagatggcgcctttccccttttgtcgctaccataaaataagaacaccaaggacaggtggatttctgacagttcttagaagatatttttctcactttttaattaactgttataattcccagggtggattatacttttccccctcattagggtggtgggggcactgttgaagcataacccactctatctggtcttgtggtcaggtgactccattctgtcaaaacccacagacagaaggttccataggggagaggggagctttctagtaaagaaagggtgagcaatcagagcatttgagaggcagaagcagttcctagctgggctatctcacttttytttttgttacattcccgtcaaatacagatttctactgtgccaggtacataccaaatggggaacaggaaaaaggaggaagtggggattgaagccgcttgtttggaagtgagttttctgttgtatgctcttcccattagcccctccttatcttggggtcctctagaagtgattactaaatgttacatgtcaaaagcctacagggccacccagaaattttaccaaatgttcggcaaggcagcctgtcaatttagtaatggccaacagggagacataaacagctgggccagccactctgttctttcctccaaactatttcctggtgtggatgtcagtctatacatttttttgagtcagatcccagtcatctgcaagtagtggtctgcaaatttgttaatgtcacactcaccagcccatgtcactcttcttgccccaaaataacaattaagaactaattatttagtatttaaaatgttttagtgtagtagaaagagcatggagtttttgtcaaatagacttggttttgataccttactggcatttgctaactgtgagatggtggatgacttgctcaacttctctgattctcagttttttggtctgatacactcagcttatacatttatggtagaggttaatagagtggcacgtgtgcagcatttagagcagcagacatttgcaatttttcatttagcttttaaatcgatatgtaataattgtatatatttatgaagtatgtagtgatcaaatctgagtaattagcatttccttcatctgaaacatttatctttttttgtattgggaaaattcaatatcttctcttctagctattaaaaaatatatcatatattattttaaccatagtcatcctacagttctatagagcactagaacttattcctcctacctagctgtaattctgtatcctttagcaaatttatccctatctccctcttcctgctacacttccaagcctctaaaacctctgtcctaccttttacttctaagagatcaactttttaagcttctgcatatgaatgagaacatgaaatgtttaactttctgttcctggcttatttcacttaacataatgtcctccagttctatctatgttgctgcaaatgacaggatttcattcttttttatggctgaataatattaaattgtgtttatatactgcatcttctttatctattcatccgttgttgggcactggggttgattctatatattggctattgtgaacagtgctgcaaaacatactgatttcctttgctttgcataaatgcccagtaataggattgctgaattataggatagttctatttatagttttatgaagaacctccatgctgttctccaywgtggctgtactagtttacattcccactarcagtatrtaagagttcctttttctcttcatcattgccagcatttttttttgtctttttagtaataaccatcccaactggggtaaaatgatatcttattgtgattttgataggcatttccctgataattaataatgttgagcagtgtttcatatatttgttggctattgtatgtcttcttttgagaaatatctgttcagatcattgctcattttttcatctgattatttgtacttttgccattgaaatgtttgcattttttgcatattctggatattaaaccactgttggatgaatagttgcaactattttctcccattctttagattgtcttttcactctttcagttgtttcttttgctgtgcaaaagcttttagttcaatagttttttcatttgttgcctgtgctgttgaagtcttattcataaaatcttttcccaaaccaacatcctgaagtgtttcccctatattttcttctagcagctttgtcgttttgtgtcttacatttaggtctttaacccattttgaaattttttttaatagggtgagaggtgggagtctaatttccttgttcagcatatgggtatccagttttctgagcaccatttattgaaaagattttcccttccgcaatyaatgtacttggtaccttagtcaaaaatcagttgttgtggatacatggattaatttctgggttctctattatgttccactggtctatttgcctatttttatgccagtacaatgctattttggttactatagctttgtagtaaattttaaagtctggtggtgtgatgcctccagctttgttctttttgctcgggattgtgttggctatttgaggtcttttgcagtagcctgcaaaattttaggatggtgttttctatttttatgaagaatgtcattggtattttgataggggttgcattgatatgtagattgcttttgttagcatggtcattttcacaatattctttaaatccattaatatgagatgtcttttcatttatttgtgccttctttatttctttcatcagtgtgttgtagttttccttgtagagatcttttacatccttggttacacttatttccaggtattttattgcttcygtagctattctaaatgaaattcctttcttgatttcttttttagattgatcgctgttagcatataaaaawgttactgattttggtatgttgattttgtatcctgcacctttactgaatttatcagttataagagtttttttttwaatttttgtttattttttgggggggtggagtctttagatttttctttttttctttctttctttctttctttttttttttttttttttgagacggagtctcactctgttgcccaggctggagtgcagtggcacaatctcggctcactgcaagctccgcctcccgggttcacgccattctcctacctcagcctcccgagtagctgggactacaggtgcccgccaccacgcccggctaattttttttttgtaattttagtagagacggggttttaccgtgttagccaggatagtctcgatctcctgaccttgtgatccacccgcctcggcctcccaaagtgttgggattgcaggcatgagccaccgcgcccggcctaggtttttctttatgtaagatcacttcatttgcaaatggacaattttacttgcttctttccaatttggatgccttttgttttcttctcttgcctaattgctctggctaggacttccagtgctatgtcaaataagagtggtgaaagtgggcatccttgtctttttccagttcttagagaaaacgctttttgcttttccctgttcagtacgatattagcggtcacttatggcctttattgtgttaaggtactttctttctacctratttatgaaagtttttattattaaaggatgttgaattttattaaatgctttttccataatatattcgctgaaatgaataaataatttttgcaccatttttgcatctctgggatgaatcccacttgatcatagtgtatgtttttttttatgtgctgttagatttggtttgctaatattttgtcgaggattttaacatctatatttattggatattggtaggtaattttctttttttgctgtatccttgtctggttttggtattagggttatgctggcctagtagaatgagtttagaagaactaccctaccttaaatttttttggattagtttgaaaataattcatattagttatttaaagttttgtttgaattttgtagtaaagcagtgaagacttttctttgttgagatactttttaaatcaccaattcagtcttgttacctgttattgatctgttcaagttttatatctcttcttggttaaatcttggcaggttgcatggtccaggaatttatccatttcttctaggctttttaatttattgaagcattcataatagtttctaatgatattttgtatttctgtggcatgaattataacatcttctcatttctgattttatttatttgggcctttttcttttttaactctagctaatggcttgtccattttgtatatcttttcagaaaaccaagtttttgtttcattgaactttcttagtctctcttttgtttatttttccttttattttcatttatttccttctattaatttttggttttgtttgtacttgcttttctcattgtttgaagtgcattgttacgttgttgttttttgaaatagttccaatttttgatgtaggtttttattgctataatcttgtctcaatactgctttggctgtgttccataggttttggtatgttgtgtttctattttcatttttttgagaaatttatgtattatcttattatttcttcacccattagatattcaggagtatgttgtttaatttccatgtatttttatggtttcaaaaatgttcctattattgttattgatttttcattttattccattgtggtcagataagatatttgatgttatttattttatttgtttatttattttttagcgacatggtctcactatgttgcctagattagtcttaaactcctgggctcaagtgagccacctgtcttgtcctaccaaaatgttgggattacaggattacaggcatgagccactgtgtctggctgatgctgatttttaaaattattttgaggctaggcataatggctcacacctataatcctagcactttgggaggcttaggtgggaggactgctcaagcccaagagtttgagaccagcctgggcaacatagtaagaccctatctccactaaaaatkaaaaaattaggtagatgtggtggcatacacctatagtcccagctacttgagaggatgaggtgggaggattgtttgcacccagggagttgaggctgtactgccactgaactccagcctgagagacagagcaaaaccctgtctcgaaaaaatattgtattgacacctgttttgtgtcctaatgttttgccaatactggagaatgttacatgtactgataaaaagaatgtgtattctgcagctgttgtgtgaaatgttctgtaaatttctgttagatccattcagtctatagaccagttcaaattttatgggctttttagttgatattacatctagttgatctgtccaatactgagaatgggtattggggtctagctctacctttagatctgataatatttgctttatatatctgggtgctcttgtattgggtgcwtatatacatacataattggtatatcctcttgccgaattgatcctgctgttattatataatgcatttttgtttttttttttagtttttgacttaaaatctgttttattgtatgtaagtatagcttctcctgttcatttttgatttccatttgcatggaatattgtttttcactttcagtctatgtgtgtctttacaggtgaattgagtttcttataggcaacatatagttggatcttttaaaaatccctttggtcaatctatattttttagttggggaatttagttcattttattgattgtttctcattgttttgtatattctttatttcttactttctctctttttgtttattttttatgtttggcatggttttctgcagtgataaggwttgtttctttttctttcttttttatttttttgagatggtgtcttgctctgtcacccaggttggaatgcaggggtgccatctcggcgcagtgcaacctccgcctcccaggttgaagcaattctctgcctcaacctcctgrgtagctgggattacaggtgcccagcagcacgcctggctaatttttgtattttgtattttagtagagatgggttttcaccatcttggccaggctggtcttaaactcctgaccttgtaatctacccaccttggcctcccaaagtgctgggattacaggcgtgagccactgcacctggcctgatttgtttcttttttgtgtatttgctctatctgcaagttttgtactttcatatgttttcatgaacacatgcagttactatctttttgcttccagaggtaagactcccttaaacatttcttgtaaggctaatctagtggtgatgaattccccaggtttctggttatctgagaaaaactttatttctccttcatttctaagaatagctttgctgggtatagtattctyggctgatggatttgtttgttttttttttcttttagtacttcraatatttcattccattctttctggcctatacattttttgctgagacatctgcaattaggctaatgggtattcccttatatgtgacttggtattatatttttctctagctatttttgtctttgacttttggcaaaactcaaatatgccttggagaggacttgtttggattaaatatatttggagattttgagtttattggatctgaatgtccaccccttttctaagacatgagaagtttttcactattatttcattaaataggtttccttcaccttttytcttttcttctctttctacagctcccataatgccaatatttgttcacttactgatgtttcatacatttttgtaggctttttattcattctttaaaatatattttttttgtctgcctgagttattccaaaagatctatcttcaagtccataaattctttcttctacttggtctaatctgttgtttaagttcttgattgtactttctattgttttattcattgaattatccagcgtcaagatatctgtttggttcttttgtatatttctttattgaatttctcattcaaataatgaatttttttattttgtttaaccatctatctgtctcttaatatctatctcttatatctcttatctatctcttatatctcactgattttccttaagattattattttgaattgttttcagtactttgtatatttccttrtaattgaattttgttactttagaattgttttgttcctttggaggtgtaatgtttccttgattttctatgtttgatgtgttcttacactgatttctgtgcatccagtagaacagtcacctcttccaattttatgaaatagatttatagaaaaaggcttatttcttttttgtgtktgtttgtgtgttttgttttttacttttacatttgttttaatttacatctttgataaaaattattcaaatattttgcctcaaatacaattctatttttttggcagcaaatccaggtaggattattttttattagatatttttcttcaaaaaaaaatagggatacatgtgcagaatgtgcaggtttgttacatagatatttgtatgccatggtggtttcctgcacctattgacccatcctctaagttcccctccctcacccccataccccaacaggccctggtgtgtgttgttcccctctctgtgtccatgtgttctcaatggtcagctcccacatatgagtgagaacatgcggtgtttggttttctgttccygtgttagttggctgaggatgatgacttcaagcttcatccatggctgtgtgaaggacatgatctctttcctttttatggctgcatagtattccatggtgtatatgtaccacattttctttatccagtctatcactgatgggcatttgggttggttccatgtctttgctattgtaaatagtgctgcaataaatatatgtgtgcatgtgtctttatagtagaatgatttatatttctttgggtctatatccagtaatgtgattgctgggtcaaatggtatttctggttctagatccttgagaaatcaccatactgtcttccacacaggatgaattaatttacattcccaccaacagtgtaaaagctttcctatttctccacatcctcgccagcatgtattgtttcctgattttttaataatcaccattctaactggcaggagatggtgtctcattgtggttttgatttctctaatgatcagtgatgttgagctttttttcatatgtttgttggccacttaaatgtcttcttttgagaagtgtttgttcatacccttggcccactttttgatgggttgtttgttttttttttcttgtaaatatgcttaagctcctcataaattctggatattagacctttgtcagatggatagaytgcaaaaattttcaaccattttttaggttggctgctcactctgatgatagtttcttttgctgtgcagaagctctttagtttaattagatcccatttgttgattctggtttttgttgcaattgtttttgccatttttgtcatgaagtctttgcccatgcctatgttctgaatggtaatgcctaggttttcttctagagtttttatggtttggggttttacatttaagtctttaatccatcttgagttaatttttgtgtaagttgtaaggaaggggttcagtttcagttttctgactatggcttgccagttttcccagcaccatttactgaatagaagatcctttccccattccctgtttttgacaggtttgttgatcagatggttgtagatgtgtggtgtgatttctgaggtctctgttctactccattggtctttatgtctgttttggtaataggaccatgctgtgttggttactgtagacttgtactatagtttgaagtcaggtagcgtgatgcctccagctttgttctttttgcttaggattgtcttggctatacagggtcttctttgattccatatgaaatttaaaatagttgatgagagcagcaaaccaacatggcacacgtatacctatgtaataaacctgcacgttgtgcacatgtaccctagaaattaaagtataataataaactttaaaaaaagaaatttaaaatagttttttttctaattctgtgaagaatgtcaacagtaatttgatgggagtagcattgaatctatacattactttgggccgtatggccattttcacaatattgattcttcctatccatgaggatggaatgtttttccatttgtttgtgtcctctcttatatccttgagcagtggtttgtagttcttcttgaagagatccttcatatcacttgttggctgtattcctaagtattttattctctttgtagtgattgtgaatgggagttcattcatgatttggytctccacttgtctgttgttggtgtaaaggaatgcttgtgatttttcacattgattttgtatcctgagactttgctgaagttgcttatcagttcaagaagtttttgtgctgagatgatggagttttctaaatgtaaaatcatgtcatctgcaaacaaagacaacttgacttcctgtcttcctctttgaataccctttatttctatctcttgcctgattgccctagccagaacttccaatactatgtcagataggagaagtgagagagggcatcactggaaaaagacttatttctatagatgggtcttagggtgtcagttgggtaggatgtgttggctttaattccacatggacacagtagtctctagtcagtttcttcagctgtaattcgtgctagtgatttttgtatctcagtggcctaggctgcaagagtttgtggcagcagtggcacaactttgctggatgtgtgcttgctgggctatttcttaggtggagggagggatgtgagtgcacataatgtccatggtaagtcagctagctgggggtctggctcactgaggttggggctatgagcctgttactctagccaggggtgtgggcatacagctgcttggctgccctgggggtgtgtccttgaggggcaagcccactgggctgtttttcaggcctcaagaacaggcacacagtcatttggtcagtctgaagatgtgtctgcccaaggtggtctgccaagctgtttttcaggactttgttgtgcgtaggggcatgttcaccagggatagagtcgcacatagtagacaaattataaaagataattcaagtctctttatctctttttggcataagcagcagatatcctgagcatcaagaaaaaactcaagtaatggaaagaagcaggattactactttacagaggccacattcaaaacttttttttttcatgaaacagctgtttgtaactctatctatagtgttcactgctttattagaatttttcagagtctctttggaggactatattccagtttgagagaaaacctttctccttgaggataattgactctatcaattccaagtgctggtaattaatgatagtagagaactggatgcaaatgatgtttgctaagacccacgtgagcatattgctctgttaagatacacatggtctctaagtacaatttttggagttgagagcaggaatacaattaatgaaatatcctccctcaatttaccttgtctcaaaactcagattaagtacaaggtaaggtgcttaaacagttttaaatttagtaaatatatatgatggaagccatttgagaaaatgatttttacagttttaagatgatgtggtccaaatgtttggcttccacactaccaccatcttttgagttacaacatttgatctgatttttctaatccatgggctatcatagttcagtttagtgttgaataatttcataaatcatattcatgtactggtccctctgttctttccaagaatgtggctttgatgaataaacaacagttatarcatgtttgtttctatctcatgtacatccaaaattataaaatctcaatgttgcacaaactcaagagtttcaccaagtatattgtattggcttggacttcattggttttgtcagtctttactctgctagactgggaagwaaaagtctcctaaatgtgagattctgtaatttttcctttgaaacaaacttcatcttgcttttgcttaatgaggtcaagaaagtagggctgagggtccctcctgggagcatgtggggacctgtgcaggctactctatgactccaatttgtagctagagaatgaagaagagcagacctgggatggacacattttgttcacaggtacagttggtcactgggtcctccagtagacatgttatggctgaaaactcagagtataggcaatatttacccccttttaaattacacaaaatgatattatcagcaaagcagccacatttaactttagtagtcaaagggaaaaggagacacttggcagcttgcaattgctttcctttttagtctttacagtaatggaatcgactcaaactggttcatcagagccaattgtacccatctcttcccaaacccatgttcagtgacatcatactggtaacttaatattgaccattgtgggagtaatttatatcacagaaattggcaaatgttgcaaatcaggacttggattttttttttatcttcagaggaccagttgttaaatatttactagcataccactggttttatatctaacttgttatttcctttgataacacatcatgaaactccttctcctcatcacagctaatgtttattaatcactttatttgagctgaacactgtgctaagatacttcacatgtgttattttatttaattctcacaacaacctcatgaggtttaagtctcagcttgtggttgaagatgcacagattttatttctcaggtaacactttcaaataaggaaaccagagctcaataaggtgatataacttttttttgagatgatacagcatgtaagtggtagattgtagaatgtaatttctggctgactcatgcttttaaccacatgcactatggtctttcccagcataggttttgtagaaaactgttctgggctcaaaataatgatatcttggttctagtgcactctctgcacccagtctgacacctaatctctcagaacctcagtgtctgcatctataaaataaggccaatgataataactccacctggctcagaggatggttttaccacttaaataatagtatacaaaagatttatttggaaagcttaaggactatataaatgggagataacattacaggctaagtaaaagtaaatatagtcacacacatgcacacacacacacacacacacacacacacacacacaaaattccagtgtagaagatttggctgaagtgagtaatttatataaaggcaggttctgaggactcttataatgaatattactgggtaaactggcaggatgttcggcttggcaatatctgatcttatctcttggaattctttggctttggcactctctagccttcccagacagtctgactggtgatcaaggtagccctaatctcatgggcagatttggatggtggatgccttctaggaatcaaattgttaacaagacaggtcagtgttgggaagttgacatttaatgactttagggagaatttctgctatgttatgaccatgttttaataaagaggtccttttgctgctcccagagctatttatgctttcaatagtaagcgtattccattgttattaatttcaggtttattttctgcactatattgaactctccatgatatcatataattatttgatcactatagaatctccagcaccaagtactgagattagcagatagtattrctttgtaaatatctaccaaacttgcacttgcatgggtgagctaacttagtctgtttctgtgcacttattcataacaggtcctcgtttatcctaactacttctcattccgttagtttgctgaattaatgaacaagtatgtatcactgttgcataggcaccttggacaaatctaagatgcgtgatctagtataatttttaaacaaatgatttaaaagaatttcagatgatttttacattttcatgtctgatttaacttaccattgatatcaatcttgctaactttccttcactggatgaaaaatgctaaggctctcaacttctgtcttctgcatttcgttctactaagctcagtgaggaatttgatttcttttgtaatatggtataagctctcaatatggcttcaaaatagtctgtatttgtgaaagcttcacatgtgactctgatccacaactagagttgctggcattgagttagagaattctatttgctaagtatgcctttttaactggaaggagtgcaggatagtgcttcagcaactatgtactctattttcctacagatgaagtatgaacaatggtaacaaagcaagtaaaatgtagttatctaagcacctagtgaggttcttcatttgctgcttggacatcttaataaattagagagcaaataatcattactttgataatcattcaaaataatacttctacatactggctacatctcacaagtaatatagatgatcttagtggtcttggctataaatcttttttgatgtaatttctaaaacttacactaatcagaactagactggtataatcagagtggtccatcttctatttagtatttcaagaagttagaaatatcatttcagatacattattaataactttatacctttctatgagacaaataagaacaattatatttttgataatagactagaagttctagggacagcaaattaaagtgtttaaattgcaagtagatgtctggcagataatcatgctaattatctggtaacttatatgtcaagcctaacaatttatatctgaacgcatacatctacctgtgtgtatgcatcaaatataaagtaacctccccagtactttctcttaaagatcagcaaatagctgatagattagtaactccayggtcctgatattcaatattgcagcccatgtgctcataggtcagayagataattaaagctacttactgcttattaaaataagtggaccaggagaaaatatgaatcagggaacttagtattaatctcactagatttgtttgcttttttgaaaatcctctcaatacaaaagtttgtagaggagtattccttacacttctttaacagatagaccccagtgtgaaaacaataacaacaactaaaaccccaaaaccaaaatcagaacaccccattgtactgtagctagtcatcactagtaattcaaagtatagttgttagaattactgggttagggaggaaatatttttgctaaaaagtacttttattttataaaccatgagttattaatttgtgctgaagacagaaaagatattctrtcacttttggaaatatagccacttgtaaagcacttgcctgccgtcagaataggaagcctcatggcttataaatctagactgtctaaggagaattattgttggactggattgtataggaggtcagggaacaaataaaagtcttatttaacaagcttggggagaatgactcttgatgtttacccaggtatctgatccaaagactagtatatttttccatcatttattaatcagtgcaagcaatatttattaagcatttcctatgtgatgtactgacttcatgtgayttattagtaaaagctattcctgagagactatgtactagaagaggtactgaggaggagatggtgggtaaactgaagatgggttactaggaacatttaaggcttccaaactgcctgagtcccatctgtgatcatgccacatctgaaagtttgtgtccattcctgctgccaacttattaatgatctagctrtttatgggtgttctatcctttgtttattccactagatttaatagcctgtaaatgcctgtaaatgccctgggcctgccctgagcaaggcaggtagtgtatgataagacctttactaatctggaaacagtctgcttccgtactgcggtgggtggtattgggtatagaacagtcattctactaacccagtggttagttttttaggctaggaccatggggcagtgccatattgctttctctggagaacagttattcattgtgaatggctatccttagccatgagaggtattagagggaatagtgtgctaggaatgatgtctgggatgttaccatcttctctaaaaagactccctaattaatcaactccttgttttccccatgagtgtcatccttttaatgttcagtagagaaaaatcaccttccagagggtaagagatggctgtcatttgcaaaaagtatgactactstcatggcttctgaggaaatggaaaaagctaggatcagtgaggaaaggcatggacttaaagccagtcatgagcatgaagcacattcgtgatggagtgctagaggattcttgccatttgcattgaacatctgctttccagcttccattttagttatgtaaacataccagaatgagttaacttgggtggaatctcaaatcattccttttggggataggatatgccagaacggcctgatatagggatatgagcaggcatctcaggtgagaaatctgtgtcgcttactttattccccattaaaaacctgcattcttgttatttacatgggctttcttctccctttctccattcccctttgtatctggtatctgtctcttccctcgattcttccttctttcccaggtgtgtttgataactgctcccacactgtcagtgacaaaggctgggccctggggatccgctcagggaaggacaagggaaagcgggatgctcgcttcttcttctccctctgcaccgaccgcgtgaagaaagccaccatcttgattagccacagtcgctaccaaccaggcacatggacccatgtggcagccacttacgatggacggcacatggccctgtatgtggatggcactcaggtggctagcagtctagaccagtctggtcccctgaacagccccttcatggcatcttgccgctctttgctcctggggggagacagctctgaggatgggcactatttccgtggacacctgggcacactggttttctggtcgaccgccctgccacaaagccattttcagcacagttctcagcattcaagtggggaggaggaagygactgacttggtcctgacagcgagctttgagcctgtgaacacagagtgggttccctttagagatgagaagtacccacgacttgaggttctccagggctttgagccagagcctgagattctgtcgcctttgcagcccccactctgtgggcaaacagtctgtgacaatgtggaattgatctcccagtacaatggatactggccccttcggggagagaaggtgatacgctaccaggtggtgaacatctgtgatgatgagggcctaaaccccattgtgagtgaggagcagattcgtctgcagcacgaggcactgaatgaggccttcagccgctacaacatcagctggcagctgagcgtccaccaggtccacaattccaccctgcgacaccgggttgtgcttgtgaactgtgagcccagcaagattggcaatgaccattgtgaccccgagtgtgagcacccactcacaggctatgatgggggtgactgccgcctgcagggccgctgctactcctggaaccgcagggatgggctctgtcacgtggagtgtaacaacatgctgaacgactttgacgacggagactgctgcgacccccaggtggctgatgtgcgcaagacctgctttgaccctgactcacccaagaggtaagggactgggatttggggtgtcctacttgtaggatgcatttctaacatcattttatctgtttggttttggaggcaaatgtgttcacacactccctgaataagacattaatccaccccatcagacagtattaagcttttgtgaagtgctaggtgttctgttaggtaattaggggcacagatgactgagaaaagagacagtcctcacagaactcactgtttgtggggcagaaagctgtgtacacagtgtgaagcgcacccaaaagcatatgcaccaggtacttgggacacaggaaagctgaacaacttactctaccagaggaggccaggaaatcttcatggagaacaaacaaggcatccaggcctagacaccagtcaatactaattacacgtgacaatacttcctatagtcttagcatcttggcaaagtaatacagatctgtgaaaatgtgttaggtctatttagtctaagcagttcagcagtttcgtaaagtttcgtgttacatctcgccactagtctcctttaggtgactgggatctttcactgttgccccattaaattccattctttgtgcrgcatccagaaggatctttttaaaaaggtaagttggatcctgtcatttctcgtcttaagattttttcctccactgcactcagaataaaatctgaaccccctacctgatacacagcctcttaatgcaatctggcctctgtctacctctccatcaccacctatatagcacagcctcgctgacttgattctgttccattgaacagatcaagcttttttctgccctcagggcttttatgtgctgttccatcttcttggaatcctcctttccttaatattcccatggtgggctstctcttgtcattcaaatacctacttagatgttaccacctgggaggcctttcctaatccctcaaattaaatctatcaattactgttayatcaactaatttaaatttcctgtttaacacttagtacttcagataatttgtctttcacrttcatgtgtttgtctgtttttcccctatttggaatatcagctacatgagataggggcccttgtctattctgttaaccactatattcccaaggcctagaatagcagctgacatttagttgtttaagttgatgaataaatggatctggtgtgtctcttgttctgagacagaagccttaagaagattctcatttgacggctgttgcaggggttggacataatagaggagggtaagaaagtaggtaggtagctagtgaacttgttaatatgtgtatgtggacaaggtatccccagtacacaactggtgcctttgttcaaattatgaaaaggcttacctgacctagggtacagggctggtgggaggtggcagaacaggatctcagctyccacccaatgtcttgatggctacttttgtattggacaccatttgtacaagtagttcatggtatccctgtgtgtggggagtcctcttgatatgagttaacactaatagagtggcctgtacttcaagcatgtggtatcaaaaatcgagaatacaatttggaatcaagggacatggttaaattttggagtccttgctacttaactaggtttgcaagttacgcaagtcaygttcggaaactcagaagtcttgtctgtaaactagggatgattgcagtaataccttgcattatcagtattttcagattattttgtgaatcaaatgaaataaagtataggaaagtagctctaaagttttcaaagcacacaaattgttgtaaaataagattagttcttattattaaggctgacagatagcaagcttttatttacataataatgcaaagagagctaatcaaattatcagaactacttgtataagaaaattctgtttggaacaatgagaacacatggacacagggaggggaacatcacataccggggtctgtcatgggctgggggkctaggggaaggatagcattaggagaaacacctaatgtagatgatgggtcgatgggcgcagcaaaccaccatggcacgtgtgtacctatgtaacaaacctgcacgttctgcayatgtatcccagaacttaaagtataatttaaaaaaaaagaagaaaagaaaattgtgtttggatttggtttttagattttggtaaccttaagcagaagctaaacctcactaacagcagtggttagcaacacttaggatcccccagataaatgagaaagtctggtctcctagtttatagtaataacccactgccctgtctgagagagctgtctttcaaggtatccaggtattattctcctcagagtttccctttatttctctgagttcctatcacactgcccttatctgggtgtttataacttactcacctcactgcctgcagaaggggaactcactcctatttatagacccagtagtgttttgaacctttattcataagtgactcttttaccccccacatataaaacctgctttgtggaatacaaaggaaatatttatactttttgatagttaaaaatactaactcaaagtaaaaaagtgctcatggtttaaaatatcaaattataccaaaagacagaaggaagaaaaacagtgtcctgcctaactcttccccatccttctccacactctgtccttgctctgcacaggttactatatttatttttttcacctgtttttttttctggtagtttcctgtacacctccaaatattatatttatattgcttggttcatcaattttaaacattatccattgatttctgatgatacagacaagactaactctcttacattatctccttccttgcccttgcatccttccatataattactattttttgttgaatcaattgtatgtattatagtattatgactgtgaaatgttaattgttgcagaacaaagtactattctattattatatttctttccttgcacagcttcttcccatttccagccccaccccttgagtctctatttttccttcctttcttcttttattctttcttgatattcttgattgttttcaaatgctttattttacccactaatttgtagaatatatttatgaaaatgttcccctcctctgagctgttctaacactaaataaaactcttcttcttcacccttaaaaaaatgttttttayactcctatagagctctctcttctagttaattctattcttttcttccagtcttggccagttgtctktaggtctgctgcacagttgtcatcctgggacttctcttcaatgcgtttttttgggggggttagagctactgtgtcctgaattacatgaatatctcttaatttactaccttattttactggaaaacatcctcaagcaaatttctaagaaaagatgtttcaggtaatcttttttgaaaatgcacttctcagaatgattttattctgccttcctacaaaattgatagtttgacttggtataaaattttggattgaaaaacagtttatctcaaacttatgaagaaattcattaattacttctagcttctgttctgataattgtgtgtatttttataggtgtgtgtgtgtgtatatatatatacacccatatatgtatgtatgtatgtacatatatatatatacacacacacacacacacaaatatatttgcatattcttttagcatcttatccttagccttgttacactagggatttgtaagattattttttagggattgccttttattgttcttttgttgaacactgttcaatttggacacttatgcccctggtctctggaaaaatctcttaaactgttactttgatatttcttcattcagttttctctgttctctttgttacccctgatactcctggggatgaatctactgaacttactctttttctcttttctctcctacgttctctttgttagtttgttctacttttttttttttttttgagatttctttgagtctatctttcaaygcttttatttacttttatattttagcaatcatactttaaaaaccttcttattctttgattatttttaatataatcttaaaaaattttaagataagcattttcaaagataaaaatgtgattcatttggaattgtttttttgtgtgttatatccgatgcatctgaagtcaacttttctttttttattatattttaaattcatgactatcatttatgctggtgactttccttaaatgtctaatgcttattcacagtagaaaccacacttttaaatctctacctatgacgatctaagaaagaataattatctatgaattttctcttttgaaaaaagaaatttgaaggcagaaacatagaggaggagagaggttttctttcttctcagctctcttatacttattttgtgtgtaggtcttttctgccttccctatcctattttttgtgttgaatctttattattaaaaatattaattttttatgackcttggcaaaagcaatattttgaaaaatcattatttatcaagcttctatgatgtgtcaggcatggtaaggtaagcagagggacacacgtaaagactatggaaaggataagggctaacgatttggaggagaagttcagtaattttatctgaattctctgggtttaaatccaggctgaggcattaaaagcagaacatgggatgtggcttttctttgtcatggtttagattgcctgaaaggacttttgattcatagagatatagatctttgggtttccatgaggtcctgtgacttggtggagttagtctctgaactagattagctttgtagagcctccctattattacaattaaatcacagagctcggccgggcgcggtggctcacgcctgtaatcccagcactttgggaggccgaggcgggcggatcacgaggtcaggagatcgagaccatcctggctaacacggtgaaaccccgtctctactaaaaatacaaaaaattagccgggcgtggtagcgggcgcctgtagtcccagctactcgggaggctgaggcaggagaatggcgtgaacccgggaggcggagcttgcagtgagccgagatcgcgccactgcactccagcctgggcgacagagcgagactccgtctcaaaaaaaaaaaaaaaaaaaaaaatcacagagctcaagctcacaattccattatactgttactctgaagggactcaactttgagaaatgctttgcgagtcatctattgagtggagtgctccaggcacagagtctttccactcacagtggaagcaccttcgactgttgagggagagtagtagaaagtgggggacagacctacaaatagatcactaacattcgaatgcaagggttgatgtatgaacaactctcctcacttcccaaatcctgttcaatcttcctgctatggttccaatgtgtctcccaaagttcttatttcctgctatggttccaatgtgtctcccaaagttcatatgttagaaatttaatccctgaagcaacagtgttgagaggtgaaaatgttaagagatacttaggtcatgagagctctgccctcgtgaatggattaatgctgttatcacaggagtgagtttctgataaaaagatgagtttgctacccctctgtcatgtctgctttcttgcacttctgtcttctgcaatgtgatgatgaagcaagaggaccttcactagatgcaggcctctcgagcttggactttacagcctccagaactgcaggaaattaatctctttttttcataaattacccactctcatgtattctgctatggcagcacaaaacaaacaaagatgcattcctaccacccccagcaagaaaccagaaatctagcccaaagtagttcctctcccaaacgctctgagaggagagagagcctgacgcatccagcatcaaacatctgcaacccagatgggcctatcaaagggagagtacttatcaagctctggactggtcaggaggagatatgaattacagatacattacccagccagttgaacagacttaccaagataaaggaacttggaactaggcagggctacataagccagatgtctrtttctacatagtagctgccctgagagatgatctgcgagagttaagggaaggaagggtgttgagtgtccacttcagtaaaatcacaaatgtcattgactattccctgtggtacatactagggagctcagcccaaaggaatttctgtaccctcaggggaacttgtcttccctgacctttgcaggcttcagcttctttttggttattaattgtttctgtcacatttctccctaaaattatgtctcagagttacagttctttgctgctgcacctactttccatcccatgctttctctccttttcgcaatagagttgagcaagtatttcattaaatctggaactctgcttgtctctcttttttggtttctatatctcagatctcataatattgctataatgtggagaaaagtctccaaataaaaacaaatggttgaacaaggcatcaatcatctagtgtctgaccatgctctgaagcagaaaatggggatactgcatatttgttttctctatatttgtttctgaagcctgtgatgggctaatttctgaagcctgtgatgggctaacatctctatgtgttggcaactcattgtctcttctttgcctcattccctgaggtttcactggggagttcgagggcrgaggactcttatacatagcaaggcttgcccatggyacactcccctctaaagaagtcctcaagagggtggctgggaattgtcctgagggatatggcagagagtggagtctgcaggtatacaatagaaagggtgtatcttgggacaggaaggtagaggcacatggcatcaaagggaacaggtgragaagttgatgctgcacagacctggatgctttggattagctgtgctttgctcacccacactcggaggctgttgagccaaaggcatggtcaggctgggcccttgcagtggctggtctgttaaacatcagccaggcttcattataggtttcttttgaagttgagattcaaagttccctgaagccaaaaaaaacacacgcagggaaaataagcgtaaggggtagaagagggcaggaagaaaagaagtggaggagaaattttaaaactaaacagcaaaaaaaaaactgccagttccctcacttcaaaattcacaggcagtgtgaactctagagcaagtgtcaccttctcatggtcacgtcaactggcaatgggaatagaaggaaagaaataagaggaggttccatagataagcacaataagtttacctacaaatagaaatgtctcctgtttattttcctataagccagtttctccacagttccaataggcaccgtattatggagcaaatgaaatccmcagtttctctgttcacctggcttgtggactttcctcctcaggtgagtsgggggctggggagtggtgactgtttttctccttttcatagtttatttctagccaaatagacagacttgtgagtgagccatgtagtctgtctgggttaaaaatatttccttttagaaatttttccagagagaccccagtctccaaatacactcagttattcaaaatacttcggctttttcctaggagttggggtgctatccctggggccttggccaaatgccaatctgtttcagatgatttcacttacaggttccttcctagaatttaagcctaagagtttgaaagacagctgcacacttacacatttttctttgccttggactctggtttgtaattacttcagtgactggatataaatgaaatcttgttggtaggtcttcccctaaccaggccctctttcccttgatgtcagagttgtagagtgggtagtgggcrggacatgtagttagggtggccgtcaggggtttttctgaggttccatcagagcaccagcctctggaggaagctcctgatctattattaatttcaactccaaggtttctctcacttcttacccagagcgctgtccaatggttgtggatctgatttccagagacaaacacttaaataactactacttatccttcaagtctcaactaggatgcacattcctccttcttggaagcattctgttgccctcaaatacaaattagctacctcatttgtatcacttctcatccccctatagccaccaccctaatccaggtccccatcttcactcatctggattattgcaatagtcttttaactggtctcccacttttgcccttgcactgttgccccgagtctatttttaacatagcaatcagagtaatcctattagggtataactcagatcaagtcattcctctccccctaattctccagcagcttaccagcttattcagaatcaaagccaacagcatgactctgatctatagggtcatatagcatcagtcacttctgtggcctcacctcttaccatgctccttattgcactccagccacactggccttctgacttgccagatgtactcctactgcatgatcttttcagtggcttttcacttttctggaatattcttcctccagatttctacacagctaactttcccactttcttctggtcttttttcaaagtcagtttctaggtgaggccttccctggagacctcacgtaaaattgtacacattgtcttggctctttatggtttcttcccctgctttatttttctttttagaatttatcacaaacatgctattttgtttattttgcttaatattcattttctccactagaaagtaaattctacgagggaaggggtttttatacgtttgggcractctcatactataacacctacaacagcaaaaggaacagactaagtattcaataaataattgttaaaaaaaggaatgttcttattctagtacagtggttggcaaaccatggaccatggatcacatctggtctatcacgtgtttttgtaaataaaattattttggaatacagttacactcacttgtttacatattgtctatggctgctttcatgtggcagagttgtgcagttaaaacaaagaccatgtggcccacaaagcctaaaatatttactatctggccgtttatgaaaaaaactgccaacccctgcttaaatacatatttatcataccatactgtaacttcccattcttgtctgtctcttgcacaagactttagtttctttgttcacagttcttggaacacatttgatattttaaaaatgaattagtgtatacatataaatatatatctgtatgtagatggaaaaccaatgacatgacaatgtagggcaagggttttagtagagtaaaaatttacaggcagaggatactactatgtatggaaaaagaagggtattcagagactacactatagtaaacttttctactggtctcattgctatggtagcgttgccccatttagatctagtaagtaaaataactgacaatactcatggaagtgtgaacctgttagctaaggagggaatggctttaagccattttcttcattaacttgttatttgagtacctgagtccccaggaggctctaaaaatctgaaacatggggtaaattttgatgagcataaaaatagctacaatagccaggaagtattaataacatgaatcccctttacctagcgagtcagtgaatgagaaaaagaccagactccaaaaaaggaatacaagacctcttggacatgatgttacagattaggcaagatccttatcaggcactttagttaggattttgcaattgtagggaacagacctgctcatgttaactgcagaaactggatttattgtaaaattacatatgggctgaaagtggagctagagagttgcagagactgtggcattcaggaactccatctctctcaaaggktacatatttctctaaatcttagttcattctcaccattcatgtctgttagcaatctgctagattactcatagtttctgctcccttatagctttagtttaaaacattgcttcagcttgctctggctcctaatttatctcattgagtttttcccttcagatttatatcctattgacagttgccacagtttctcatagtaccttggttcaaattctgargacagtcagtgtcaactggcctaactcatctttacatgttagttcggaagtcataggtttctggccaaccttgggtttaagaaaccgtggccaaaagagcaggatagctggagggctcctcagagctccaggtctgcaaatctctctcagctgatgtcaaccctactcggagtagaatgagctggtttttcatctttactacttgaggatgaagcttctgacatgtttaattctggtaatgtccttttctttagaccttagaccttggtattcttggtgatgtaactcccactgaattttaatgctaattttactcttggaattgcatgatttagatttcaaactcaaatatgctaggctatccaagtgaagtacctggttcatagtaaaattatatataatattttatatatatacacacacacayatatatataattataccaatgaaacaaagcattttgcatggattattttatttaatgctcaccatagctccaaaaagtaaatattttgattatatgtattttatacttaaatttagatagtcaaatacctatcattatgcaatagcagacataagttaaactctgacttcagagcctgattttccaactgcgattctatattgtgtgttaagtataagtcttacacaccagcaaaatgtttagctgatagtggataaaaactaagtatttgttgattttaattatgtaatgattatttcagagaatacattcttgaagaatgagggcaaggaaaggaaaactactatgggcttagggattaggaaatactttatagaagagatgagtttctttttttagatggagtcttgctctgtcacccaggctggagtacagtggcgtgatctcagctcactgcaacctccacctcccaggttcaagtgattcttctgcctcagcctcccgagtggctgggactacagatgtgcggcaccatgcctggctaatttttgtattttyagtagagatggggtttcaccatattgaccaggctggtcttgaaattctgaccttgtgatctgcctgccttagcctcccaaagtgctgggattacagtcatgagccaccatgcctggctgagtttcttaaaatatgtacagtgtagagagcagaaagaagagtttgttaggaaaggtcagttacatgaaccaaagtacagatgtgcaaacatgttaaggccactctaaaaagaacagcttgaaaggaggaaaatttcttagagaaaagtgaggaagaaaactggaaaagttatactggacaatagtcttagatgttgggctaagggatttgaaccataagcaattaggagccataaatgatatatggatatatacatgtctgttttaacagatatatatgttttatttttatttttattatttttatatttatttttattgatacctaacattttatgtattgattgggtgcatgtgrtattttgttacatgtatagaacgtgtaatgattaagtcagggttttcgaggtatccatcactttgagtatttatcattgctatgtgttgagaacaattcaagctcctctctcccagctgctttaaaatatataatgcattgttgttaactatagtcactctactctgctgttgaacagtagcgcttatagcttttatctaattgcatgtttgtacctgttaacctacctctcttcatatctacttccacacttcctaagcctctagtatctatcattctactctctacctttgtgaggtcaacttttttagctcccacatatgagtgagagcatgcaacatttgactttctgtgtctgagttagttcacttaatatatgtccttcagtttcattcatgttgctgcaaatggcagatttcattcctttttgtggctgaatattattccatcgtgtatatatacatgttctttatccagtcgttcactgatagacacttaggttgactggactttctattaaatgtatatgactacttgtacctctgtcctccatttgccctaatatctcttcagtttttccatatctctgctgtcctgtgctgcatttgaatagctgttttttatttactgcccagccaactctttctttaggtttggctaaccggcttttataactcaccaataaactgttaatttttattagtgtacttttaatctccataagttgtatttagttctttgtcacatctgcctagccgtttttaatttatttttgttaattcgtaatttggatatgctgtttttatttttaaaagcatgttaaagtgatggatacatgaacttacataagtaataaaaacacccacaaacaagtatgagtgaaactggggatatctgaacaagattgatggattggatcaatgtcagtatcctggttgtgatactgtattatagtttttcaagatatcatcattgaaggaaaccaggtaaaatgtatacaagattactctgtaatatttcttacaatgggaatctacagtttatttcaaaagaaaaaatttaattaaaaacattaggcatttaaaaatattttacatcagctactctgatatttgatattactgcttgctcttcctcacagtgttttgtttcttcatgggtgctttatgatttttgattgtgagtccatgttccttaaaactttatctgttcaatttctttccagcctgagttaaatctatgctgtgttacttctgacaattgcctagggcactaccaacataaaaccactttaaaatatattattggcatgaatttttttataccataccatcttatgaatttgcggtgcaaatctgtgatatttggctggtagttacaattctcagggaaaattttccccgtgttttgggtcaaggccaaggaatacaggttttcttgctgtacctcttgataaagtgggctttttaatttttaatatttttggtactctgttttatcgacagtgcagtccgtgggaattctggctttatgtgaggctctcttatcgaacaccctacctttgtaagccctttttttattcaagattctcaaaagactgtcaaacaagttcctgggcgttaggaatagggagagccctcagagaagtcagtggcttcagaaaatgtttattttctagattcctcttttaactttgtatgtggagtctgaagatatcctttaatctctttccaactttacaatgtatttaaaatttatttttgtatattattcaccggttttagttgttttcagtggagggatgatcagggattctaaattctttgtactagaaacagaagccttaagccattgaatattgaatatttgagtaattattcagaaaactaatctggaggcagtatccagaatcagtgttacagactagggagcctagaggcaggaagatgtgttagtaagttcctatagtaatctagatagaaaagggtagtaggttgtaaatggttaggaaaattatttttgcacagtgaaaagaactaggaaactagaaatgagaagaattagattatggtttttgctccagcgtagtcacataatttaattatttgctcattcatattcattcattcatattcaacaaatgttaattgagtacctgttctaggccagacactgttttcagctttgtagtgcagtgtggtatacagcagtgaaaacaaatttttcttctcttatggagcttacagtctatgaactgtaagacaggcaatgaataaacaaatgtgtagatcaaaggccagacagtggtaagtgctagagaaggaaattcagcagaataagggaaacagagagtacttgccatggaagcgaagtgtatccatagaaagtcttactgaaaagatgatatttgagcatatatctgaaggaagcaagggagtgagccacgtggaatctagatttattccaggcagagggaacaggaaggagctagcatgcctgaactgaatgagttaggcagagagtagttggagaagacaggagacatagagcccatgaggccattctcaatgagctgtgaagcttccagggcttgggcagcagagggccatctgtggtagagtggtacctgtggatgatgtgtaaagaagtggctaactgccctgactacctcagagggatattgtgaaattcacatgagataatgcttgttgaaagtgccttgtgacttaaagatatttcataagtggaagtgtttgcattggattcagtggtggatttgatgagatgatgggtaatctcaagaagacattaaggtgattgaagaggagatgtgaaaaaggtatttatctcagcatggaattttacaagggcaggatcataccttatatagtaataaggattcatcatgaggcagaaagcacgaaacatgaatcacccttccccatagggaatctgtaccctatctcccctcagaggcctctttcctatttgagtataaaaacataaagctgagtacaatgagcatgtcctctctactgtactctgctttcaggaagatttattgttcaggaatggctatgtctcctattccatagccattcctaggaatgtctatgtctcctattccatagccattcctaggaatatctatgtctcctagttgtggtcagtacgagtaggtactcagaattgcctgctgaattaatgctgcaaagttgtgtgtggkgggggggagtaggatttataggaatgaacttagagtttaggatataaaaaatgtgtaaaccaagctggtggagacctatgtttgcagcattcagtgggaaaataatcatggatgttgggtggctgtaagcttcatgtgaaatgaaagtgtgatgtagtcattaaaaatatctcacagtcttgggctctgttaaaaaggagaaagagtgcagattgctgaaggagatgctccccctagacacagtcctggtcagtttttgtctggaatctgcacatttctgggcagcaggttttatgaggaacatcaacaacctgaagcacatacaaggtctgggggagagtggtgatgattaagatagtaaaatggcctcttctctttctaatataggttttcactttcctctgctttgctgagaagccaatagaaaagaattttaaaaagagtcacaatggccttttttgcatctcattctatttatttattcatttactcattcagtttataataaacatttattgagtatctactacgatttagacacagtagcagacactaggagtatgactcttgtcctcagttcaggtgggagagacagacatgtatgcatataattgcagtactgagtagaataaagccaagtgctatctttaattatctttagccccctaagtctgaatttttatgataactaaccaacttgtctttctacttctgggctccctccatgttaaccccaaattaaccctgcacactgtcatcaaaataatcattctaagaatcatttatatgttgagtgctttctgactagaaggactcaatctgggagggaatgggatttgaggttgtttttgaaagatgggtagtgagaccagtagagagagtatattatatgggggcataatgtcacagagaattggcatctggcatctataagaagatatcagataataaccataataataactgctgtttgttcaatgacctaaccattaaaagtgaaaacaaggtagcattatggggcattcacagtccaatattaaaatgatgattattcagactaatttcatgtggcacataatattttcattaaatgcttgtaattatatgtaagtattctgttcaatagtttgttctaccccttttccatagattttaatataatgggaaaagtcatcatccctaattctgtcatatttgtacctttctgtatgatcattgacccttggtcagcaaattgataaaatcacatttttttcttttattagtagcctagtccaccacaagttttgataaggatatgtaatggagatgtcctatgcagtagtaacctctcctatctgtagcattcttggggagctattagagcatctttatgagattaatttgagtggcttatattatttcaaggctttattgtggccaatattataataaaactcaaatctaaggaatctttttctaaggcttattccaatgcctttcttagctttactttctttcatttatcctactcattcatccattcattcattaactcatctgaattttatttccatgcctagagaaatccttatatattttgacacatatttctaaataaaaggttgctgaaataagtatccattcatctgtttaggtgctagttacaacatacctttttgcaggtaggacttaaattggattttatatgttcatataatacaagaatttaatataagaaatatgaatttaaaaagggaaaatgaggacacataagaaaagactggccagttgtggtggctcatgcctttaatccaagcattttgggaggctgatgtaggcagatcacatgagaccaggcgtttgagaccagcctggccaatatggtggaaccccgtctctgctaaaaatccaaaacttagctgggcgtggtggtgcatgcctataatcctagctacttgggtggctgaggcatgagaatcgcctgaatctgggaggcagaggttgcagtgagctgagattctacctctgcactccagcctgggtgacggagcgagaccctgtctcaaaaaaaaaccaaaaaccaaaaaacaacaacgacagcaaaaaaaagactaaggtagtggcaaattcagtatacaaagtgattgcccatgtattagagttagagttctggagcaaggccaccattttagttctgagcttcccagaatcactacaaacagggaagtaggtaagttacattgtttactcgatttacaagatgaaaacaaacagcttctcaagagaacaactgccataggtaatcatactggacagaaatttctcctggggactacacatagaggaagctatgtagtgtaatgaacaatgttctgaacaatatctttatgcaaaaatccagtatcatcttaaagaatcagttttgattctgctcctaagtgcaagaaaaaggccactttatgtcctcaatgtcgttttctagaagggttaaaataattttattccagcacaattttacagaagaggaatcaasagagtagcgcttttctggaggtcggggaggaagggagtcagaatccaagcactagtggcagacacaaactgaagaaaggacacatctttctctgagacyggaaggaaggagtggagggtggatgcagatttatgagttgttggcatgcaggcagagattagaaaaagtttttcctggtagccttgatcttcttgatgaagaaggcagttgtctcttgggagggggaagattgttggcagggtagaaacttgagggaagtggagattgttcacagtagcctctttccagtcaatcttcaaatgctgaaatgtgaagaaaacttatgtgtctaactccatttccttctttcacaagtcattgtggaaaaaaagcaattctgaaaccagctgctgtaaacctctaaggaggtgccaccaggtaaattctgaaagacataattagcccactcagattcagagttacagaacttcactgctggaccatggggaccgtcttgttcaaccatttcattttatttatggatgaggaggcgtctctcaaattacagagccagttgattattggattagataatccaaagagaagtcaactggctcttgtttgtttccccactgcactgtattcagctacccaaggtattaggcaagaagcagaggacgctatgtcaaagtctatgcctcagtttctgcatttcattccatgcttccacttctctccatagcctcaaaactatcttttgaggctcagaaggagaagtttgaaatcatagatttctttcctagtagactcccttacctttgtggccataggtttatcatcgtatttttcatctagttttacataaaataatcattaatagagtagatgattctggggaaggagaaaaataaggaacatgatcaggtgtgaagagggtatgaagaaaaattcagaataagaataaagctgagcactgcctgtcaaatgggtaatgtgacctccaggaaatttgaatgggctaattcagtgttgtccacggtggggcccccagagaggctgcaggcttggtgaccaaacagcatctctttttgcagttggcatggaaagcagcctgcaagtcccaacttaaaaagaacaaagaactatatgcccatgcttcattgcaattgccacaggagaggttgggaaataaggaaaaactccaatgatgagtgggctgagaaagccatatcctttttctagagcaggcagtattctgctttgaagaatgagtaagctactaacccaacccagaagcggggctgggagggcaagagagataaagcagttggatagtgaagggaaagaggggaatgaaaggaggcactttgtctttcttttctttaattggaacttgtttcttaatttaccagcctttactaagtgtcaaatggagatcagattgacccatctattgccacatggagggtctaacttagtcattttcctagagatattgaagctaacttaattgggccacgtactgtcttgtagcaggatctggtgttaagtcatccttgcttgaagcctattaaatgttcacagttattacatatgaaaacctgaaaagttggccaggaactaagcaaaccatttgagatcatgtttctttcttaatttcctccctgtcagttttcatgcaagggccttctcagatatctagaaacttcatattgtgactaagcagggtttcaagtatgagttttaatgatttagtccattatttcattttatttcaatagctttttggggacaggtggtttttggttacatggacgagttctcttttttttgcatttcattatttatttagatgtttaaactctcacactacatttttacaagctggtaaacactgacaaattatttctcccacagtactataaccacacatccccaggcagtataaatatatggttgaactaacattaatgcacatcaccattttatcaattacatagtaaaacaaattatcaagtatccaaatattaagttacacagctcgaaaggcatgtaaaatattagatgtcttatcagttcatgagcagaaacccacttctttttttgtaagtgagattgggaagagaaggaaaaaaaaatcacactttcaaacaaaaataagtcggtaaacaacttctgataagtatggaaaaaattacaagaacttcaggaagtttatgattataataacaaagcatttctacctttaaaaatattttactaaattaaagagcatattctatatgttctgtacaagacaaaggcaacattttgctaaaaataattaatagctccctcccatttttttctcaggccctccctgttaagctgcacctcagagtgcaaatattaaattaactgtaagacttttttgtctgaagacattaaagacatgtgcttttgtacaatgtgattttcacaatggaggttttgttttgttttgtttttgagacggagtcttgctctgtcgcccagactggagtgcagtggcgccatctcggctcgctgcaagctccgcctcccgggttcatgccattctcctgcctcagcctcccgagtagctgggactacaggtgcctgccaccatgcccggctaatttttttttcttttttcttttttgtatttttagtagggacggggtttcactgtattagccagggtagtctcgatatcctgacctcgtgatccacccgcttcggcctcccaaagtgttgggattacaggcgtcagccaccacgcctggcctggaggtttttaataaaagcacaaagtgagatttatagaaacacatgaaataatcactgtaaggcttggttaaaaaaatatcaatggctaagcaaacctgatgtatactagtatgaatgtgggagacgtaaacataaagtgagcagacaaatcaccatgtaagccctactttcaatgtttgaaatgactgaaggaataaaccacataaggtctagagtgttcatagttcctgagattttagctctgtatggtgctaaaaacatacaagtatggtgctgggtgttttggcacctaatcttcctaaatttcttatgtatcgataagattctggcatgggaatagatttaaacaagtcctaactcagtactgcctgattttgggaaaggtcagttggtatgaatgacaagcacattttatatactgacagcaagaatcttttgccaaatgtctaaataggttgactgtaacccaaacacagaggttgccaaatctgtctagcttgcagcctggtaaaactgcctgtcagtactcctatggaagcttcattagacttactcgctaagccaacatgttggctaatgtgtataacaaattaggtcctatctcaagttccacttccaatagcattaggcaccccagttttattgaatgcaacagttgtttatatgactattggaatctttgaagcgcagccrcattttaggatgatacttctccaaatacaaaagttgcttgcttttaaaagctccactccgcttttgtcctatgaattgtactgcatcttcatgtttcattccaccttcaactgatgctagggcaacaagtactggagctttcccaaggcctacaatgcaattaacagcaatataacaaccaggttcttcacaaaacttaatttttacaaaatgtaaccaatcagcaacaatctggttggatggtggtgcaccatcaccaaaaggccaattgagaacatggataccttctttctccacaagagtagtgtcataagttgcttcacatactcttactattgtggtagctccatacttcttaagctcctctataaatttatttaaggtcacattggttggattgtgtgtaataggaaatctcatgttcttgtatgtgactttcacaggagctgggtggttcattcgaggtgtattaatttagttaaaaaatactcaatagggttatgaaataattaaaaaattgaatacagaaatgattcaaagaaactgaagtcgacttcaatatactccacttgaaattctcagtgctttgagtgtgaagttgtaagtaatgataaatgaaatgaacctcctaacaagaagcagcaattctgcaatccagtaatactgaggcaacaaacagacaagaagtgcactcaggtttaccccatccaggtcagaactcttataaaatgctctgtggatttcaattcaacacttttgtgtccaggataaccactcttataggggctttttggtggagtagtaatcaatttctacagttcacatgtctgaatagaggttgtgctgtgcctggcagtaatcttcactgcccttcagaaactcaatgtgtgaccaagaacaccacagaactgaggaatgtatttattctctgaagattatggcctaatcatacagctggtcctgaggcagcagtgacatagggggtggcaggcgctacagggcaggaggtggcggtggttgtggcagagtggtggtggtggtgatgcagcagacaagttctttagtggtgatttctgagattttggtgcatccgtcacatgagcagtgtacactgtacccaatttgtagtcttttatttctcaccccctgagtccccaaggtccattatatcattcttatgcctttgtgttctcatagcttagctatgatacttagtttttcattcctgagttacttcacttagaataatgatctctaactccacctaggttgctgtgaatgccattatttcattcttttatatggctgagtggtattccatggcgcatatatatatatatatatcacattttctttatccactcattggctkatgaacatttaggctggttccatatttttgcaattgcaaattgtgctgctataaacatgtgtgtgcaagtgtatttttcatataatgacttgtcttttttggggtaggtacccagtagtgggattgctggattargtccatttttgagtaaactgtggtgcatggagaaggttccaagtccaagtaaactccatgggaaattgaaaaggtgctccttcttagggaatcaggacatcttattggttgaaatgacttgtctgaaaatctaagctgactgaaactgtgctcagtaaaggaaggttgaggcctgtaactagtggttttggagctgtgagagtgatgtttggagcagctagatgacatactaagtgtgaaagctggaatttgagaaatgtagttaagttgcatcatgaaagacaattcccaggatgtttctgaccccagtaagtactgattagtgtggtctcttagccttagtttttccactttggaatgttgcagatttttatattaagctaaaccttgaacttggccactatagattgaattttatgacctccatgtgtagttcatattctgagtcccattttgtcaaaacagttttcccagatgtgccacctaagccttcaggggtcatcagatctatgtcttattttcagagatgggccaccattgacccaatgcttcttagttaccataccaaaatactcagagaaaaagacttaattgtatttcagtcaaccactcaaatgaactgagaaataagaaaagatgctagtcttgtttgctccatattagttgatattttaattaatgagcttttgccagtttatttctctgtagtgttgtgaaagacaacatgagaaaaattgtactgtgtgcattcgctcatttgttcattcattcaaacaattttgtaaacatagatgatgtccaaggccctgtgcctctgtgaggtttaccagataaatgaggtatagttttaactgtaaaagaatttacagtctcaagtaattcaacaaattctctcttcgagtttagtatgtgtgaggcactaggattaaaagagtaatgggatttgtattcattgcatctctgttttagaaaccacgaatagtaaaatacaacttccctcaaagtgtttgtaatccagactgggaagtgggctgtgggggcataaattataactagaagtagctattatactagataaatcatttgtcacatttgaaccattaagtattataggagttttagagacaagagaggcctcttccaaattgggtcatcaataggatagccatatagtttttcatccagattgggacaccactgagagtcgaagggggtatggctactaataattgagaaacaaactggtatcacccaggtaaaccaggacatacttcatacgggtatggctcatggaggaagttgcatttaaactgaaacttgcagtaaatttaaaccagaattacaaatcctttctcaaatacaatatcccattagtaccatctttcacatgtgtgccttggagctgccttagagttaaacagattgaagttaaattgtttcagtaaatcagtagccaatcaattttaaaaagagatctgaaagcaacttatatctacacaagctctaagaagactactatatggcaaggtgttctgtatgtcagagaaagtgcataagttttaactcaggtgccaattttgactgaatgacgttagattcctgaagcatggtattgagaaggattctgagactgtaacctgattcagtgggaaagaatgctgtgtttgattaacaatgtctactatggatacaggaagttgaattggtgctgctcatttgctttctcttataaaagcatttatatataattcagcaggtaatttttgaaaataagtatacactgttcagcttaccactttcaattattaaatctctgaacaagagtaaaaataataaaattaaattgaataactgttcttagtgctaggtgaccttttctatgggtctttctgtaatctgccatttttctttttcatatacttttgaatgaacttaaatatatcaagtaatatggtcatcaagtaacacattcatgatactacaatactactgcaggaaattgagtaaagggaccagtagtgacttaaagtaactcagtaaactcataataaaacaattcattgattttggtgccttatcttagggaagggagtatggtgtattgaagaaaccactggattgggaggtagatgtctgagtccatttaggctgctatgacaagctatcataatataggtggcttataagccacagacatttatttgtcatagttctagaggctgggaagtccaagaccaaggcactagcaaattcagtgcctggtgagcatcagctttctggctcacagatggcaccttcttgccatgttctcacatggtggaatggtgtgaggggtctctcttgggcatcttttattaaagcactaatttcattcatgatctaatcaccttccaaagtccccacctcctaatgaccatcaccttgggcattaggatttcaatatatacatttttttttcggagacaggggagagacacaaacatttagaccatagagaatttggatttcttgtccagctttgctattagttatattgatgctatttaggccacctacttcttaaagtcacagttatttaatctgcaaaaaaggaaaattgatttctgagtttcctttttcaaattaatagtctagacatttcaaatcacatttcttctataattatatactttcttaatmaagaactaatagtaaataatttaggctttgcagaccttacaatttctgtcacaactacttcatattattgttgtagtatgaaagcagtcacaaacaatatgtaaatgaatgattatgattgtgttccaataaaacatttacaaaaatagtttcttgccttagagctttagtttcccaacccctatgttaatctgtctcaccagataatagttatctgttgctgaataatgaaaaattatagcttaaaaccacaaatctttattatctcacagtttctgagggtcagaaatctgtgagtggcttagctgagtataaaaagtaattcaaaatttatgtatgttgtctcaagataaatattacttgatttccccttttccatattttcctcataaaggtataacaatatttttatggactctatactaaaggtacattctgccttcaggtatagagatgccagagataccagcaaagaggttaaagtttccacagagagggatcaagagagaggaaggtaggtgggcaaaagaatggctcctaagtgagagaagacagcaggaatagaaaaccccaggccagaaggagttgttgaaagactaaaaggaagcataactaatatattcataacaggtaagaatgttgcttcatgaatatgttaataacttaatctattcttctgaggttgaggacatctggtaatcattgatctgaaagctacttgaggtcttctgagatgttcgcagactaagtcattgttttatttttttaatccaacaagcatttgttgtgatgaaagatgacaagccccaaatcagaaagtatgtaatgtgctcattaggaaactcagattttgccttgggcacagtgatagacaaacgggggatatcctacctaccggccaaagctgttgttctcaccatcatcccccttggcaccctggctccctaacccagttggaatgactgacacctctagtagctactatccaaactttcccataagacctcactcttctaagtaatttagcacaccaggccttatttaagaaacaatctgaaacaaaaagagaaagaacgcaatggtggttgtttttgacaaagccaatttcttagaagtaaagattgaaatttcattcaaaaccagaaatgaccagttgatggcaacaattttttttttttggcataagcaactactgtgaggaacctgctctgtcagtgaggagttgatcaggttcaatggcctgtctgttayagtaactgcctctagtgaacacaccacccacaaatgccagraaacattgctctttctttaaaaagtaataataaagaacacttcatatgaattatagagtgtctttggccagagtttttattaatatttattattatttgacagcacctttatggtgttctcattaatcaattatacttaaatttgaaatatttcacagctttttttttaacttaacacctattgagggtaatagaattagggtttagaacacatgcaggagaaagatctcatggtgttctctgcccagaatgctgagaattagacctgaattgggagttgttgcttgcagagatcatgaaatatcagctatctgtagtttgtctccatttcatagtgcttctgagacactggggtkatttcaggcaacatttacactgagtttcctgaggaaagagaagtgtaccagtttatctttgtactgccagaaatgaaagaaatgatatgagtcctgatttttgtgtcaagcactgaggtaaatattttacatttatttcatcatttaatttctatactgagaaattagttttagcctcatatgatggatgcaacaacctgaatctctcacagtttgctaggataatatagcatacagaacatggtaggtactcaacaaatttgtgctaaataaatttgttgaaggtataaatataaaaactgtgatctaaggaggtcaagagtgatctctaaagatctaatgggtcttagaatgatcagcttagaacaccgactgtgcccagaggtcacttaccagctggtttgcctcttgtttgagatcaaggtatcttgaagcaaatgccatttctaacttaataatggtaagccataggaatgcacagctctttctgaggttaaggtgttgactttgagcacagctgatgtatagagagttggtaaaacattatgtgcttagtatgatatagtgggactttcaaaatcaactgttttgcccatttaagtccaagagaaataaaaatgggataaaatagtgtcttagtccatttgggctgctacaacaaaatacattagactgagtaatttataaacaatagaaatttattgtttacagtactagaggctgagaagttcaagatcaaagtgccagcgaattcagtgtctggtgaggaccttttcctcaaagacagtacttctgtcttcatatggagaaaggggaaagacatcctttgagcctcttttataagggcactaatctcattcataagggtggtgccctcatgacttaatcacttctcgaaagccctaccttttaaaactatcacattgggaattagatttcaacacaggaaatttggaaagacacattcagaccatagcaaatggtaagggaagtcactgactaccagctcaacatattttgttccgtttattattattataatcattctacagctgccccaagaacttccattttcattcccactctctggcctaatgtttttccctttctcattctgctctgaaygaagtctttttggtcagataagtcaatgtatctttaattcagagaggtgaaacattccatgtgtgtttctgataatttgctgttgccacatggctcattgggaagtaaagagtttctgaaagtcaggaggccattgaaatgaatagtgcaaacttcagcaatgccaggaagcattagagccacactcattatagtagaggcataaaaacagctagtcctccttttatgtgggactgtccctagtgaagacatccctcctggaacagctgcattttccccttccttccttccttccctccttccttccttccttccttccttccttccttccttccttccttccttttttactttctttctttctttctttctttctttctttctttctttttctttctttctttctctctctctttcctttctttcttttcttctttctttctttctctttctttctttctctctctttccttccttcctttctttctttctttctttctttctttctttctttctttctttctttcttctttctttcttctctctctctctctgtctctctctctctcctctttctttctacaaggtcttactttgtcacccaggctggagtgcagtggtgtgaacacagctcactacagcctcttcctcccaggatcaagcgatcctcctacttcagccccccaagtagctggggctacaggtgcatgccaccatgtccagctaaactttctattttttgtagagatgcagttttgccatgctttccaggctaaagctgcatttcctacagggaacggatgagatagctgtcctggcactcaaatgaataaaataaaatatacagaattcttgggagacttcctaagggaccaggtttttgtttgattcaatgtaaatacattcaacaatatttcactgaagaccacctatgctccttcctttatgttatatccttaaatacacccattaaaattgctgcacatctgggcagatgctctgcctgtttctagcacctacctgaggaaatagtgtggatgactgaagtagtactacgggggttcagatttccttraaaactaagccttataaatcatgagagtgacgraacactaattcccaaatagcagaatgcattacattgtttcaggtcagcgatagcatcattgttttagtgatcagaatacattaaatgcatgccgattttgtcacctttttggttagcaaggtacttaagacctttcttcattttcctcttatctatcattctactctcatctctcatcattctctaaattctcgttattttccaaacacatcaagcttcttcccatttttatttttttgaagaagtcattccttcctgctggaatactgtttttatcctctatttgatacacttattaagattcatcttaagtattccttccacttctatcyccatcccagtcctacctctgtgctttcatatcatatttatttacattgttgtaatgattttaggatgtttgggagcaaagtctactgggactattcaggagaaaggtgaagagaaagagaacttgtcagggctgggacagagcaacttaaccaggttgcagggcagatccccaggagggcaggcaggagagtggatgtataagtgggtgggcaacagcaataagcagccaaggacactgtggccaaggggcactgagccttccggagatcctccayacagggatgatatctggggtctacattgtgggcgattattcagatcaaaggactgttgtctgtaggcagtccagctgtcagaaggagtttaaggccagtgctaggtaaggaaattggacagtagacttggtcaataccacaggagtaagaaagccagggctcactctgacccactggacactgagtctgacagcatcatcaattccaccctgctgaaaaagctcctgttcagatagttaacttagaagctgaagagggagagaagacaggaggagagtgtcagagtcttcagctagaaggagtgaggaaggcagagaaggactgtcattttggcaaattagaaaggtgctactttcctagcactagaacacacaccctgccagattagacctcatgtctcattcgtctgtgtctccctggtgcctaatactctgcccgacatgtaacaggctttcaataaatgttaaagtgaagaagcaaatcagtaaatacacaaatagtcctcagcctctataaaacacactctctgttgcactatctaccattagttgaatagaaacactcaactaatatgttggtgatgcaatacataattgtctgattataattccccatcttaatttctcatcccactggcatcccatactgaaaagtatagtacatcaaatttatttcaaaaatagagttggcataatttactttttattataaaaatgtcatatgtggagaagagtatatacgacatacttggcaatggcttacaccagtaatccctgtagtttgggaggccaaaatgggaggatcacttgaggccaggagtttaacatcagcctgggcaacatggcaagatccctgtgtctacaaaaaatttaaaaaattatccagatgtagtggtgtgcacctgtagtcgaagctacttgggagactgaggcaggaggatcacttgagtctaggaggtggaggctgcagtcagctatgactgtgccactgctctccagcctgggcaacagagtgagactctgtctctaaaaagatttgtaaaaattaaaaaaaaattacaaaataccacataactgcattatttaaataatttacataatttaagtaattacaaagttcacaccaccacccaggttgagacaaagaacattgccagtgcctcagaaaggcctgtgtatacatttctgtctgatttcactccttctcttccctcatatcctaatttttctgataataatttcttcctttttctttacagttttatcatttatgcatgtgttcctaaaatatatatttagcttgcttggctttgaacattatttgaatagaatcttcatatatgtatttatttgtgtgtcacttgcttctttggctaaacattatattcgtaagattatgttaatttattttgagatttttttaaacatctctgttgcttagaggactggagagtatgtttaccttttaccctcagtatggaaatttctgagtgagctatagtgtacagccatgctcctctctcagaaaagtcaaactgacaaaacaaacattgaaggtggttatttattttacaaaaatttcatcatagtagtcatttaaaatgactgggttaaaaataaaaacttagacagtgttttggaaattcttgtcaatggagttatattagaattgatttcacatggaggtcaaaagggagtgcatttgagggatggggaaaagaagagtgtaattagcatgaggattagggaggacagctggagacttgatgtccagacagcacaaggtgatgagaaatctcactacctttttgggccaggagcccagggaaggaagtactgtatttttggcaataagattgagtgtgtgaacagctgaagatatacctgtttttcctttttttttttttttttttgacaaatttccactatgttgtccaggctggtttcacactcctgagttcaagcgatcctcccacctcggcctcttaaagtacttgggttacaggccaagtcgacatgcccggcttgttttgccttttgtatctgaggagcttcctttatttcttcctattttcttaataattcaggcctgtacatccagacctrtgctactggtactaaaagaaagactggctctgttcttgaggcatctagctaccaagaaggtgcattttcctgttaattactcaagtgattttagctatacagacttgataacattcatatgtgtccactggtttggcatcaaatccaaaaagttatcaaataaataactatttctgaaaaaagttggttggattaagtcaacaacttgttacccataagttgttttttaaaaagctatctgaaagaattcaaattctagataagaatctgacagctggatgggatagcaaagatctctaagtctaatccccttagctcgagagaagttcaataaattacacaaagagcagtgactagacctaggtctcttagttcctggtcgaaagctcttatccactgcctccaagttttcatttaatttatctggtgtctataactgaattttattttaaygctattcttttaaaaagagtcttaaaaaaggtgttattttcattatttaaaaaatacatttttgcattgtaatttatccttccctataagaaaaactcaagatactctttgagggtgtagcatgtcagctttaaaatcagtctgtctagggaagaaacctatagaaggtgagagggaaatctagttcacgataggaaggctgtttttgggtcagagcctgtgaaggtcacccacataacagtaggaaaagcagagtgtaagagtccatggagaaagtcaggtcagatgtgaaggtgagaacttgcttaaatgctcttctcagttccacttccctttgaaatacgcattaaggtaatcagttgaggattacttcaggttgtgaggagaaaggtgctaagggtttgagcagggaagagaaggtatgaaatggtcattaggcgagcaggagaatgaatgggccagagaaatgtagtaggatctggactgcagaagggccactcgagattaaagaccatgcattcaaattgaatccagacaccatatttccatgtttttctctggtcaccataagctacatgggtgcagacagttcacagaaaggttgatttagctaggtttgggattttgccaagggagtacaatgaaatagagaaagcaagggcaggagggttcagaatgtatgcaagggagtgatctgatgatgaaaaattattatgtctgtgtctcagaaatccttgtgtcctgtagacccatttgccaaattcagagctatgtttagactgggacatagtaggctctcaatagatatttgctgaataaatatctttcaattaatgaacttgttattaatcatagatttatactaccttgttatgtactgtaggggagacataaagagacatgccttgatttccactctaaaggactttataatccaattgataaatagaaaatgatgtgaaaaatataataaaatagaaaacaaaagccttttgtgagtgtttgtatgttttgtaatgctattgtttaattactattggatattttctttgaatacttgctaccacctgagcatatacaggtacatgttgatttctggttgatgaacccaagcaaagtagaggtagatatgatgaactgtgtgagatggttttaaaagtttcctttaaaaacataatcttgtatttgccttttcatttgctttatcatttggaattgaaactgtctctcagtgctgaataaggatttgcagtcttctatttttaaagagcttgcttatggataaagttcgatctttctttctggttctgctcttcacaagatatattgcatttgacagttctttcatgttaagagttgaatgtggactcctaggctgaagttgtgatttatgctacccatgaaacttaaggccttcaccggcaatggaaaagcaatcaagaattgatgtaaacagaccaatctgacccccatctgttgtggtttagtattttctcagagagagacatttactccaataactccctgtgatgttaacaggaggttatatacagtatcagagccagcctctttttgagtaggtggatataggtggacacacagttggcaggatttcagagtcctcaggagaaacttagtccatcagaaggtgtttcccccatcaattgtttagaatattgttttcatgatttcagccaaataatcatttgtgatgtgttaaaaaaggtagccttatcatcatttaatgattaatgaaaatattaaataatgagatatccaagtgagtgaccacagtgatgatggaaaatttggtatttatgtatgaggtctgtggaagtccaaacatgcaggttggcaggtgggcaactggcaacagatgggtctgccagagcctcagataccaagacatatgggtctgccagagcctcagatatcaatattgggtttagaattttagacccttaaagtagtctgtgtttgaattaagctgggatgtaattctgggtgggctgaaggtactgagcaggtaataaagaaaggaacgtagggacaataacacagacacaatttcaatggtcaggactgtgacaaatggcagaggctgggtcttatgatataggttttcattcatatattcaccctcattattcatgtattctttaataaacaagtgtatattgaacatccgtgtatcaggcattggggaggacactggaatataaggacaaacataactattttgttatgtgataggtgtgacaacagaatacataggttatattttagaagcacttgggtgaatcattcaaaccagactaggaagaaggggagagaaggctttctgraaaatgtaagatgtaagggtgtagtggcgggcatctgtaatcccagctactctggaggctggggcaggagaatcgcttgaacmcaggagacagaggttgcagtgagccgagatcacaccattgcactccagcctgggggacaagagtgagacttcatctcaacaaacaaacaaacaaatcattgaatgtcaaatatatgccgactaactaactctaggacacaaagttaagtgggagggagggtcctttcttcaaaagcttacagcatgatgtgatcattatataatcagatgtcactaatgagagttggctacatcagataggaaagtgaaggaaacttacgtaggtagtaaaatttgaatgatgagagaattaattaggtgaaggtggaatatatgtttacatatattatgtacaacatataaatttattctaggcagataagaagtttgtacaaaagcacagagatgtgaaatgacaatccaggtttgtaaagctagagtaaaggatatatttgggaaaaggctgatgatggtgccagggaaaaaggcaaggaacagataatgagaacctatgtgctgagctatggagtgtggcactgaagattgtttaaacagatgatgtgacaggatcaacattttgtagaagtatggagaatgggttggaggggggacattgtagaggttattttagtaattcccagaaaaaaatgacaagtcattaaactaaaagaaagcagtggcagcaaaagtggagaaaaaaaagatggatataggaaacattaagagctaactatacaggctctgatagagggtctgataggggaggtgacacatgtattcatggcatagattacatggtgaacaccatttgtcatcataaagaattgatgagaagcagctcgtttgggagtgggaagtgtgtataagagataaattcaactttattgaactgaatttgaattgcccaggagtaagtgggcaaaactgtccagtagaaaattaaatatgcagtttgaaactgagagtatagcatgtcgatcaggaatatgtcatcagcaaattggtgagggtttatattatagatttggatgaattcattcagggaaagcctgtagaatctgaacaccagacagttaaatgaggagacgttagaagaaaaatgcttcgacgaaactggaaaaaagcagaggtggaagaaagctgggaggctatgtagtcccaggaatttagaataagagaatttctcaaatgagtatggggtcaataaacaaaatacagtttatctatacagtgaaatattatttggtcacacaaaggaatccagtactgatacatgctacaacatggatgaaacttgaaaacatgccaaatgaaagaaacaaatcacaaaagatcactatgattccacttatattacatacccagaagagaaaaatctacagagactgaaaagagattagagctttcttaaagctggggagaatggaaggataaggagatagtagctaagagagacagggtttctctttgtggcaataaaaaatattctaaaattgactgtggagatgattgcacacatctctcaatgcactaaaaacattgaattgtacactttaaataggtgaattgtatgttatataaattctatatcaataaaacaaaaagagtatgggtaaaatcaaactgcagtaatgaggtctagtaaaataaagacaggaaaatcttgattggatttgacaatatggataaatcattggcaaacttcatcagaaattttagtgataaggaggagtgaaatacagatgacagcgggtaagagtgaatggaaagtgaaaatgtggagatgaactctttcaagaactttggctgagaaaggaataagggaactgaaagctaaggrtaaaggcagtatttctttaaaaatgggggagaccacagaacattttcatatggaaagagccaggagaatataaaagttttgagattcaagagtaagggagagatggaaagtgatgggatctattgcacaggtggaggagagaagagggggagtgtaagcaaaaggagaaaggatagaggatgatggagatgtttgtagcctagaagtagcaagttaagggaagtgttgtcatgtagcttctgttttctcrttaagctaggaagcaaatctgttaaggttgagtggaatttggcttggtagatggtttaggaagacagtgaagattttcactcgtgaaggaaatggagaaagatgcttgttagagatatgttggattgctaggcagaaatgaacttcaactgaggttgaagaccaataattagtagtgatgtgtgtgtgtgtgtgtgtgtgtgtgtgtgtgtgagaacagctcttaggaaactagaaacaagacaaaatgctgcaactgattcaactttgaagttttgtgggctactgtatgtaaagagaatcagaaaatcaaatgtcaagatgaataactaacatagtcagtggggaagggatcaagaaagtgaagactcgggaggctgaggcaggagaatggcgtgaacccgggaggcggagcttgcagtgagtcgagatcgcgccactgcactccagcctgggcgacagagagaaactccgtctcaaaaaaaataaaaaataaaaaagaaagtgaagactgacagtgctaatagtagtctagtagtctgggagacagttgctcaaaccttattttagcaacagacccattttgcttaataagtaagtttaagaaataactctccaagggaataaacagagcttctttggtaaaaacaggacaaatgacctgaaggcatatcttttagtgtattctttctctcttcagcagtccttgagttgcctcacagggtcctagggctcttagaacaaaattttaaaaccactggtctatggaagacttaatgaggtgaaataataaaaacaagatatggagataataacaacagcaacaacaatcaacaagatgaagctgggagaggaggagaaggagaggagaaaggagaagatgaagatgaacaacaggaagaagaggaggggaaggagaggaaggaggagaagaaacagtaattgagcacttcctttgtactaggccctggtctaagtactttacatctaatcttcacaataacttgatgatttaagaaaacatatcatttctatttttatagatgagggcattgaagcagagagaggtaagtcacttgctggaaggcacttgctagcatgaggagcggcagtcagagtgcattatgagagtaatttaatgctgattatgagatgcatgctttactggtaaagtctcctgtgttggtccacagatgggagctatagatggggctgagtgtgggaatcaaatgaagccagctctggagaggctgaaggatgaggaggttaagaaacaagcaagacctcagaggatcaacaggactcagtgaatgacataggatcaagggacagcaaggagtccagaattattccaataactcaagtcttggagaagtgttgcatcttgtaaaaatttgaaaacctgaagaggaatttggtttaagagggtagggaacaattagtggttatgaaatacttaatgagtaccaagaactattatacttaatagacatcattgtatttaatataagaaaataccattacccagatttgacagatgaagaaactaaggctttcaaagattagataatttttccaaagtgatagtctccatcagagtgaacaggcaacctacagaatgggagaaaatttttgcaatctactcatctgacaaagggctaatatccagaatctacaaagaactcaaatttacaagaaaaaaacaaacaaccccatcaaaaagtgggcaaaggatatgaacagacacttctcgaaagaagacatttatgcagccaacagacacatgaaaaaatgctcatcatcactggccatcagagaaatgcaaatcaaaaccacaatgagatatcatctcacaccagttagaatggcgatcattaaaaagtcaggaaacaacaggtgctggagaggatgtggagaaataggaacacttttacactattggtgggactgtaaactagttcaaccattgtggaagacagtgtggcgattcctcggggatctagaactagaaataccatttgacccagccatcccattactgggtatatacccaaagggatataaatcatgctgctataaagacacatgcacacgtatgtttattgcaacactactcacaatagcaaagacttggaaccaacccaaatgcccaaaaatgatagactggattaagaaaatgtggcacttatacaccatggaatactatgcagccataaaatgatgagttcatatcctttgtagggacatgggtgagctggaaaccatcattctcagcgaactatggcaaggacaaaaaaccaaacactgcatgttctcactaataggtgggaattgaacaatgagaacacttggacacaggaaggggaacatcacacactggggcctgttgtggagtgggaggagtggggagggatagcattaggagatatacctaatgtaaatgaggagttaatgggtgcagcacaccaacatggcacatgtatacatatgtaataaacctgcacgttgtgcacatgtatcctagaactttaagtataataaaaatatatatatataaaataaaaaaaaacacttgaacccaggtgattttacttttaaatgcattgattttgggagtgacagtaaggcgctattgagtacatagatgaagacaaatgtctgtagtctgggaaaagataaattctagagatagaagtttcattgatttccacttaggattaataggtgtagttaaaatttccaaggagagagagatagatagatagatagatagatagatagatagatagatagatacatagatacatagatacatagatagatacatagacacatagatagatagacacatagatacatgacagatagatgatgatgatgatgatagatgataggtagatagatagatagataaatagatagatagatagatagatagatagatagatagatagatagatagatagatgcacagcaaagcaaaggactgaggactaaacctcagggaaataactacatgttagaagccaggaagcaaaagaggagctacctaagaagacatagctgacttaagaagcagaaaacctgactgctataggcagaagttttcaggtttttttcaccctgacatccagttagaaaagcattttgcatgacaacccagtatgtatatgggtgtatatttatgaatgtaggcaaatcaaatgttttcagatacaatatttactgttaacagtgtttgatgtgggctgatatttttcttctctttttctttataaaaatacactttggatagcagctcattacaattatttcataactgaatgatgggtcacaagccagtatttgaaaacattgccctatatctaccctcaaacattcagggtaccacagtgatgtggtgatgctgtgagttctcaggtttggccagccatcttagaataatagcaaatattaatgactctcaaatggcagccttcataatttatcttgagaaattgtgggcaatagttccatctctaagatccactcactttctgtttttctgacccaatatttgttttctcctctcttaatttcttgttttccactcaactttccttgttccctttggcttggaaattaattcttcctggatttgttcttcttttattatttttttaactaaatgaattaaaataatttacaagctgacctttccatgtcatttccagtctttccttgtggctgttttatgcttaagtatactgtaccacggtaggagaatgaacatttttttgtgtggtacatagtttcattatataataatttaattatatgacaaatgaggttgcaaaactgatcctattcatggcacctygcacagtgctgccaaatgccctgagttaacctgacattgtcaagaatgaatcctggaaacccagaacccacagatcctggaatgccaaatgaagtttgtcatcaattctgaaaccagggcatcacagtaaataacatgaaacagctattcttcgatgttctttcctccctctgtggcatcttcataaaatggcttccccttgatgcattctgctgttgagaacgtgaaagggacaccatcaataaacacaatagtatagtgacagtcatataaattaacaaagaacttctgctggaacttgctcaatttgcagagataattataagatgttaagaagtattgactgcccatttcattgtttccatattttaactggagagactgaggcttgagagtctaagtgacttaaactcagctattaatttaaatagccaagcctggattctagtagtgtacttgaataagctccaaatgtaaatagctagcaaatctgtctgaactctttctcagagaggatggctatgtctgttaattcctatcaattgtatagaaagtcagaggaggaacactggacaaatgaatttgacatggcttgcagatggaagtttttagaattagtgggctgatataacctataagttgaacctaaatatttgggattgctgactcaaacttttttttcccatcacaaaaattttgtagattgctccctcacaaattgtattgtacagcagattcatcagatttttgaaaaaattctggtgcttgaactctacaaaaatgtatttttaaacaaatttcagaggtgattgtgatccttgaaaaacattgkacatctctggtctaataagtaacacatttctggcacataaagacctaggtttattcatttataaaataaataattattgagtgttgtttttaagaacctatgttcttcattagagataaaaagcagtaaggcatgtatgcaatgagctcacaaagtggtagtgggaatagataaaatagaaatctgaaacaatgtaaaatatgattttgtgttaaaataagatatgggatgtcattgtggattccatacagccagagtgaagaggtaggaattagattgtacttctgaaagaggtaaaatcttatctggatattgaggaatcaataagacttggtaaggggaggagtaggattgtaggcaatgggggatagcgtgcatgaaagtttggagaaaatatctaggtggaattggggtagatagcagtatcattcaactggatcagggcacttgcagaaggataaggaaataaaaggctgaagagcaagaacataaaaaatctttaacataaaactaagagttttggaactaattattgagtaatgaagagccatggttggctttgagcagagactggcatgaccagcatttatttctcaaaagaattaatttacagctgggtgcaggatgggttggaggaaggataacctggatataaacagatgggttagaagactcatgatgttgcttcaggctttagcttccccattgcttacttgaggtctctcatctataacaatgcacataacaacatgtttcacatgctccttccctgtcttttgaatcactgaatttgtgggacagattctataaagtctgagtgcttttgatcaagtggatactgaaccagtggaaagtgggcctataatcctcaaagaaaattgaaagactttgacagctttttcatgactatttgaaggtgagaaggcatgggatctaatccaaactgtctggctttaattgcttttcttattctatgttttgcatgggtactattggtagacaacactggctcttgattcaattgtttgtggcctttctgtattacgaacatgttgatyttctcttctctctgcctactcttttgcttcttttcttatttcatgttctaatctcacctttttgtaaaactcatttttcctttttttcccctgactgccaaccttttctttaggttagcccaagagggtcaccatgacccttttcctttgggaaaggagggagtgggacaacttgataattattatttagagtggaaaccttttctttttagttgaattatcttagtgtcatcccaagtgccttgcactgtactagaaaataataaattctcaaaaaacatttttgaaaggaagtacaacacacaacatcaggcatatttatgtccttaatagtgaaggttgactctacttagatttttcagggcagttatgatttcaggtattctttcctgttgtttaatattataaaaccatctatcctgattttaagtttgaaaatatgcacgccatacccattaaagataagtatgaatctgtacccccaaacacaatacacattagaaaaagacaattctttgggtatttcctcttggaaaaagccaaaatgaaaaaatagaaaaagaaaaaaaaactgagtggcaagaaggaggaggtggtgggtagatatttggtgggttttgttgagctccggtagaaggctctctggaacagtttagccagcgttttcattggcagcctcagcagagccattagaactattaaacgaatgtattgttttgagttttctttggcccagtctcccccattatttagggaaaccgaattgcacattctcaggaaagagggaagactgaatgccagtgacttgaaccctccttcatggcgcactgtagatgaacaggccggagtgctggggagggctgagaatttctagcccctccaaattcccatgtgccaagtgctatattggctctgatcaggattctcggatttttttttctccttctggttaacaagtaatcagagctttgtgaaagttcctccaataaattatatagacctttttatatctggcaatgaaacctttttagaatgtctgctcgggagcagagggccctgatctggaacatccaatctctctggcctaaaaataaacctgggttttaagaaactgtggtgtgtgtgtgtgcatgtgcatgtgcgtgtgtgtgtgtgtgtgtgtgtgtgtgtgtgtgtgtatgtgtttgtaggggaggcaagtggagaatgctaaaggtccaaaatacttggttaatagatcctggagttagaaatgctgacttttttaaaaaaaataaaagatgaggctaaacagaagacccatccatccttctttttagcttgtcaagagtgtctctgggagaaatgccagatgaaaaaaactaggatgaactcacatggttctttctccattatgtttccattctctgttagttatttttggttgacccccctttttgttccaaatactagagttaggataaatggagacaaagtagaccaaattctgcctagggaagctcttagacagagaagcatggccccacctagttgcatttgaaaggcctgttgctttaacctatgcatactggcccttccattgtgtggctgcttttgttacatcatctaaaaagattgcctggtataggaagaatattctaacttaaatctaatttggcttttttattctttaaaaaatgagcttttcttcagaaattaatacattctgcttgtaaattttcaaacagtaaaggaatagttctaagttccgtctttcttccattttccctgcctacttcttcccatctttctaccacttttgaaaacaagccttattctgagtctagaccagtttgtaaaagtatgttttattgttttttaaatagacactgtttgaaacataataaaagtggccagtggcccattttctttttttctttttctttcttttttktttttgagatggagtttcgctcttgttgcccaggctggagtgcaatggcgagatcttggctcactgcaacctccgggaggaatgctgggttaaataattgcttttcatgtacttggtattttgctatgtgctttacatacaatattttatttaatcagtgtagcaattacagaagatagatactattatttttgttctcattttttacattatgttcatttttatatgatcgtgattatttttctaatcatgaaactgagacttagagatattataaaaatgcctgagctcatacaagaagaaaagggcaagcctatattatctcaggttattcaaattcagagctacaatttttgtcactacagttcctatgccatcccccaggaatttatttatctatttttatttttttcaaaagtataataatgaattttattttttatttttatttttattatttatttatttatttattattattatactttaagttttagggtacatgtgcacaatgtgcaggttagtcacatatgtatacgtgtgccatgctggtgcrctgcacccattaactcgtcatctagcattaggtatatctcccaatgctatccctcccccctccccccaccccacaacagtccccagagtgtgatgttccccttcctgtgtacatgtgttctcattgttcaattcccacctatgagtgagaatatgtggtgtttggtttttcgttcttgcgatagtttactgagaatgatgrtttccaatttcatccatgtccctacaaaggacatgaactcattttttatggctgcatagtattccatggtgtatatgtgccacattttcttaatccagtctatcattgttggacatttgggttggttccaagtctttgctcttgtgaatagtgccgcaataaatatacgtgtgcatgtgtctttatagcagcatgatttatagtcctttgggcatatacccagtaatgggatggctgggtcaaatggtatttctagttctagatccctgaggaatcgccacactgacttccacaatggttgaactagtttacagtcccaccaacagtgtaaaagtgttcctatttctccacatcctctccagcacctgttgtttcctgactttttaatgattgccattytaactggtgtgagatggtatctcattgtggttttgatttgcatttctctgatggtcagtgatggtgagcattttttcatgtgttttttggctgcataaatgtcttcttttgagaagtgtctgttcatgtcctttgcccactttttgatggggttgtttgtttttttcttgtaaatttgtttgagttcattgtagattctggatattagccctttgtcagatgagtaggttgcaaaaattttctcccattttgtaggttgcctgttcactctggtggtagtttcttttgctgtgcagaagctctttagtttaattagatcccatttgtcaattttggcttttgttgccattgcttttggtgttttagacatgaagttcttgccatgcctatgtcctgaatggtattgcctaggttttcttctagggtttttatggttttaggtctaatatttaagtctttaatccatcttgaattgatttttgtataaggtgtaaggaagggatccagtttcagctttctacatatggctagccagttttcccagcaccatttattaaatagggaatcctttccccattgcttgtttttctcaggtttgtcaaagatcagatagttgtagatatgcggcgttatttctgagggctctgttctgttccattgatctatatctctgttttggtaccagtaccatgctgtttttggttactgtagccttgtagtatagtttgaagtcaggtagtgtgatgcctccagcttagattttgggtttacttagtataggaggtctcaggatttttaataatttgcatttcttataataaagaaatgagtacactcttctcctattttttgaccatgaaatcccttttatgaaaaccttcttgaggaaccactgtttctcataaaacttaatatagtctgaaccagcctcatcatcaacttggtcttaatgactctgggtgatggaggtattattgagccaagtgtttgcacaaacactaagaaaagtcaaggaggtctaggttagtgtgtacaattttgcatcaaagccagttcaaatagtcacatttctcctagaactgccatttgactccataatccagttactacttatccctataagcaatcagagataaaaattgtgaagcagaaagatttcatgttcccagaattttcttttcattttaagtcccagtgaaagataacattctagttctctagctagtgcccaagccacccttccttctataggaatgkctctgaaaggtatggataagtattttgccttaaagagtacataaatgaggaaggcatgattattagttgtctatgacttattttaatttaaataacaataattgcaaaggataatttaaataacaataattgcaaaggatacttgattgcatatttgctataattgcatataattttaaaattctttttctgtattctaagttatttgataacatgcatgtagtacttttagaattaaacaagaagaggctaggtagaaataatacaagcaaaaggacaaagacactgagcagcataggtgagtgtgggtggaaaactaccagtagtttgatgttgttggaacataatgcatcaacctgacagtgacaagagatgagatgactataagaaagaccagagtttggtcagttttgtggcttaaatggattgcttcagatgctttgtggatgacagtgaaattgtagcaagaagatagaagaccactgctatagtttgagcaagagataatgagcccatgatatttaagtgaagaggataaagttgaacataactgatagctaaaataagtaagcatcagtaattgagtgtatgttaggggtaagaatgaatatggaggagaaaggatcactgtcaagtttctacttagggtaaaaaagaacagaaaatgtaactctgcaatcttctccattgagatatttggaatcatatgtgcaagcattagtcttccctctaatctttatagaaccgtatagctatgacattctcttctttttgaggatgtagaaattcagtcacaaaatagttaagagactgtgttcacctattggtctgaaaatgcattgccttttctgggtgtcagttttttttctatatgagcataaaaaacrtataagacctcactgaatccaaaattaacaataacaaggaacagctaccacttattctacccatcttataagtaggcatatgctaagtgctttatatagcatgscattttatcttcacatcaaccaggagagttaattattactttatgctacagatgagaaaattgaggtrcaaaggggttaaataatgtgtccagggtcacatagctagtaaaaaatggcagagctggactgtaaattcatgtctgtctgaattcagaccaatgctctaaaaacataacttagtgtagaaaagagattagtgaatatttctgtaaatggccaaatagtaaatactttagcctttgccggtctgcaagctacctatgatctctcttgcattttcttcttctgtttttttttttttaaatgctttaaaaatktaaaaaccattctttgttcacaggccatataaaactaaccataggctgaatttggcttataccatcatagtttgcagattcctggtctagagtataccaggagtaccagtatacacagaggcctttcagaatctatcagtggtgaaaggatcatgtagggagtgctaaagggaaaggagaaaaatggagaaaatgcttagctctagatttcctggggaaagggaaatccagctggaatagaatatccatggtaaacacagggagaccacaaaagagtgagtcataacccggccatagtctgaatatgatcactcagccaacaaacgatcctcagatggcttcaaaacacttgtgttgggcggaagagggggagattgattagaagagatgtgctctccagagagaacacaggctctgtccttctggaagagtagacatggtagagtggatgaaggaggtatctttctaggcaccaactcttgcagcagaggagaaggtgagggacagccagatggtgggagtggagggtacctctgtgggtgtgtatgaaattctcttttctcagccacctcaacacttgcaactttcaaatggataaggttgctctggcatccttctggaaggaaattaaagtttacaaatgataatataaaaggcaagcaaaaattatcctctcaaaagctcagtgtcttcaccaggaggcttgtgtactgaatatctgtatggagtctgtgggcttacgaaaacttagcaggggagagggtgaattaggtgccctctgttcttagagatatgataataagtgagactcaggcaggttcaagcaacttctggggaagtcgtgagcaccatcagaagggcccaaagagctttggtggatttagttctttttattttttatctccttacaacccaataggacttgtcctggagtttatgagtgacaggattttttaaaaatgtctattttattatccagccatcccttacacttaattattttatcaaaaggagttacgtatggataaaaaggttgttttctgcattgtgatattccattgtacatatgacaatggaatttattttaattcctttctgagtctcaatgttgagaaacatgtagtctatcattagaggcaatatggcaatatgcaccatagatagagaaagggctggaaaacagggacaatctaggttcaagtttcggctttccccaggtcaccagcataacatgacaagtgctgtgctgcagtaatacagaatgtgctaagagggtacctaagcttggagagaaatctagactcaaagattggggtggatttcaggaaaaccttcctggataaggtgacatctataccaccttttgaaagaagagtagttagaagaaaaggacacaggaaaataaagcattctaggcagaagaaatatgcatgcaattttatggaaccaggaaagagcacaacacaggtgcagcgccacaagtacttctgattttatttaatttcaaaagttttacttatacagaatagttgtacatattttcagagtacatgtgataattaaatatattcatataatttgtaaagatcaaaacagtacattgggatatccatcaccttacatatttgtcttttttatcttagaaacatttgaattattcttttttagttattttgaaatatacaataggttactgtaaactgtagtcactctactgatctttcaaacactaggtcttgtttcttctttcaaattgtacatttgtacccattaatcaacctctttttatcctccctcccttctatcattcctggcctctggtaaccacaattctaccctctatctttatgagatccatgtttattagctcccacatatgaatgagaacatgcaatatttgtctttttgtgtttggcttatttcacttaacataatgacctccaattccatccatgttgctgcaaatgacaggatttcattctttttatggctgaataatatttcattgtgtatgtataccacattttcttatccattcatcctttgatgagcacttagtttgattccatattttagctattgtaaatactgctgcagtaaacatgggagtgtaaatatctcttcawtatattgatttcttttcttttggatatgtacccagtagtggaactgctggatcatatggtagttctagttttatctttttgaaggacattcgtatagtttttcataatgactgtactaatttacattcaccaacactatatgaaggtatccctttctccacatcctcaccagcatctgttgttgtctgtctttttgataaagccgttttagctggtgtaagatattatctcatgtggttttggtttgaatttccctaaggatttgtgatgttgagcatttttttcacrtgcctgttggccatttatatagcttcttttgagaaaggtttattccggttttttgcccgattttaaatcggattattattgttattttactattgaggttttttagttctttatattttgtttctcaatcatttgtcagatgaatagtttgcaaatattttctttcattctatgggttgtcttttcactagttgattgtttcctttgcagtgcaaaagttttttagtttgatgtagtcccatttgtctatttttgctttggttgcctgtgattttgaggtttacaaaataatctttgcctaaactgggcaaatgtcctagagcatttccccaatgttttctcctagtagtttcatagtcttaggtcttaggtttaagtctttcatccatttaaaaaatttttatttttaatttttgtgggtacatartaggtgtatatatttatgaggtacatgagatattttgattcaggcatacartgcataataatcacatcagggttaatggggtatccatcacctcaagcatttatcctttctttgcattacaaacatctagttatactcttttagttatttttaaatgtataataaattattcttgacaataatcacccagttgtgctataacatactagatcttattgattttatctaactgtatttttgtacacatgaaccatccccccacctgacccccactatcattccctgcctctggtaatcatcattttactctctgttaccgtgagttcaattgttttaatttttagctaccataaataagtgagaacatatgaagtttgtctttctgtgcttggcttatttcacttaacataatgaaatctggttccatccatgttgttgcaaatgataggatctcattctttttatggctgaatagtactccattgcatctacrtatcacattttcttcatccatctatctgttgatgtacacttaggttgcttccaaatcttggctattgtgaatagtgctgtgataaacatgggagtgcagatatctctttgatatactgatttcttttctgttgaatatatacctagcagtgagrttgctggatcacatgatagctctattattagttttttgaggggactctaaactgttcttgatagtgattgtactaatttatattcttacctactgtatataacagttccctgttctccatacctttgccagcattttttattgcctcacttttggataaaagccattttaactagggtgaaataatctccttgtagtattgatttgcatttctttgatgatcagtgatgttgagcaccttttcacatacctgtttgccatttgtatgtcctcttttgataaatgtctattcaggtgttttgtccattttctagttggattattggattttttttccaattgagttgtttgagctccgtatatattctggttattaatcccttgtcagatgggtagtttgcaaatattttctcccattctgtgggttatctcttcactttgttgattgtttcctttggtatgcagaagctttttcacttgatatgatctcatttgtccagttttgttttggttgcctgtgcctgtggggtgtgactcaagaaatcttagcccagtccaatgccatgaaaaattttgtcaatgtttacttgtagcagtttcatagtttgaggccttacatttaagtctttaatccattttgattttattttttgtatgtggtaagagataggggtctggttctattcttctgcatatggttatccagttttcccagcactatttattgaagagactgtcctttccctattgtatgtttttggtacctttgtcaaaaatgagttggctataaatgcaaggattaatatctgggttctctactttgttccaactgtcaatggttaatgttttttgtttgtttctttgtttgtttttttccttgccagtaacatgccattttggctgctataactttgtagtgtattttgaaatcaggtattttgaggcctccagctttgttccttttgctcagaattgctttggctatttggggtcttttgaggttccatataaatttcaggattctttttctatttctgtgaggaatgtcattggtattttggtagaaattgcattgaatctgtctattgctttgtctagtcattttaacaacattaattcttccaatccataagcttgaaatatatttccatttattgcaccctcttcaatttcattcatcagtgttttttatagttttttgtatagacttttaacttctttggttaaattgattcctagatattttatattcttagtaactacagtaaataggattgctttctttatttctttttcagattatttgctgttgctgtatataaatgctactaacttttatatgtggattttgtatcctgcaactttctgaatttgtttatcagttctaacagttttttggtggagtcttttggttctgctaagtatgtggtcatgtcatgtgtgagcaaggctaatttgagtcctctctttctagtttggatgccctttattttttctcttgcctaactgttctggccagtactttcagtactatgttgaataacagtgttgagaatgggtatccttttcttcttctagatcttaaagaaaaggctttcaattttcccccattcagtaaatgttagctgtgagtttatcatatatggcttttattattttaaggtatgttcctactatacccagtttgttaatggtttttatcataaactgttgttgagttttattgaatgctttttcatcttctgttgaaataatcatatggcttttgttcttggttatgttaatgtaatgtatcatgtttattgatttgcatatgttgaaccatccttgcattcttgggataatcctacttgatccatagtaaattgtctttttaatttgttgttgaatttggtttgctaatattttgctgaggattttttaatctatgttcgttagggatattggcctgtagttttctttttatgttgtgtttttgtctggttttgatgttgggtaaggctggcctcataaaatgagtttggaagtattctctcctcttcaatttttttgaagagttatttgagtagaatttggtattagttctttaaatatttggtaattttggacagtgaagccatcaggtcctgggtttttctttgatgggagactttttattatggcttaaatctccttacttgttattggtttgttgagggtttttatttcttcatggttcaatctttgtaggttgtatgtgtccagaaattaactcacttctagattttccaatttgttggcatatagtggatcacaacagtctttaatgattctttgtattctgaggtctcagaaatacagaggggtcctttttgctgaattcttttttgtttctggtttgagtcttctctttttcttagctattctagctaatagtttgcatattttatcttttaaaaaaaacttttgttttttttttgtttttcttttaggtttaattttatttatttctactttgatctttatgatttctttctcctaatttgaggtttggtttgttcttgcttttctggttccttgaggtgcaccattagcttgtttatttgaagtctttctggtttttcatataggtatttattgctataaacttctctttgttgtattataaattttggtatgttgtatttccattttcatttgttttaagaaatttttaaatgtccatttaaatttcttcattgatgtaatggtcactcagaaacatgttgtttaatttccgtgtgtttgtgttttctgacattccttttgctattaatttctagttttattccattataatcatataagatacttgacatgattttgagttttgaaatttttttgatacttgtttcatgtcctaacagatcatcaatcctgaataattccatgtcctgattaaaagagtgtgtattctgtagctgttgggtaaaatgatctgtaaatgtcagctgggcatatgtactatagtgtacaatttaactctgatgtttctttgttgattttctgtctggataatctgtccattactcagaatgggctgttgaagtcccttactattattgtattgcagtctttctctttacatctattaatgtatactttatataattgggagctccagtgtttggtgcatagatatttataatcattatattatctcgctcaattgtcccctttktcattatatggtaaccttctttgtctctttttacagtctttgatttgtagtatatttaatctgaaataaatgtagctactcctgcccatttttggtttctagttgcatgaatgtcttttcttaccccttcagtttatgtgtgtctttataaataaattgggtttcttgtgggcagcatgtaattgggtcttgtttctttgttcagccactgtatgtcttttttttttccattttcagtcaagacaatcatttctatttctttttatttatttatttatttattttattatatactttaagttctagggtacatgtgcacaatgtgcaggtttgttacatatgtatacatgtgccatgttggtgtgctgcacccattaacttgtcatttacattaggtatgtctcctaatgctatccctcccacatccccccaccccatgacaggccccagtgtgtgatgttccccatcatgtgtccaastgttctcattgttcaattcccacctttgagtgagaacatgcggtgtttggttttctgtatgtcttttaattgtagaattgagttgtttatattcagttattaataaatgaggacttgctactgccatttcttgcttgttttctggttgcktcatattttgttctttcttcttttattactgtcttcctttttagttatgtgattttctctggtagattgttttaatttgttgctttgtaattttcctagatctattataggcttttgtgttgtggccacatgaggcttcaagaaaacatcttatagatataacaagttatcttaaagagatgacaccttagatcacaaggaaaataatacaaagaaataaagtgaaaactttttaaaagttggtactttatcccttcaacattttaactgtatgttgtctcaattcacaaattttatattgccttataaaacttataaactcttattagattgttatagctattattagttttgatagatttgtcttttgggctttgtcctagtgttatgaattgattgcacaccacaattacagtattaatgtattctgcatttttcagtatacttaattttaatagtgggttttatacctgtaaatattttcttttgcatattagtgtttttttttcagacggaagaactctttagcatttcttatatgacaggttcagtagtgatgaattctgtcagcttttattcatctaggaaataatttatctgtccttcatatatgaaggatagcttttgtagagacaatatacttgaatggcagtatttttctttcagcactttgaaaacgatgtcccactccttcctgatctgtatagtttccatagggaagtctgttgccagacaaatttgaacttcttttatgtgctatttgcttcttttagaatcctttctttgtctttgacctttgagaatttgattattatatgactcggagtagacttatttggttcaattctatttggtgttctttgaccttcctatatctggaattttatctctttctcaagaaagttttcttaagaaaagttttctttagaaagttttctgtcattatttttttaataagctttctatcccttgctcttgcacaacttgtttttgaacaccaatagttcttagatttggtcttttgagataattttctatatcttgtaggcaatcttcatttcttcattcttttttcttttttctcttctggctgtgtattttcaagtaatctgtctttgagctcactattttttttcctctgcttgcttcattctgctgttgaaaacctctaatataattttagttcagcaaatgtatttctcagttccaacatttctgtttttttaaaaaactattatgtcaatctctttgttaattttttctgataaatttctgaatttttttctgtgttatcttggagatcactcagtttccttaatgctgctattttgaatttttggttagagagttcacatagaagcatctcattagggtcagtcactggttctttgttttgttcatttttgggggcagggcggggcagggggatcctggttccctatttgctgttgtttcttgtggatatacatctacatctttgcattgaagaattagctatttacttcaatcttctctttttggcttgttttgtttcatattggatatgtttgcttagagattctttaaaatgtatctattaatctgttgcttttctttattttccactaggttgctgcctccttttmaacactaaatggcaccttaagtccagatttaccttggttctagtaaacaatcagagtgtgccctgtaccatattggagaggtcctaaaggggatataccagtagtgtgggaaaactggctagggattcatgcccatgggacctgtggagcaagtctgctacagcatggtcttgctaaacagacactctgattttgcatcttctttggctaaggtacaaagcagagtttccagggctggggatggtagtttcacctctcttcattgtctctggctgttctcagggatgtttctcccttcagtcactcctgatgcttcccatgggttgagacatggacagttagttctcctgccagggaacccaagatagtggggaagctaattgtccaccttgatcttaatttttccagtgtagaaaccatgagttaggggaattttctgcatacatggtgctgggcaggttgtggggagaagcatctcagatatgggagtccaattctcacttctctgcgaccctgagaattgtctccatctcattttggttctgggacattgctagtgataccctcagcaatttatatttgttcttggttttctctctggagaggagtgggagtgaagccagcttgcttctacaccaccattttaaatgaagatgtcacttcttagtcacttwgtctgttactttaagcaggagttacaactggatttgggaaaaggtgagcatggaagtatatgtttagaacaccatccaaccaatcctcctatgtctccctagtaagccgttttctattccttgttcctccacaatgtgtatttcatgccttgtaagtcttctcagatctccatactcatcatctcattcagcactcttagaggatcatccccattccacttcattcagaacacagcaaaaamtaaaggaacattccctcactgtaatgacaccaaccctcaaaactctgcattctttcttccatttcatcctccccctttattgcattagcgtgtattcctctttgtctttcaggaggttcacaacaagtgaagcctgagacaggaatttgggtacatctcctcaacactcctatccaaggtagatctcccctgctgggctttgcatctcattttctttcttatatggtcttttctgttattcttcattttcattctctttattgggttcttccttttcaacaaatttagtaatgattaagtcttttattataaaagctttcagtttttctctgcatgctgactgatctttccctttcctccttataatcttcctttgtggctgagattctggtttatgcccaataccttttcttccttataccccactccststcctactcactgcaatctgattctgtctctattgctcttttggaattgcatttgtcaaagttatcaaccttctgcttctttctacttctgatggataattttctgttcttttcttacttgaattgccaggaacatttagaatgatcttctcccttggctttggagatgccaattctgctggatttcttcrtacctcttcattactgtttctcagacctctttggcagtttttttcttctgcctatttttttaaaaatttactattcctgttcactctgccgattatttcttttactgtgcagaagctttttagtttaattaagtctcatatttgtctatttttgttgttgttacctgtgcttttgagatcatagtcattcataatcattgcctagatcaacatccagaagagttttccctaggttttcttgtagtattcttatagtttcaaatcttacattgaagtcgttaatccatcctgagttgatttttgtatatgatgatagayaggggtccaatttcattcttctgcatatggcaatccaactttctaagcaacatttatttaaaagattatcatgtccccggtgtatgttcttgttggttttgtcaaagatcagttggctatagatataaggttttattttgagttttctattctgtcccattgatatatgagtctgtatttatatcagatataatacatatatataatataagtatatatatttatatattttggttaccatagccttgtagtataattttaagtcaggtaatgtggtgcctccagctattttttttttcttaggactgctttggctgttcaagctgttttttccatatraattttaggatttttttctaattctttgaaaaaatgttgcattttgatagagattgcaytgactctatagattgcttgggaagtatgattgtttgaatgacattacttcttccattccatgagcatgggatgtttttccatttgtttgcatcatctacaattttatacatcagtatttcatagtcttctgtgtacagacctttcacttatgtggctaagtgtatttctaggcttttattttcrtagctattgtcattgggattgccttcttaatttgtttttcagtttgatcattattgatgtatagaaacactactgatttgggtatgataattttgtatcctaaagctttactaaattcattcatcaaatctgagagtttatggtgaaatcttcagggttttctagacataagatcatgtcattagtaagcagagataatttgacctcttcttttctaatttagatgcctgttttttatttttcttgtctgattgctctggttaggtcttccagtactatgtttgaacaggaatggtgaaagtgggcaaccttgtcttgttccacttgttgaaaggaatgctttcaacttttctgcattcagtataatgttggctgtggttttgtcatatatgacttttttattttgagatgtgttccgtctatgcctagtttgctcatggtttttatcatgaagtgatgttgacttttttcaaatgctttttctgcatccattgtgatatcgaacagacaacctgcasaatgagagaaaatatttgttaactattcatctgacagggaactaacatccagactctayaagaaattcaaacaactcaamaataaaagaaaccccaaataatcacattaaaatgggcaaaggaaataaataggcatttttcagaagatatataaatggccaacaagcggattaaaaaatgctcaatatttcttatcatgagcaaaatgcacattaaatccacaataagatgccatcttacaccagtcagaatggcatcttctcacttataagtcagataaaaataatgtgtacacatggacacagagtgtgaaatgatagacaatggagacttggaaaagtggaagagtagaaagcgggtggatgataagaaattacttaatgggtacagtgtatattatttgggcgataggcacattaaaagctctgacatcaccagcacacaatatatccatgtaacaaaattacaccggtccccataaattatacaaataaagaaataaaaagtaaaaatttctgttccttagagtttatcctcttttctcttttgactctatataccttttcctgggccagattaatggttttgagaacctcagaaaacatcccttccatcactgtcccgtgatatataaatcaaaagtaaacatttaatttttaaaataaagcaaaattaatattgtctgcagattttcagaatatttttttttcagaaatagatttctgaatatattttcaatattgaactttctctctctttgctggttccctgagcacaggtcccagcaacttaacatatcatcttgcatattgtcaagtgcttattcaatagtagctgactatattaatgctggagatgaactctaaatggaaaacaaggcagataatacttcattgcttccctctcctaggtttgctgatattgctctgctgtagaatccccttaawctacagagtctagttatatctgaaacagccaaactccaaagagcagtttataggacctgctgccactggtaggcagcaaaaaacaaaactacacccaaagcccaacctctctcctcactctgtctttgacaactctttgtatggtgactaagggcagagcagattcttggcaaaaacactctatgatgataagctctcggggcctgggtaggaatgggcaatgtaattccacaggcattacaccaggtttaaaaataggaagcttttcccgggaagagtagttattgttggtaactggagcggacatgatgtgtctcagctaatggtaaaaacttgtgaagtcatccagtattttagtcattcttttgtgcttcttctctcttctcttaaacctctttcctcaattgctttagaacattttaaagattttcttcaaatcctgttttcaagcaaagcattctttctgtaatctccctctctctctctctctttmacacacacacacacacaccagaagtcagttatttttgacagcatacatgcactaaactgaactctagactttctgtttttttttgaaatagagaaagtaaactggtcttataagaacattggtcattgaaaattctttacactttgactttagaggtgagggggacatactcattaattcagagaggaattactgggcaactactaaatctcagaccctgtgctgaacactcaaggcacaatactgaacaagcccagacagcattcctactcccacagtctgtggcttaattggggagtcctcaagaagcagcactctgccaggcactctggcagtgaaagtaaaaggtgtcacaaaagttgtggacaaaagcaccagaccaggatttagggtattaggaaagccttcccagaattgacatctataccaaaatctgtcagatgaaaagaagttatcctggagataggcatggaagggaaggcagatgctattggtccaaaagcccagtggcccggataagagagagggaaacattcacgagagttagaaggaagtagaaagattgatgctagagaggttactagcagccagatcctgaaaggtcttgtaaaccatagtaagacatttagagttccttaaagcagagaaggaacatgattagatctgccatttttgaaaggttagtcttgagaaagcgtggagtttgtattcaaggagtgcaaaacacggaacagagaagcttactagaagggtgtggttggatttaagagatatttataaatagaaccaacagaaattgacaattaattgaatgtggtgtagtcaggaagaggaagagtccaaaataatttctcagtttttaaattgagtaattggacagctcaggcagtgtgaaacagaaagaataacaagtttgggtgggaattttaggcctgtgtgataatcaaattagagatacttattatgcagttatctgtgtggttatgtagatctgagtatcatgtaaatttagaaaatattaacatatatatgatagctaaagctatgggggtaaataaggcattgcatggctaacatcctaataggggattctacagcaggataatatcagtgaacctaggagagggaaacaatgagggattatctgccttgttttccatttagagtccatctccagcattaatataatcaactactattgaataagcacttgataatatgtaagatgatgtgctaagtttctatcatgctgagaaaggaatgatacttgccttctgggatctttgtccagctaatgaaataaggaatgctctctattatatatgtaggtacatatgtatatacatgtgaaatccactaattcaattaatgccacagtggtgctggccacacctggaggaaggaaactgaaaggaaatctaagttctttattgtgtaataaagggtatcaagagtaaacagaggaacactagttttgatgttgtacaggttggactagagtggatgtgatattagaggcagaaaaataagaatacattacagaatatcagaaataaacaatctrttccagatactatatattttttatattatactattgtggttgatgcagaattgaaactcatataaatatatttttaaatatctagaagtaagatctttattgttcgcaaatattgccaaagcaggcctaaatattattgttaggttgtgtatttagattagacttaatgacatagggattcagatataggggcttattttaggctggggtgatcagtgaaggcctcatggaagaggtgttatagaaaagaggccttgaatgtcagttagaattttgataattaaagatatagaaggaggatagcatgagcaaagcagggaggtagataaaaaagcaaaaccacacttggtgttaatgagtaaatccactaattcaatcaatgctatagtggtgctggccatacctgggcaaaggaaactaaaagaaaatctaagttcttcattacataggtcatggggtatcaagagtaaacagaagaacaccagttttgatgttgtacagggtggactagaatggatgtgatattagaggcagaaaaataagaagagattatagaacatcagaaataaagaatctgttccagatagtggcagtgggacaggaaaaatgcagatatattatacattagactttgggaaaggaaattctatagaatttagtaaatatttggatgcataggtgtctagctatagtttaaactaagcaactagcagaatttttatagcatgaataaaaaagaaaactaagaatggagatatgggttgggtaggaggattatatcaatgagatatatgacctgttgattgaggtcatgagggctatattagtttcttagggccgctgtaacaaagccccacaaactgggggtcttaaaccacagtaatatattgtctcacagttctggagctagaagtccaagatcagcagggttggttctttctgagggctgtgagggagattctgtcccaggctcckctcctagcttttagtagtctcaggcattccttggcttgtagctgatattcattytgtatctccacataatcttccctctatgtgaatctgtccctgtgtccaaatttccttttagaaggacatagtcatattagattagggcccactctaatgacttcatcttaacttgattatctgcaaagaccctatttccaaataagataaccttcacaggtattcagggttaggactccaacatcttatgggggacacatttaactcataacaatagctaccccagtaggtgcattcaaaaaatataagaacatttaaaaaaggatatacagatacataaatcatttgtattaagataatcattgaaataatgagaatgtgtttaatcttcaagattgtaacaatttataatttgaaggatggttcaatttggtattctgcttaatataagaacttatctctttaatgtgtctgccaaataacccatcagctgctgcttaaatatttctagtgttagggatgtcatttcttaacaactataatttgataaggctctctatatactgaggcaatatatggctgtgtataattttgctcattggccccaattttttcctctggagttgcacagagtgaggcttttatatgaaatcaaatttcaaatatttaaacaattttaaggctgtccccacccctgtcatctagactaaatatgcaccatttcttctactattcttcacatggcatggttgccagattttcctcctttttagtctacctcttctgggcaagtcttccaaagttgtaatgtccttaaagaaggatagcactgatccaggacagatctattcatggcagtacatagtgtttgtgcctaggattgcagcctaagagtctatacattttcccccaggagagccgtggaacactgttggcaactgaaatctataggcattctcctcccattgattggtgttaaacccagagtttctaatgctgtattttagtaattgtttgtttgtgtgtgtgtgtgtgtgtgtgtgtgcttaagtgtagattttacatcagaaacttttagattttaccttctgagtttactctcataattataacttttttgaggcaaatttaagtcatgtcgttcgcaaatttgacaaacttacatcgtatgaattcttgcaagacattgattaaattactgaatgaaataggggcaaatacagagatctgggctagggatataaaaacttttttgggggtagtcccaggatttagtgtgagttgttataaatctgtaattatacacattttccaccctccttataaagatctcatgagagatctatccaatatcctgttgaatcaaggacacactctccaaaacagtgtcttcctctagaaaattcaacaaaataatcaaaacaataaaatgtgattagttttgcatgattcttttttcctggtgagcccatgatagttccagtaattacttctttcttgtctaagtagtaaaaatttgtttatttaataatgcattgaaaatatttctgggaattgacattgagctcactaatttatagtttccaaatctctcctgtttcctgtatcaggagttgaaatatgtttcagtctttagcctccttacaccactctattatctgcaaagattggaattatttgttacataaacaccaaaacaggtctttttggggtcttatgaatacctcttatgattctggagactaattcattcaaaaacagttctcacactatttcttcagtcagctagcacttgcaatttctctttgtcgcattattcttttgcttaaatatatcttccctgacctttctaccatgagaatgaaaatcaaatattgaaaacacagttggaataatgtctctgaatcagtcaagacakagttgcaaaaaacagaaaccactgtagctattttaaccaaaaggrgattaaatacaggaattgagttgcctccaaaatctttgtaagggctagagtagtagaattgaggttgaacatctagaactatctctcagaataagattatggaactggtctgcaagtagagctgctatgcctgctacagaaagggaggtgggaattctgaagcttccgttagaactgccagtttcagggacatgctgcccagcagctgtctggagatcaagaaaccactgatgccatccctaagtcatgctgtgcctactagatccacaccagcaaagagggtttgccccgtagcttgtttctgaagacccacattgctcatggctggatgcgggaacactattgcccagacattgcaggcagagtaagtgaaggcagtgagaaggaaggcggtcatctcmcagtcaccttttaactctaacatgaagaacacaactgatcgtagactgtaaatctcatccaaatccctgggtgcaaaggagctggagaaatgtaaaatttagcttctctgtcctccagaacagtaagacagaccagaaggaaggtggaataattatgtgcagactaatgcacaacatctaccacaaacttctacagtgccttattaatgtttgattatctaagcatatttttcactccatcctttgtttttgcatgtaattttgtacacacttctattgtggtgcctgtcacattgcattttaattatttgttcacatgattgtcttgctcattgactgagctccttgaaaacaagagccgtgtcttctgtatcttttcattgccagggtctagcacagtgacttgcagataataagggaaacgaatttaaggctagaagaaagaatgcatgcttgggaattagaggaattcaggtttaaacctttcctccaaaacttacaatctatgtgatccgggggaagacactttacctctgaaagccttagtttcttatgctaacttgaagtaattatgctaacttcataaagttgttatgagatttacatgagaaaatatatacaaagcatctggcatacagtcaggactgaattaattgtggtcactattattagtagtaaataaatggtgccaggtaaataaattattgagctgatttccactttaataattattcatcttggtagcaaggcagatttctaagagttcaggttgtttttcttttcccttctgtatcattatattctattttgatcaatgctctgaaacaaatacattttaaaatttatcattctttgcactttttcatgtgtatgttggttcaagcctttttttttttactctattttttaaccattttatgctattcctccttctaaaatctatatgtgttctcttaaaattttagcttcccagagagttctcttttaatatctggttctttttgatgctttatatcttctttctgttttattgggacaatctaggattaaattgatttttaagttttctatccttccacctccaaaaggccattttcctcttgagagtcctaggcatgaaattgtttcctttttggaaatctaatttagtaaagcttgaaattttagtgttatcagcctgggctattgcaaatactaaaaatatagaggtttatttcaataaggaaatttattcactcaatgtcaccagccagttatttcttattagtgagaattaaaatcaaactattatatctctttgttgtttcttgaaatttttgagtcaagaaaagtatttattgaaggtgctgttgctattagcagaagcagccttcacgcagggatcatctcacttgaagttggggctaatcactatatccctcttctgtgtccattttggaacttgcctttgggaggttccaaaagcactaatggaagttccacactaccctttgtcttaccaggccaactgtagtttgtgcacaggagagtttcatttctattttattgttatcaaaaacttcccatcatggattgactttagggcttgaatgtaagtgtgctttcttcctttctgcattgtggcattgcctccattctgttgctccttttaagcaaagtatacctgctccttagacataagccatgattagccccctgccaagtctgaaagatcayacttgctttcctacattatgacttttgaactttgtttctggctaagtagagatttgaagccataggtattgttattcataataaaatttattgaatgtttatgtgtgacactataaagtgtcacatttatgaagatgttatccattttttacctgccaataactgtatgaggtgggtttcatgtagttattttcattagttactataactttatatttatatattatttactatattttcatatagtgactttcattattcccatcttacagctgaggaagctgagatacattgatggtaggtgccttgccaatgccacatagccattgagtggaggaggtgagcctagaaactaagttcttctggtctgagagcctgtgttcctgacacactggctcccttttgaccattttctctcaagttctcctggggacctctcccactacacttttcttttgtgtgctttatattttgtctttctaagtatctgtatgtgacgagttatctatttttatcctaatcttctaaataaattttgctatgtgggtctcttgatatggtgggtaaaatattgccaaaaactggagtggtgaaatacactcttttcctcctcttgagtccataattctggcctcagggttttttaaaacaaatcttttcatttgataccatcttttaaagccagatgttcactctctttatgctcttttattttccagtggtattactttgaagtgaaaagagatgtattagtttttgattcttgctgtaataagttattgcaagcatagtgacttaagataacatgaatgtattgtacttctgtaggtcagaagtttaacataaatctcactaggctaagatcaggatgtcaacaaggctgcatgcctttgtggaagttctagaggacgatctactgctttgctttgtccagtttctgaaggctgcctgaattccttggctttgggccccttcctccttcttcaaagcctgcattgtagctgtctctgatcctgtttccatcactgtatctctttctctgatgacacataggaaaagttctttgcttttaagtacttgtatgattagattgggtccactgggataatccagaataatctcctcgtctcaaagcctgtacttttagtcaaatctaaacagtcctttttgccatgtaagatgacatattcccagcttccagggactaggacacggacatccttgagggcattatactgactaccttaaaatattatgacactagactttaagtcctttcartctctgattatttcttttatttcaacctcaagttcttacaacacaaatatttctagagaaaattccattttgcttctagtaatattcatttccacatgaattagcaaacgtgagttaatgttttgtgtataatgtcttgtcaggttttccatatttgaatttcaagaaacagatatattcctggttgatgatgttctggtaataattatgtctggtctcttgtgtggccttcagaagggaaacaatattcaccactatgtctcttctttctggggtcatcagcagttggttgattgtactgagggggtggagtgaaggagagcaaggaatgagggaggaattctgcgttttctacttgtgtcatagaaagagtattagaagtgacaccaattcagagagggaccagggaggagaaatgggtgtggggaagattgtgagcattttcttagagataaactgaatatccgcagtccacataatgctgtgggcatgaatgagctcatactaccattaacaatcaaattacattagctcaatatgtaactataaaatcttatcctcatacaatgtaccttttgtagtctccagaagggtgtgcctttacaattcatgcccaccagttctgtggctctcctgctatttaccattggacactggcaatggtatttatcttgtctgtggacactcagcatttccagatgattctctgccctatttctctggggaaaagctggccttagagagttggcgcctgatgcaatccaaggctgtaaaactctcaagggccagaatggtgctgacgtcccttaattcttgccagaaatggagaaagcggcccttatcctcatcagtactttgttttgttattaggacttaaagtagaactgcttgtctatcctggatttacaaattttttttatgaagtttagtttcttcctaaaaagctcaaaatccagtttgtaagattaggtagaggacaaaatgccaatgtgttccttctcttgtccttgatttttaaatctttccatggacacaggcatatactttctctgtatttaaccgaaactcaacccttcttgcaaatctactcatagaaaaacaagtcaacagattcaccagctggaacattatttcagatgcattgaaattcactttgtctgagtttcttttgtactcaaatagaaccaccaattacattgacatgctgacttcaaggtttctgtgcacaaaccaggtagaaatattgaattgctaggaaaagaataagaatctaatcttagaggagaggtaggagtagttacatttatgttggggagttgttcgaatagtgacagtgctttgaagtttaagaatagaagggctcccaatggtgagcatggagagtgagaaaagaatggaccacaaacagaaccctgggaaataacttttaaaaattagaactgaaaagaggaactcacaatggagactgagaatcgttggtctctaaagcaggaggagaaccaggaaagagcactgcaatgaaagcaaagaaagtagagagttttaggaaggagaaataactaataatataaaaatgcaacaagaggttccaataagagaatgattttttaaaaaaatttcctgggcagagaaacttaagcagtcaatgacaactttaatgaaagcaattttgataaagtggtacagacgaaagccagattataatgggattaggaggtacatggaaaaaaagtgaatgggagatgaaaaaattattcctttaagaagtctgaattggaaaggaagaagaaaaatgagagggtgttagctaggattttctcagaaaacctcatcttgtgggatcgggaaaagggaatacaaataggtaaggaagtaaatatatatgtgtgtgtgtgtgtgtgtgtgtgtgtgtgtgtgtgtgtgtgtgtgtgagagagagagagagagagaaagagagagacccagtgacccagtgatagagttcatgatgaatgggcttgattatatcatcaaagaaggaggtatgagcatctactaagagtcatgaagataggaaattgaggtgagaggagcaaaagaagaatattgaaaatttcaaattacccctggagaggagatggccataaacaattaaaagtacagacaagtggaactgaaaatcttaatgagattggaaatgaaaaagaaacaaatacatctgaataagggtgacaatgagaatggatgagcaaagggaagtgagtgaagattattagaaatagggaagtcaagaataagactgtgttggccgggtaccgtggctcacgcctgtaatcccagcactttgggaggccgaggcgggcagatcatctgaggtcaggagttcaagacgagcctgaccaacatggagaaaccctgtctctactaaaaatacaaaattagctgggcatggtggcacatgcctgtaatcccagctactcaggaaggctgaggcaggagaatcgcttgaaccagggaggtggaggttgtgttgagctgagatcacgccactgaactccagcttgggccacaaaagcaaaactcggtctcaaaaaaaaaaagaaaaaaaaagaataagactgtgttttcagtggatgcttcacacaaatgttgaaattcctcaggcgatgataagaggtggagtaaggggagagcccaggaatcaggggctggagctctttacagagtaaccagaaaacagaaaaatgaaaggaagtggggagtatatgggaatgagtagagttccatgcacctaagagcaaaaggaattttacaggagcagagaaaactatgtgtttgaggttgcaccgaacaacctggagaatgctagttggtgcttccgggggcccacaagtcccaaggtgtgggcccagtgaatggggagagggatcaggtcaaaggtgatattcccttgaaggaagaggcagtgcagtcaggctcctcctctggagtgggtttgctctgactgtgggaagtggggctgtgggtcccagtctcaaggtgcacatccatcctttatgtcttgttttctacatgccaatttttgatactgattcaacttccttcagacagcagacagctcaagatctttttcttatttctggcttccttcttgaataattcctatcaatctacaataaggctatttaactgactaataaactacagcacaaagaatcacttttcctacacttttacttkgtttagttgggaaccaagcagtagttgaagtttgcgtgtacatttagatactgggatgtggctggagagccagctgtyggggcatggcagaagccagagagaatgcactaaggctgggaggcaatgaaacacggtagactggaaacctggcaatggctaatcccaaactagtaggtgatggtcatagaatggtgaagcagatgtgtactctccacggggcatgtcagaactaacaagcttgagcaatggggcagaacagcttgatatgtcagctccaaggacagcctgtttctgagacgatttttataaaaaccaagatataacttcggtcactctgagtccttcagggatacatataggtgagtatccttatctagagcatagagagcatgaggaaaggtagatcctggcagaaattaagcaggttaatgcagttcatccccttttaatacaaagttctggtcaatgcatgccccttttgcgtttcactgcatttatgtatggcattctagcttcccttgaatattaagctaatttgaatggcaagtctatctcttaatcatttctgaagcaaggtgctaagctctaaatttgaaaataatatccattttttttcctcatcctaagcctatgaaccagattctggtcatattggttgagaagctaagacaatatcttcattagctccgattaacttttgaaatggttacctgtgttgcaatagacagagcattctgcatgtaaagcagacacagtgacctctatgtgtttactctcgttggtttagagaaaagtctggatagtggtctttgtttccagcaaaataagggtttcttctatcaattcaattaatgactctttctagctttttaaaatatattctctcccttatacttgacgacatatatctgtatctctgggaagtacaggagtctgagtaaccatacccagtttgccaccagcatgacataaatactgtcatctggaagggtaatttatgcgtggagagaagattggacaaggaagaaaagggagatgaggagaaccagctaatgaggttggtgtggaggaggaggcccctcggagggtgctcaagataaattagtggaactggtgggttgagggaggatgggaggatggtgtccaagactggtagatggcaggcagagaagccagtaacacacagatagcccaagtaagccatgtcaggagcagggaggttggagaagtgcctgaggagaagagagagaaagctgtcaagttaccaactcccaattttaattggaacccaagaatagcaacagagaaaggatgtggcttttcttccttggtaccctgagctgagcccatgctcagtctctgattctctcttcccccttcttttcttttcttctctttctttttcttttcatttccttcattctcttttctcttcccttctctctcttctggcctattgaaacatctccatgttgaagactcacttgatatcatcatcacccccaaaccatcaatttatcaataaaggaaattatagttatttataataaaggagaaaataaggagaatgtgactaatatcttgggaaaaccaggcaacaactcagaaaacattgtgtcttcaggaaagcagcaggagaactatccccctgatcacatatgatatcatctcatggagtttgggtgatttcttgtggctgagagctagttttccaagatattataagtcagtaaaagatagtattttaaaagcccttttctcctaaacatctttgtttctaaagcaagatctttttttgtctttccttttattcctgtttttggttctgttccaaaaaataaataaacaatctttgggatcgccctttctcaggtgctttttgccagcacatcctacacttggatgaaatagatggcatcaacaatcaggagkcagagcaagctagaggggaagggtcatgctgtcctaacatgagcttctagggtggtagatttcaatgtctgcagcttgtctactagaatagcatcaacaaagcataatcagtaaaggaaatttccaacctatgttgccaggctgtctgcccagctgacgctgtgawaggaacattcctatctctggaatggcagaccacggccactgtggggagcatctagtaagtctaagggaccattgagctctggtttggttgttccttcttaaaaaacacttcagtgagaacagcaaggccctgtttgcttatggtaaagttttaagtttcactgatgctgagaagctaaagatctttgactatatatgagtttagaaacagaccaaatgtttgtttccttttttataagccacaagtcatgtgtttttaatagacctttaattctgtgcatcaatgcaaacataatatttcctagtgctttcaaagtcaccaataaacatactaggtatcataaagtaattggagtagggtagagtttccatggattaagggagtataaagagagatgtctatacaattgttatgccttgcagtagctttattatgtccttccctgcttataactcatctcatattttcctcttttactttatgttttctatcctctatttccttttttcttttaaaaataatgcttgaagtaggcatatactggaaaagagattgaactggaattcaaggatcatgcagtgtgatggaaggaaaagaaactaagagttggaaggccttcttcactatggcctgagaataattctcaaggcaaagaattcatggtatcattagatttatcttgaagaaataacctgggcatagggtggggaattgagtatgatgtcaaatatggagtatccatacaaacattttagtgttttaaaaagtcattatactatttattggaataagcatcccaaatgtgtattagtgccttttcttctggtcttcatgacaggctggtctctgccccatgcccctccaaaaggtaatgctggctgggagtgccattagaatctgattaggtctggctctgctattctctaagtaccaattctttgctgtgacattttttcatcttgcatgctctctagggcatacatgagtgtgaaggagctgaaggaggccctgcagctgaacagtactcacttcctcaacatctactttgccagctcagtgcgggaagaccttgcaggtgctgccacctggccttgggacaaggaygctgtcactcacctgggtaagtgaaatgaagaccaaacatagtaggaaaaaaacaaagaaggctgaaggaagcttgcgaaagtaagtttggggaaaaaagaaagacagagaaaaagtgaatttacacagtgaattaactgctttgtgctgagaatggcacttagtagagcctgtcaaaatgtttcaatatagacaagtaagaggtattagaacaaacagtggcaaatgctcaggatgttctagactgaatctataatttagatgcaaataaattgctggcatagaataagatcattttaagtcttgcagagccccaagtggggaactatcaaaatatccagaaggtggctggactgtgaaacctgctttacatgatcactgttctagaagactgatgggcttcttgtatggtgtggactcctgagaaaaatcccaggaaattcaaaaggtggggcttgcctgctcaccggggaaaagagtggataccttaacacaaartgcaactactgaacacttaagaaagacaatcctattcacaatagcaaagacttggaatcaacccaaatgtccaacaatgatagactggattaagaaagtgtggcacatatacaccatggaatactatgcagccataaaaaatgatgagttcatgtcctttgtagggacatggatgaaattggaaatcatcattctcagtaaactatcgcaagaacaaaaaatcaaacaccacatcttctcactcataggtgggaattgaacaatgagaacacatggacacaggaaggggaacatcacactctggggactgttgtggggtggggggaggggggagggatagctttaggagatatacctaacgctaaatgacgagttaatgggtgcagcacaccagcatggcacatgtatacatatgtaactaacctgcacattgtgcacatgtaccctaaaacttaaagtataataataataaaataaaaaaataaaaaataaaaaaaagaaagacaatcctttttacaacgtcttattattataaagggaaatcttactgaccaagcaagaagagggattacatccgttttataaacatatggataaagagtaattaatgaacataattagtatacatttccaaaatgttctagatagcattctataaaaatttattttaaaataagttaccaaaattgagagtaatattttatgttggaaaaagaatagttagactgactggaaagaattttataaatgatttttaaaaggtactgcaaagttggtcttcctagtaatcaaataagaagcagagaggaataaattaaagaaatagaacataatgctgtatatgtcaagcacctggtcatagtgaagtctagaacatatcgaattgacaatcatagacaatatgagcaagtattcaaaagataaccagtgttgtagattggggaaggaggaagatgagcaatgtgttagcgatagaccaaaaaaaaaaagaaaagattgctgttcaatgctgttcaagtgtgaaacagtgatgaaaatccacagagtgaatcagattgagatccaaaagggttatatataccagaaaatggaggctatatgcaaatgtatatatacacatatatgcataacaaattaaacatgtaaggatccaaattaaatgctttgccagcgtgcatagctgggtttcattggctctatagtacctgattcagttttaaagccctgcagtccttttatcactaaactgtatttttagttctcagtacatgagaaatcagaaatttgtgatgttagtggtggcctgaggctaccaaggcaagagcattgcatgtgttgataacatattatcaggttcctcaagtaaggacctgatattttcagggatccagtataaaccaaagaaggcattcagatttatctacaattactacgagtgaaaaactagggaaagagaggtttctgggtgggatgagacattttgttgggcctgtcagaaaacaaatttgtaagtcatagcctgcacttcatggctattggtttcaggaacagttccaaaggatttttgatacagctgacagaaaggggctgtagatttcagtcatacatttccaagatggtcgggtaaactggagacacctctgtgctttccagatgaaagctagtgtgtttcattctagccttcctggtagcaatgggtggactagaaagtcatattcctgttcctgtagtccatttaatagtgagtatgggtgttttgagttaygctaatcaaaagcaacagtagcagaggggatatataacactgtaagaaaatatctccaacttgatgcacactcccatcaccaagaataacctttctggtgtatgtctgtggaggtcctgatagcaaggtttacccwgcagtggcttccatgaggcccaggtctatcaataggaactgaatctatttggttaaaagaccttaaaaattatcttcctggccattatggagacaaatcatgacttcttgataagaattgttgggctggggcatactattgaatgttttctaactttattagaattgggcattagcaagactcattcaactataaaaatggataaaatactttaaaaattatttatttgaagacatcagactggctaaggcaacaaggacatgaggagtccaatccctgaaagaagaaaaatgcattgaagtgagtcctgtatataacttagtctttttcctttcagggaaattgccacattctcagtggaagacatagaggcagagcagagagcagcagcctagagcttgctttggtctcaagacaaaaattagagttcaggttttcagggcaactaaaacttgagagaccaggatcctagagaaatggaaatcacaaaaagtaagactgattttctgcttgtgattttcttttaagatatttgttatttactaaactcacattctcagggacactgggcaagaaaacacatagaaaataacttctaagagattaaaaagctgaacagtgattttaggagtctcataacagaagagacaaaattgggagttgaggccttgtcaaggaggaggggctctgagacaccctctgtgcaagggtaaacagaagtagtacagcttatacaaagcctaaaatccagcctgaaacactcttttaaaaacatttcaatagttttttggggaacaggtggtgtttggttacatggacaaattttttagtgatgacttctgagattttggtgtacccatcacccaagcagtgtacactgtaccagtgtatagtcttttatcccttgccctgctcccacacttcctcctgagtccccaaagttctattgtatcattcttatgtctttacatcctaatagtttagctcccacttataagtgataatatgtgatgtttggtttcccattcctgagttacttcacttagaataatgttctccagctccatctaggttgctgcaaatgccattattttattcctttttatggctgagtagtattctatggtatayacatatactgtattttctttttccactcattgattaatggacgtttggactggttccatattgctgcaattgtgaattgtgctgctataaacatgtgtgcaagtgtttttttttttttttcttttctccatatagtgacttcttttcctttgggtagatacccagtagtgggattgctggatcaaaaggtaaatctacttttagttcttaagggatctccatactgttttttcatagtagttgtgctagtttacattcacaccagcagtgtgaaagtgttcccttttcaccacagccacatcaacatctattattttttgattttttaaaaaaattatggcctttcttgcaggagtaatgtggtatctcattgtggttttgatatgcattccatctatttttctttgtttttgttgcatttgcttttgggttcttggtcatgaactctttgcctaagccaatgtctagagtttttccagtgttatcttctagaatttttatgtttcctcctgaaacactcttaatccttgtttggaggaagtttatctgcctctattctaactgcctagcaaaagaaagttaaatattctttggagaaagacataatcaaaagcctctatgattgttcatgcacagtgtctagcaatcaataaagaaatatcaactatttcaggagacagggtcaaatgatgataaaccaaacaaacaaatcatacacaataaaaattatccaggtattggcattattgggcactggctttaattatgattaatatgtaaaaatagatgaaaatgcatagtttcttcagagaactggaatctctaataggggatcaaatggaaattttagaactaaaaatagataccagtaagaaaaattaagaaatgaatagatgggtttatgaacagaagaaagaatttaagaactagaccattgtagaaaatttacaaactgaagctctgaaaaataaagtgctgtgaaaatatagaagagatcttaggaaacatttaagactccatgaaaaatttctattgtaaattagagttctagaagaagacaaacaaattgttggcagaaacaatattcaaagagataatggccgagaatcttgcaaactgacaaaagatatcaaaccacagattctagatattttataaactgcaaacaaggtgaataggaaatatttacaaaacacgaatctggcaactgacttgtatttagaagatatacggaactctcaaaactcaacagtaaaacaaacaaaaatatttcagttagaaataggcaaaggcgtgaacagacattttactacagatgatatacagatggaaaataaatctatgaaacaatgttcaataaaattaatcattagagaagtgcaaatgaaaccacagcaaggtaacactacaaacccatcagaagagctaaaataaaaaataatgacaatactaaatcctggtaaggatacagaaaaatgggatctctcatacattgatggtgggaaagtgaaatggcacagccactcgagaatacttcagcaattttcaataaaactaaacatacacttgccatatgatccagtaattggactcctggtcattaatcctagagaaattaaaatatatgtccacttaaaaaacctgtacatgaatgaatcttcatagcagctttctattttctatatagtagccccaaactggaaatggcaaaagtgtccttcagtgccgattgcttaaactgtgtacatcgacacaatgaaatactactcaacgaagtattaatgcatgcaccaacttggatggatctcaagggcattatgctaagtgaaaaaaaaaaagccaatctcaaaacttacatggtgtaacatttcacatttgcagtattctcaaaatggtaaaattctagagataaagaacaaactagtgatttccagggtttaagaatgaggaagcactacatggttggaggttgagaaaagtatagatgtatgtgtgacatraaggatagcaggtgggacatgttaatagtgatagaacagttcagtatcttgactgtggtggtgattacacaaatgtatatatgtgataaattgcatacaactacacacacacacacacacacacaactgcatgtaaaaactggtgaaatctgatagacatctatgatctctataaataagcaaggtattttgcatatagcaggtgctctgtgagtgatcattgaatgaaggtatagttgagtaaatgtatcaaatttaaatggtttcaagaaatgcttaaattgtctcatgaatcactgacttataatggaattgcaaaagaarcaagggatatttatattttattcttaatcctttgagaaataactgtactaccctacaacatgattattaatgtgcttttcagaagtaaaaaactagactgaacagctcacagatatgattcaataggaaattgtttgtgttcttatttatttcttcttgttcaatcataactgattaaacaaaggaactgtattgactaaaatcaggtgtagagtagtacagatagctggcataacgtgatagaggaagacattcagaattttctaaatagagcctttttgagactcaagatgaaattatctgtttgtgtcagcatgtaaaggccctacattttcagggtctgctgagtggactagcagataagcacactagcctggaagtttgaagactgaatccaatttctgactatcaatggcttaagtcactatgtggaaagaccaaggtaatttgtcatcttgatttgccatcaacaccatttctgccctttcgtatgattttgtgctttcaatgctgtgttaacacaaagaaaaatctttttacaggtggatcaatgagtgggatcctcttgagctctaatattcagtagtttgaacatttttagccatggtaaacaatgcctgaattgaaaacatatctttaaaagcagaacacttaagttagtcgtaaaccagcccttttataccttggataccatactcattgtcattgataccatactcattgtcattggataccttactcattggataccatactcattgtcatcgattcattcaaagaaaaacttggataccatactcattgtcttggtaccatactcattgtcattgattcattggataccatactcattgtcattgattcattcaaagaaaaacttgactgtgttttgtggcaatgccatagatagaataatgaaaacagtctgcccttaaggggtgcacagcatgattgggagacagatatgtcatacagatttgtaatactatgtgatggcaacatacatgaagttaggcagtaacatggaaaggaaagtgcctaattgtgctgaaagcattaacgaagagtttccagaggggctgaagcttgagatgggaattgaaggataagcaggagtttgcttggcagacacaggagagcattccagagtggaagaactggcagatggcagggttcagcacacacttagaagtgggtgtgctttgcatgaccacagcagtgctcttcaaaattactttttctctcgtacctgtgaagagactcaaaatactcagcaaaccacacattcttagagtaacacctaaacatccaataataggtttaatagtagcaaagagagtaattggggcatataattttattttaaactactatcatttaaaaataaatcttaaatttactttcgtaagtgtcttctctgtaccataccaatttgaaaatcaccatcatttatttaaaaaaaatcatggtcatttacttttttttttttaaaggagcatggaaagtttttattgttcttgccaaatcttacagcaatttaatgtatatgagaaaacaaaataccacctcttctattactgttaaacatcagcctaagaagcctgtttttctttttgtaatgtttttcctttactatctgtttctggaaaaagtgctaatatgtttacatttcaaatatttttttttttttcctgctgggagtcaggccagtaagaggaaagcaaaatggcaggagaagcaaatagtgatgtaggcagaatcaatgacactgctaggaataaaaactttatttctcatatgcctactaagtactatcagaagagatgcaataataaaaacactgtctaggttctcaaaagcctaaaatccagtaaaaggaggagaaaagtatataaatgtgtgtatgttaaaaatgtaaaataaactaaaaaaatatatacagaatgtatcttgaaagataaaattgattttgataggtagagatttgaagaagagaattgtgagcacaaggaaagaataggttgtatgaagcatgagaaattattaggtaagagttggaggtctaactgactaaaacattggaatatatacatatatttatatatatggaacaggaaaaagaagatagaaatataggttggaaactcctgcactctcatggtaaacataaattttgattttctcatactcctctgactgactctttcaatcttcttactgagttgttcttctgatgttccctgagttttatccttgacccaacattcaagacattctctatggtcacgtagactaatctcctttatgtgtgatgccatcaacatacatcctgataactctcaaatgtgtttctctagtttgaatgactaaacccgtctcctaagatctacatccatgtttccaactacttaacaggtgtctcatctcaaatacccccaaataccccaaaattaacatgttgcaacttgcttcttctctagatttagtgatactatcatttttctgttatgaaagtgggtaccttattaaacatactctttgtacaatgaaggaaattgatctaatataatgtttattaaagcaattcaataagcataggagaccatcttctaagctttgcaacccccttctcttttcacagggcatgaaaccagcagccacttgacccaagggcagctggtctatgtgctaagcagttgtctgcaaggaaggctggtgcaaaactctgagcaagggggaaaaataatgaccaggccagcgagataatatcaggaaatgaaacttgaaatgtgggaaaggtattgagcaaatgactcagaagtcagagagaagtacattagcagaagtcattagcaaaagtagaaagagacaaagagtgaaaggagagtggttgagttgcataaatagagatgtactggagttgagtaaagcaattcctatggcccactatagatctctaaacctagcaaatgcctgatgttcaatagggactccatagatttgtgtggattttctcacttggaaagagattatgtggcccctagagctttctgacttttcaagcatatgactctgagaaaagaaggaagtatagaaggaatggatactgggtaagacattaaaagtaatcgggtctaaattagtgtaaaaatcaaaaggataaacataacagaaaaatttggagatagactcttcaatacttatgcaatacagataaaggcaaaataaaagatgcctccaagtgactgcacttgaatagtctgagataaagctaaatcttcagtaacattatggaagtttggaggaggagttggttggagatgatgtggatgagtttggttttataaatagcgagtgttcatttttttttgtctctgtaaatttgtgtttctatttcacttctatagaattttatactattgtaacatatacatatattttttcagtctagttggttacctatttctcagctaaaaacttgaatacaacaactcttttgtgatcacgttttgttaaactagactttttattttgagatattatacattcacatgtaattgtaagaaacaatacaaaaacattctgtataacctttacccatttcccctaacggtagcatcttgtaaaacaatagtacaatctcacaaacaggatatcagcattgaaactaacctaagttataaagcgttaaaaatcgcttctcagttgagttatcatttgcaatgattactcttctacaattgatcaaaacaatatttttagatgttggttaatcactagtaaaaacaaatacttgggaaatgtgtattttaaggagataaatgtggctcccccaaccccaaagtagttcttgtgtctgtggatgaatagtaattattgctgtaatgagaaaagatttaacataaattatattgctttgtttctcatttatagctgtaagtgctaagaaactttgttcgaataaataaggagatggggaaaagaggagttctgtttgattgactgagtggatggtggtgccaaggtggaaaatgtaggaaaaggaaaagcaaatggggagccagtttgtttttggatatgttgagctaggggtctctaaaatcaactaagaaggggcttccatggaagagggagggggaataggtatcagggggtgtattggaaaccaaaagacagagagttttgagaaagtcccctggggtccacagctactgcagagagatgaaatcagcacacgggcattttggccaagttagagagaagaatcactgtggcacagaagctacatatttccgagtgttctggcttgcctgccacatttcctaattgttctagagaatgtctgtaccaccacagagcagtgaaagcaccaagtctctcactgagggcagcatgccctcaggtgcatgcgacttgaggaccctgtgggaggaaacttgaacctggatcatgggggtttaaacataagggatcttcagatgagtccagatgaagtgattcttgactgggggaaaagaaaatatttgaatgatggagtgggttatggcttcacatggataggaacaaatgggacctgggcttttgtttcctcatatgtaaaatggggataataagcatgaggaagaatgtccggcatacagcaagagttcaataaatatgagcttttgtascagtagtagaagctccaaatatggtgtatctgtggttgcccttcctggttgtgccttcagcctcayaccacatctccaatatataaaatttttcagtgccctggaaagatcttggctcttttaaaagggaaagaaatgtgtttttaggaatgcatctgcttgcaatggtagaactgcttgtaagaagcagagggagcttccttataaattagagaaggaaagggtaagcaatggtgggtggtctggggaggtgagcggtctgtgaatgttctggagcccagtggactgcggcagagtagctctcacagggttggtacgggtaggaccactccctgggagaaggcaaagcagcagcagtataggtggcagaaactagcttggaggtgagatatcccttacttatgcagaactttcacagggggtcttccaggacagccttcagctttctttcaaccaaacagttagatattgagattaaagtttacgtcagttgtgatacattcatgtgaatgaagcctcaggtgctaagaactatccactgatatagtaagtgggaagtctttggtaacgtcaaccagattgtttctgtggagtctgggtgcagaaaccagagtgggacaggtagaggaacccacagaaggtgaagagggggatgtggatctttcaagaagtttggctgtgaaggcataaagcactagtgtggagaaggtgatgcttagagggtgatgaagaaagttttggattgaaagagacttgagcatggttacagtctacaacctgatggactgtaccttgtcattgacaaggtagtagcttttgttatttttgtttgtttttattgttatggatcttaatatttaatttttaaaaattttaattatgggtacataatagttgtacatatttatggggtacatgtaatgtcttgatgcaggcatacaatgtgtggtgatcagttatttctttgtgttaagaacattgtattcttttagttatttaaaaatatccaataaattattagctataaaaaataaagattcacttctctttctagctccagttattattattattttttaatcgtctccatttctttctctccctttgcctaccagtccacctacaccactttttctttccttgccctgacttgaagtgctccttccttggaccccaagtcacagttttataactttgtctgctcattgtggacagcatgttttgaggagcagagtttcaccagtcactggaagtaattacataggcacatgcagaccagccctcaacctccccgttttatgggcatataatattcagccctaaaaattttacagaactgttttagagtttttcaaccaatatccttttctcaagttgcccaaagctatttatttatttatttatttatttatttatttatttatttatttatttgctggaagtggctttgggaatcattctctttaccatgagccacttgggcattcatgtgttaaagcctggaaaagccagtaggaacttagaaatatagaatcactttggaagcttggctgtttactactaagatttcatcttctaattagcagattctttcttttcttcccccacaccatcccctagaccacacaacaattctcttattgttttggcttgtcttttgtaatcaaggctgaaagatcttctaagaaggcatgtgttctcctgctgccagtccattaaggaacagctgtaccacacatggcccccagttgctaaatcctgggagcccattcatatcgttttccatgtacaagttgatggtattgggacgcattgggttcaagtcttggcatacacattcaggtatgcaagaaatgtaacttactttattcttctgtcattaaactttctttctattttgagcccccatgctgatgagcagtagtaatttactctcagtcaattatgcctgttatgcttggggctgtacctaactgtggagatggcttatatgtgccaagatcacagggaaaatgatccatttttgtccttggtcaccagttgatgctggttacctgagatgaccctggttctcatcacagggacaccctcagggaatttctggcaggctctgttgcccttcctatttagctctggtggtcagtggttcctctctagggctaagccacttaggaatctattaccataatgaggcaagatccctctgctctcagatcatacaaacctattttgggtttttatccctttcccagctcgaaagtcaaggtacaatcaactttattggacccactaccatctattcattcccattatttccctttggtctctttcctcttctttcagcttgggagaatcttttctaagctaatgtggtagtggtcgtgttggtagtatgagagcaagggtccctatcttcaatccattcaccatgcgggctaaaccatggatggaatcgtctcaggacccaggtggcagaggcttagaaaaccccacagccaaaaaaggatttcttgtttccttgcttttcattctgttgtattacttcctaatgaggttaatacatgtagaaaagtctggcattgtgaattgagtggagtaagaagaagagaagcatggaaccagtggggtaaaatgttagtatttccaaattttttccatccttttacactagtactttaaagcttcccctgagtaagtattcctggtcttgttatcagtccgtcgacagccttgcaggatgggcgttggggaagtgagagaaggtgggggagcctgaaagtgcctcagagtggagactgaagtgtcctggtatagttgaaaatatatgtgtgcatttcttttttcttcctgtttcaatgtgtcaggcaagagcaggaacaccaaagaagggattcaactgtaagggatggaatctcgtccctacccccccactccccattctactatcatattttatctgtcatctgtgtttcagttttgtcctccaatataaggaatgataaaaattaatggttttgagtataaaaaatgataatcatattccccataactagagagttggaagggaacgattattggcactatagaacaaagacatcttgtgtaaatctgatctaacaataatttgaggtctatgaagaattatgccaacagccccaattcagtaagttttcctttcctcttgcaattagcagcctaatttcagactgctaggaataagttttgaaccctaatgtgttgtctatgaagagaatgggcacttgtctgtttgcagccctgtccaagtcttgcttgtcttctggatgcctgcggttgtcaggatcagaaaaacatgaagacaaagcatgagcgacttagaggaaaatcagagctccttgatgaggttgttctcctactgtgcctggcaatgcctggtttcactctgggaggtctgtccaatttatggtcaggccccaccttccttttttttttttgtaatgaatgaaggttaggtgggagccaatgaaggttacaggcaaatgaacgtgtactgccagactgcacrtagaataataatattgacaagtggtctaatatatattttgagtttctttgttctgggaaataagctaaatgcttatttatttgccttactactttaatcttcatgacaatcctttgaggtaggaactcttgttattaccattaaacagatcagtaaacagccttgagagcttctaaggagtgtttccccatatcaggatcaatacttttacagtgccagccaaagaaggagccctggcctctccaaaggctaccttgtgagagagaagcttctgcccattggtgcaggtacccatgtgtaaccatgcggagtctgacctatgtaactggaagaaagtgtgtgtgcagattctagcttcagaagataatgctggttcatttgaatattaatataaaatggtaatgacaagtagcatttcttattattgtttcattattcctacgatgttgtccctgagaaagattgcagctttctctgaaagcaggggaatgcacagtccctccggccccctcctccccaccaggggaagacttaaatgctgatgatggcaggaagggattgccactctaaccactcagtttttatttattatttattatcacatcttgttccttttaatgaaaagaaatgcttgcattcctcttattaaattttgggcaacacatctttatgcctcactccagctttggcatgagtacatgtgtatttgtaacttttattaaaacatgaaagaacttttctaaactaaatcaccaaataaatttaatgtctttcctcacccctacatcgatgtgagtgtgtgtgtgtctcagtgagtaatgaaaacccactccttaataatgtgagtatgtgtgtctgtgagtgattaaaactcatttccctaataacatcacaagtttgttttggttggaataaagggtgagtgggaagaacagtgtgagacccctctgtgtgtctgtgagagtggatgaagggtgcaaactggttgtattagtccgttctcacgctgctttgaagaaatacctgaggctgggtaatttattaagggagggtgtttaattgactaacagttcagtacggtttgggggtcctcaggaaacttacaattatggtggaagatacctcttcacagtggggcaggaaagaaaatgagtgccagtatgggaaatgccagacacttataaaactatgagatctcttgagacttaactcattgtcacgagaacagcataagggaaactgcccccatgattcaattacctccacctggtcccactcttgacatgtggggattatgggattatggggtttacaattcaaaatgagatttggggtggggacacagccaaactatatcaccattggagagggagtgtggattaaaggttggcgaatctgggtcacttggaaatctgcagcaggtctgagagtaggatggctggcttcttactgccagctttcccctttccctcatgctgctgagagatgggagtcttgaaacacaaactgcaaggcagaggcagtgacagtccaggacaatacagattccttcacatgtgttcatgactatccctcaaagcctgcctgcatgttagctctgagggtctgggaatacagatgggaagaaatcttagtgataagccaatctaccccctcattttacagatgaagagattaggggaaaggttgaacagccaaggccatggagcaagtgaggatcagctaatgctccacactccaagttcttctagttctagtccagagggataattttataattttgtgttctagcagacatagaattaccataagaggtctaggaccttgggatttttgttctcaacatgtgttggtgtgcacaacactcatcctgaaattagagcaatattttgttctatattttctatatttctatattttgtgcaatctcctagttaacacacatgtagttactgaacccattgcagtgccttctcatataaatgagtttttagcataagtacatctcttcgcaattgaaaatatagcttgcaaatgtgtgttaaaattatgtttttagtgaaaatgtaagtgttgtttggttaaaactttattcttctgtgttgggaatgtgcaccaagagtgttacactggagaaccctggccaattgtcctgggtatggaggggatttgctgggagtgttgagggcttgcatttttgtgcttcttcttctagttataaataagctggtttattgaaagatggctgttgcaaaatatttttagatttggaaacatctcatttggggttgaggtagagacttctgctggttgatgagaagcccaatattatgatgaccacccccatattctcaagtgttttcagtccacactcctggtcatccctcctttcttggcatatgttgattttgccatcctttcttccaagaaccatctttcttttcatctatattttctttatctataattgaaggagatcacaaaaggacctgggcctgtctggccataggatgtggggatatttgatgtttgctcagagctgaaatgtatgagtagaaggtaactattgattggaactttttttttttcatctttggtagtgtttgttggattgtgctctgagacatctggtactccagagatatcaaaagatattctaccccggacaggttctgtgttcaaataagtttgtaaagcaaagggtaaaactcaattgatgaaggacttttcggggcctttaatacaacaactcactctcatatacattatggattttcaggagggtagtatggtgtgctgcattttcctcaagcatatttaaccacagatgccacttgttttttaaaagtattacccaggttcagattttatgaacacaatttgggaaaaaaactaatcaatttagatacttaaactttataggtgaattgtgtagcctttccaaatcctatttctgaagattagttttatttaagccaaaacttacttagaagtggtgggaaagaaaggaaagagtagacagaaaagggattaaacatatgtacagagtagaagtgtggtggaggaaaaaggatgaaaaaggtgaaggcacctggaaagaacagaaagctgttctcttagaattatatccactgatgtgaaggttgatactgccgttagaggactggaggcataattgtacatgaatgttggtgatgattattgctgccattggatatgtaaacatgaagtgtgggcctcttggaaagtggaaatactgtgtttctccaggtttattcaaataacaggcactcttgaaacacctgttttcaagttagcttaacgttatgttgacatcatgatgcacaaatgaaataaatattcagaaaataaccttataacaaaagagaaataaaaaaggataagtttagagaataacaattttaccataagtagtagaaataataaacacgggaggtgaggtctagtttcacctgggatgtgaaaggagacactgcatcttagatgagtctgggcatggcttgggtaatgtcagtatgttcgagtaaactgggagactggaacttggacttagaaactgtcctgtgtagtacagtagtcacaagaaagtcaactgagctgcctattagataggccagtgggtgtagcgccagataccctgtgattgtctcctgcccataaggctgtgtatgtggttgtctaagggatgttgaatggaggcaggaataggatatagtccttggaatataatctggcaagagaaaggcagagctattctcctggaggacctgctatactcagaagactattgatatagggagggctcaggtgcaagaagtgaagcaagtcctgggaactgggatcagacctgtgaaagaagggcagggccagctgggcagcacagccaggggtgaccttggaccccagagggttgatccagggatgttgacattctctgtcttgtctttcagagataagactgggcctggccctgacaattttggggtgtaaacaaggaaagctaggtggttcaaccatgggagaggaggaaagcaggaattaggattccaacaagctacacagatagaagttgggtcacttagagatccttagccttccttttgtaaggttccaatgataccactaagtctctcatctaagcctgattggatgcaatgaactcttctctgaaacacctccctttgtgttctcatggagatttaggggcagtgagggtggggcatattctcatggtgattgtgacattctcaattttgtggtagttcagttgaacctatcttttgtctgactagttgttgagagtagggattattaaatcaraagcagtctacacagctgtcatttcctttaatgtgccaaacactgaaaaacaaacaaacaaattttagtgttatcatccccactttacagacaacaaaactgagttccaggaggtaagacggctgttcaagtcctcaaagctgggatgtggaggggcaggagttagatcagatttccttgactccaaatcccatgggcttttgcctagaccagtgattctcaacctaggaagtttttaaaaatgtcgttttgtgaacctcatcctcaaaggtttggattcaattcatctggggtagtatttgaacccctgtatgtcttcttttaactctcccaggtgattttaatatgcatacagggctgagaattctggctctctattatgtcaacattgctatcctgggcctctagtataacactcacccatgtagaggataaagaaatgtgtattaatttgtttagagggtttctgtggcaagaaagaaaagcaatgactgtatgttaccagaagttataaagtgactccttagaggctgaaatggaatatttgatgtttatcagaaaacataattaaggattggagagctattcattcygtgctctgaaaggcttttcaaaactttcattgcaggtggcattgtcctcagcccagcatattatgggatgcctggccacaccgacaccatgatccatgaagtgggacatgttctgggactctaccatgtctttaaaggagtcagtgaaagagaatcctgcaatgacccctgcaaggagacagtgccatccatggaaacgggagacctctgtgccgacaccgccccyactcccaagagtgagctgtgccgggaaccagagcccactagtgacacctgtggcttcactcgcttcccaggggctccgttcaccaactacatgagctacacgggtatcaccactgtcttgttttgttttctgttaagaatacatgggggcctttgagagctgggagggtggaggtgtgggagctgatgggagaatgattaagtggtcatttgtgtcggagagttgaagtgtatttattataaggtattattattttttcatgtctttgaagaacttgaagaaatactgacatattaaggtactttgttcactgaattctcctctacyagatattttaaaatatacttctatcctcgatagtaaaaaaggcacagagccaaaagccctcttgtgatccccttgacttctagaatgtggttattcttatttttgcccgcattcttagacatttactctgaagaagagtccaatggaaataaaggaaaagagtttatgggtcaaggtggcccattgtactgtttttgaagttggtcaacaaggtggcttggttaatttaggctcagcatgttttactgtatgttactaaaaaaaaaaaaaaaaaaaatcagattctctttttccagcactagtcaagcacaaattcttagctgcctaccaccctttccccaccaaaaggtgacatctaattttaaaaaaatggcatcttcctggccctcggaaaaacttgtcatctggtctttcttgccttaattcagcttctgtattattcttcgctgtctctcaygccttccttgtttcttgtgaaaagtaatagtgactggtttcctataatggactcaaagttatccctaaaattaaagacttatttgatgacctagtacaatggtgaaagaagatattttttctataagttttgggggcttgtttggtgacaggttcttctagaactatccaaaaaagaataaaccaccacaccctggtcatgactttgaagggaggaaagcgtgatgagccgattctgtctgtcatctttcaagatgtgtctatctgagtttcattgcggtgaataattcaggtgcatcagatgtgtaagcaccagcacctctcccccatcaaggggcagaaacaccagacgatgccatgcagagggcagagctctggaggcagcacctttgaagcgggaagaggaaacatttaggaagctgagtgaggcagtatttgactggtgtgctttcactagaaaagttcctggcactaagaaaactccctttccaaccctatgcaaaatgtacctgctaaagagaccttgccagattcaaaagtgaggctgagaccaccattcccagccctgctgtctcattggcatttggctctctttccccttgagcagctccactgaatactcactaacctctgccaacgtcactgggcaataaagcaggtgtctgaaactccacaaacgttcacaagtgaaaaggccatctgttgaaacactgccatcttgtggtttgctgaataagcaaccatcagctcagagcaacctgagctgcccaactttaaggtcatgaccttgctttagatatgaaagtgctgcatctctggtctctgtcttctcttaccctttccagcttagaccctttctggaacagattgcatttgttcattcattcaacaagtaagtgctcattgagcctaataagttaactcagccatgaacaagacacaaatttatccctgccttggtggacttgatgggttaaaatctycatctcttgtgccaccttttttgtctccacagatgataactgcactgacaacttcactcctaaccaagtggcccgaatgcattgctatttggacctagtctatcagcagtggactgaaagcagaaagcccacccccatccccattccacctatggtcatcggacagaccaacaagtccctcactatccactggctgcctcctattagtggagttgtatatgacaggtgagagaggcactggctgtgggtgagctggcttatttctctgtggcatttcatatgaatgaggggaagaatatgaatccaggggaactccaatttggaagtataaatgtgtgcaccactgctcagagctgctgctccagcctgctctgttctcgttgctttagcagaactcatgggctctcttgtgagccagtggctcatcttaagtgctcactcccccctcagggaggcctggagagcctgaccgatgtgacagggataaattggcagaacggagagggcatctgccatttgtctctgtcagctgttcctctgtggcatgagggtggagtggcagcttgccacttgcagagtggtgttgggggagggattacagcatgcttctccaggcacttctgggtgtgggtggatggtagtgtgcccactgccacaagctgtgcatcagagggcttccctgacttacgtaggtgcttctgacaccttctcagcctcctgtgcctccccctcttaaggccactatcttatggaattgtcatcctctgcttattttcctacctgccccacttgactggcaactactgggggaggcaggatgattttttgtctctttgtctcttgccctgccacaacagacacctaatgtgtgtttgctgaagaaaagcattacacctaaaactaactttcatttgtcctttgcatattggtttgaaagaataacagataaatttttgtagaaaggagagaaaggtaggaaaatgaatgacatctgataattggtgagggatgggagaatgtggtttcactgagaaggaccagaaccccttctgtgacctgtgcagactgacctctttcaaaacctactgctgtattctgaatgacgacagtccctgatctatttgtggcactatatgtgaagtgttgtgctaggtattttacttgcacttgtcttatttagtctttgcagtaaacgcagttcctgctaaataagtgagaattctgaggcatagagaaacatacaatggcaaacccaagaccccacaactgattggaggtgaactcgggagtccagtggaaattcgggaataaggaacatagaatggatgctttcttttaatttagagcattcttatttagcacatctcttctttgcaccacactttccctctgggtgtcaggcctcagctaaagagaagggtgtcgctggagcaagtttccgtgcccttcagctttgctgaaagcctagggagagaggcaagagagagacagggataggaggaagctggtgaatcctctttcacagtggtatttcagcctcttgggattttgatacctgtccctgataccttgatacatacttagtgtgtgacaccacttagacctcacaaccctacaaagtagtttcatggtcatcagcgcccaaacccttttgggctctgtttgtgagtcagcacacatctgtgtgatgtgtgtgagaatcatcttcctgcaagtgtgaccttgtgcagctttggtcgaactgcctgaacagcaagtcctctgtgggtgtgtgcaaaccagagttttacatccgtttatgtaacacatgtaaacaatttaatctttgaattctctctctggtacaaacgttacgataaagcagacatcagtacgggcgtgctgagagtctgttggcagaaaaacctgcagtttgcttccttttctcagctaggtggactgcagttttgagacctcccaacatgtgtgtcagggggactcacgtcacatggccagcaatttgtgtcatgcttggagttgtgtttactccaccccagcaggtatttggaacccttatgtcagagaagagccccagctacgcacttagcagcagccacggaagggccaagtgcatcagaggaatgagctttggagttttgttcatgttagaagtgagtgctgattggagtcagaggttggatcttaactacaccttttagtttccaaagtactggacgctcaatggtgtttgggaacttgctcaaaggaattaaggaacttgttgtgaccttaggcaatttacttaacctctctgagcctgagttttctcatttgtaaacataaggttattacaggaattagaaatcatttatgaaaagcacgacacagcggcacaatgccagttatgtgaggtacttcagaaatgggagcagctgtcataatcactacctttattttataatactatttttctggcatattacaagatgttattgagaccctgacttgatgcctccgttttcagatgcgtcattcacaagtgggcttctaaaaagattctaagcatcagaggcaagccccttgaagtgacttaccattattatgtagctattattgtgtctacctcttccagttacctcagttatagtacttgtagaactttcataaactgtattaatcacgtcatggatatccataaaacaagcattcacagagggactgctgggtccaatcctgttggaaatataaatcagaatagagcttggtctggactggctcacaggcaaaagagaggaaagaatgtgaatggaaattctcaacaccgcatagcagagccctaagagaggatccagcaggtgcagtgggtgcacagagaagggagtactggtcactcagaggagagaggctaagtgctactgcagagtttacatttgaatggttcttgatgggtaagtaggagtttgctaaacagagaagcttggaaaggctgtttggcagcagagagaacagctcaaaggcatgatgtatttgtggaatggtgatctgttcattgcgctggaaatataaatctcagaaaggaactgcagtaggtgaggctggagctagcttgtgaagggccttgagacgtgataaataatttggatatatctccaagggcaatggtgagccaagagacattacatttcacctgacttttattttatgtaagtgatttaaagtagggagcttaaaacataaggacacatatggctaataagtttatgtgggaaattattgcctgttttagtggggaaattcaaggagcctttgaatgacttgagagtcaatgtagaagggagttttatgttgaaagattcagattttaattgtttgttgtttactgttcctaggacagaaaatgcccactttcatctccacaggcctcttttatgacttagttaattttttctgcttcatgatcttgaaattttcatgtcactgaattttgcaaagatgaggtccacacaagaaaaaacgattgagatacagttgttcttagttactctctaggtccttactaaccatcaacccctgccctccccacacaaaggtctttctaattttcttatcccaactcatctgatggactctcctmatctcccatctccatccctttatctccccagggcctcaggcagcttgtgtggcgcttgcactgaagatgggacctttcgtcagtatgtgcacacagcttcctcccggcgggtgtgtgactcctcaggttattggaccccagaggaggctgtgggtaaagtaccatgacattttttctttataccctggtgaccactgaggatgggggtggaggtaaagagtggagtagtgacatggtgacaaaaaggcaatgtatgtgtatgtgtgtgtgtgtgtgtgtgttttgctggatatcttttggagctgcctggtgccgctgtgtgcagaatgttccatatgtgcctaacatggaggccccatggctgtggtaaagcagagaccagcatataggacagaaggatggagaagtcagctgaactcagggtgtgacttcagggtgagatagctgggaggtgtagtgttacgtgtgcctactggtccttggagtagccgtgccatgtgacagtgtaagctgacctcttactcctctgcatcaggaaacacaccgcagagaacactcatgcaatggctgagcaagtctgggtgggggtggggggaccgcagagaaaactcatgtactggctgagcaagtctgggtgggggtggggagaccaggtgttccacactgactgttctygtctatgctattttatgagtctattaatcactggtactggttgtgctttggatatgatctgagctaggctccaggaaggggaaaatattttttgttatctttttttctgtacctcccctaacttttcaaacagtcacacattcactcacatatgtatattaatgcgcctaagacaaattaaagcatgaatctttttccagttcaagtcagaaaatactgttgacaggattttagcacctcctgatgaatggcttgacttcttccatcatcatcatctttaatgtttacctaattatcatcttttttctttgcctttaaaatatttattaagacactagaaacaattaaataagatgtgttggccaaagccctatttgaattaatctgcagtcttgattgtgacacgaaaaaaaaggagaatattggtctgagagtctgcagtatctgcaagatatcatcctgggctcccagtcactcaagtgacagggcttcagggataaatctggaaggagacaatttacttgattgattgtatatgacttttttcaagtgagaattttcagggaagaatggaaagtgagtataaaatttactgcattggactctaaacagagatttgcatttcataaagggccattttgtgtgtgtgtggcagtctgtcctgtgctggtgttttaatgcctgtttgattccctgacctggtatttttttcctttttatttctagggggaaaaatcagttatctgagagaggtaaaaggaattagaagttctacgttctaattcttgtattgtgtcttaaggcaaaccaaatcaacttttagggcttccatttcatgctttaacatgaagtcataataaaaactttttgactggcagtgctgatgttaggttgatttccaaggacctttatgctgctagtattgggggcttaataataattatcagacaaaatgagaagtttttgggactgttaacattggacttcacaagcattaatttataaatcattaatgaactaagtatatatgattaataagaaatactagtctttgctttgaaaaggtgaagaaccaggtcatatttaaaatatacactataagagtaatctctaacagagcaggcacaaacacatgtatttataaataggtctaatgaacactgcttaaccaccaactattttctaaatgctatggggattagaaaactaaaacagacatattccctgcttaaacatcatcttcatggtgagaattttctggcttcataacctaaaatagctcccagcctcacctcataatcctgtattcccttatgttcctccacttgtcttcacagatatcattactacttaatattatactttatattcttttatgtatttattgttacatctatcactttactgtaacatatagaaaggcaagactttgtctctcttgttcactcctctatctctaatacctagattagttcttggtgtaaaagaactacactaccaatttttgttgaattaatgaatcaactcataataaatgaatcaacacacaatataggcaaaaaacaataaaaaccataagatgtaacacaccacacacacacagttgcacacacatatttttgaaattaataatatgtgtttctatttcctgcctgcagtttttccctgcagctacctccctactcacacatacctgcactgaaagggaaattgcaatgtttgaactggttttctctgggctttgggacataatttattttccaaattttgaagggctaaatacttctactttggtaaatgtaggtatttaatttctctagaacattgtatagatctacactgccctagtaaggcggggctaaacattatcacttattttgtaaaagaggaaactgaggcatagaaagatgtgccacagccactcagctaaggacacaggagggctgactctgctagttctcgattcaacactctctcttcaactcccatcacacgacagaaaagaaaaccatttgggtagattacttccatggagctgactttcatagattcgtgatatttgattttttatcattacatttttatttggctactgaatcttcattttttttcccactccataatatgtgtttatatttcctgcctgcagttacctacctgcttacacatacctgaactgaaagggaaatttcaatgtatggttttaaagttcgtctaaccatcagttgaaaggattgccagggtgggatcttagggaatgaaagaagttttgkgaaaagccctacaaagattgcagtgacagagtgaaatcactggtcttcagaagcattaatttatcataagttatgaatggactaatcacatgtaattctctgctcaaggattgtttaaggacatgacttctctgcatcagcctcatgtttccacctaggatctgggttgctcccttcccaattcctggtgggtttcctcttgctaagggcaccatgtacagggatggggtaacaagagtgtaatgctttttacttttacacctttgttcttactagtacttaagatctaacctgctaagatgaccaacttctacaggaattctaaaagttctctccatagttcctctttctggctgctaagggctactcattttctgacttttaatggctgctactgatgtatctttctgctaatctccccccagggcctcctgatgtggatcagccctgcgagccaagcttacaggcctggagccctgaggtccacctgtaccacatgaacatgacggtcccctgccccacagaaggctgtagcttggagctgctcttccaacacccggtccaagccgacaccctcaccctgtgggtcacttccttcttcatggagtcctcgcaggtcctctttgacacagagatcttgctggaaaacaaggagtcagtgcacctgggccccttagacactttctgtgacatcccactcaccatcaaactgcacgtggatgggaaggtgtcgggggtgaaagtctacacctttgatgagaggatagagattgatgcagcactcctgacttctcagccccacagtcccttgtgctctggctgcaggcctgtgaggtaccaggttctccgcgatcccccatttgccagtggtttgcccgtggtggtgacacattctcacaggaagttcacggacgtgtgagtttggtagcatgactatggggcttcctgaggctctgggggtgggttttgttacttttcccccactttttaatattcagccatgcccttagtcrgaggaatgtttagactttcagaggggattttaccgtaaagtggcatatctgaggtaaagaaaagcacttcccagaaaggggcaagcaggtgtctgattgctgatgccatcatcatgattatggacaaaaggttagtgtatgagatgtttcagttgaactgaacataattgctacaaataagttgatcagaatcagatactcctgtctggtgacaatttaatttctgattctttgctttagctgtctgatcatctgccacagaccccataacatttataaggtatagtcaattcttctattgctatgcaaggaggccgagggcctggcagaccagacgatacactcagttccatgactcattcatgatatgagtttcattctttccccttctctcattttcccccctcacaccccaataaccaactctcttttatctttctcttccagctctcctcttcctgttagttctgtcttttcttcctacatttagtgagttctactatgttcctggcactgcatgttcagtgctgggggcacagactaagatgaggtccttacttacaaagaattcaatatctggagcaggaggctggtactccaaaggcaaattctcttgacctcataaccttctttggagactgccctgagggcagaactagggcaaaacaaagttttatcagagatactgtcagttagtttttgctgcattagaaatcatcacaaaaggtagtgggttaaaacaacaaacattatttctcatgattctataggtaggttgggtgctctcatctagacttacttggctagcaccagatggcccgggatgacttcccacacagctgagacagctggcatggctggggagatgagggcctctttcctcatggtctctcaaggcctggcctgggcttttcatggtagtggaagggtttccagcagcagagagggcaagccccaaatgcttacacttttcaaatctttgctttatgttattcatgataatgttccactagccaaagcaagtcacacagcaattttagactcaatgggtggcgaaataaaccctcccttttgatgaaagaggcagcaaagtcacatgatagaggggaacattggggacagggtagtcatttggcagtctaccatagctacagaaaaagtagagaaaaatgtccaccttgagcttcattacatttttcttcccatatttgctctgtcaattagaactagaagatagtgaaatgaccaaaaagctaatgcaaatgcaaaggtagctttaaaaagaaaaaagatgtcattttgaacttcttaaataaggcagttaagatgacatttgttatctaatttgctacacacacacacatacacacacacacacacacacacacacacacacatgtttaaggccaataatatctcattttgtagatgaaaaatctgaggcttaactttgatttggttcaatagctagtaaatagcaaaatcggaattaaaatccaatttttcaactggatctcattttggtcctcttgcttcagttaacactctgccttttacaaactcagatcctggagggcttgggctacctgccgctgagtttttcctcaagaaaagtaaacacatgctgatgtttccatccagtcctttccccagccacagaaaagtgtgaagcttttatgcatggctggacaagcagtctgacagaaaccgccttgtaaagggaaactgtcagcattgattaggatataaaattggttttactttagaaatatctggcattctcatgagaggtttgcttctctgggggatgtgggggtaactaatttggaaatttaaaagactttaatatctaggtttcttttctattaaaatacttaaaagccagcacagaggtttttaaagatgtttttgaaaccctgagacatttcctggttgctggttgctgcatcagctgagggagtggaggctttgtgggtgagttgaaaagtctgttaaagaagagagaaccatggcagaatactgatggcagccactcacagtagtcccagcaaccctttgagatcctgtttcactaagtaactcccatcctagcttgactttggtggtagttttccaattagggcaggcactgggcaaaattaagatgaaggcagattttgtctttgggaccagaagctctccttcttgagcccttttcctcttctcagtgtcttgcctttcaccctcaccacacaatcagtgcacccaggatctagagagagtctgacaagctcctttcatctctagggtcaactgatacaactccattcctgatacctacacactttaatagatttggaggtggggagttgtttaatgcatttctaattgtggaacttcttgcttcccccaaattgtgacaaaagttgttcctacctgctgttatgagacagttgatcttactcctaaggattcagtcttctcaagacaggaattctcttgagagaaaactatgatcgcagacccaagaagggggacttcctgagcccaaactctgaagctttcatctccagtttctttgattactttgatgatacagaagactggcttttaaatagttttgttttgttttaacatggtaaaaatgcacttgaaataccatcttcctagattaactgggactgttaggttcagtgttaacgcagcaagcatttactgcgcatttactctgtgcaacgcacaggggatacagaaataaatatggtttcaaaccttctggtgctcgggaagactgtgccctgatctttgttttagacaatgcagcrtatgtttaacctttatgtttcccataatatttcccttcaacttctgtgaaccatcaacaaaggacccagggcatgcctcactttgtggctgtrgtggtcacaaaccctttggtttccacagggaggtcacacctggacagatgtatcagtaccaagttctagctgaagctggaggagaactgggagaagcttcgcctcctctgaaccacattcatggagctccttattgtggagatgggaaggtgtcagagtgagtattttgtgtgtgtgtgtgtgtgtgtgtgtgtgtgwgwgagagagagagagagagagagagagggagggagagagagcagggacactgttctctaaacagaagtttcaggagtttgacttgttttggaaatgtagggagcaaggcaccatttgattctagtgttgaaattctaaaatctgggacttggttgtgtcaggtcttgagatctggcatctctacatagttatggaggaacccacttttacttatagctaaccccagagtattgaggtattgaggccgattatctgggggccccttttatggcctcagcaagcaactgctggacagtgattcagggaaggaatttatgcagaagaaggttactcatcaaatgatgctgaaagaggatctcttttgaacaaatgrcctattctgctaacgaggtgtgtgatctgaggaaattcagtatagctttcggatcttcagtttctcatgcaacccttagtagaactgataacaatataatttccagctattctgtaggcatcaccaaggtagaaatggaatcaccctttctgtttcttaacatactatgttacttttcttgttgcccttttgtgatattagcatagaggactaattaattcattctggtttgcctgggacttccccggttttagcactaaaaataccaagtcccaggaaatcctggacagttgatcaccctacatcaacctaactttaatgctcatctatttgttacttatataaagctgctgggatgaggmggctggaagccagacactgtgatttgtcttagattttgcatcctaataagatgggttatttttattttcccagaccaggtgaaaatatatcgtatattgaagccctaatgggaatcaattctgtaggcttgcttgggattccatcccatcatttagcagtcactcaacattgtttatctcctcaatcttctaagatcctgaaactatagtaagtctattccttgtcatagaagtataaacactaaaatgttcccagccctcgataatatgtggaagccattgaggtcacctcaaccttgctcacgtgctgtcccttgctacctaactcagcctgcmaccttccctccttcacttcaaatcagatttctcccttggatgcttcacattgcagaggacaagtccacttgacactgttgttgttttctctgttttggttgcttcattttaaacctgaagccctccagttaatgtgctgggggggtgggtgaccactactacactggcaggaccctccttgaacaaaacactctgccctctgtcctagtgtcttccaaggcagctgtctgatggtggccaccctgcagccccagggtgccatttctgcctggaggatgtggggcttgaaaggggtggagggctctttccctaccctgattttgcacattctctcacgagccttaaagcagcttcatctaaggcagcactgcttggctactgggtctcgcaaggttacttatcaaaatgytccttgaaacttctgcctatgttttcttctctgtgtaactagcacttccatccaatgggaaggtatgcaactccaaatctggcttagccaaatgcaccacattacaygtaaaacaagaagaatccataccaatcatttgatcacttggataacacttgtcaataggactaccaaaacaagcacgatgcagggccctgaaattataaacagtattcatatagaagttaatcatttcaatctgtgctgttcaatataggagccaccaaccataggtggctctttttgcctttaaaatataccaaatgcaactaaaaaactgaatacttaattttatttaattttaagtaatttatatttagtttaaaaaccaaaactcagtttggttattggaaaatcttcaagtatatttggaacaacttgggcaggtaaatctaatgttccaactataaattttataaagtctaaatacagatcaaatagttgaattcagatgtgctgtaagtgaaaaatacacactagatttcaaagacttagtatacaaaaataatgtaacatgcctcattttatactgactgcagattgaaataatattttgaatattttgggttaggtaaaatatattattaaaactaattttaccagtttctttttactttttaaatgactactagaaaaattaaaaatgtggytttcattacagttctgttgggccgcatggcacaagatgatacatagcatgcttatattgattgtttagattatcttcaaaatgaaaatataaagttgccgacctccaagattattcctggaccccttgtagcaaaacatagatgaaggttaatcctctctccataaataagcacattaaggcataaagtatttggagacttcttggatatagcacacatttaattaggtccccagtacagtctcttttcattgaaccacattgcatttatatagaaaaatgatttgtagtttccttaatttcttcaattatgttgtttttatatcacttttagccttctccacttccagcttgccatttaaaatatgattactatatcactgtattcatagcatacatttaattcattttaaaccattctcatttctaattatttaatctttcattcatcctagtgaggcatactttaaacaatagattagagctatttatgatgttctgggtctgaaaacactttaacattccaaatcctttatctactgagtwaaaatatatgtccattttgagcatgaaaaaagtcaaggagaaaaaaatggtagtcctcatccattttgcaatagccaaatattggttctttcataggagcatcaacccaaacttattttgtttccatgaattactttatgtccgtttcactataaactaactcccccacctcaattcaaattttgttgtctgttgcattagcatttgaggttggaaacaaaaacatttttcttctctcagcatttgtttcttccctgcaatatatgttagctgtaaccaggtggtagtagggagtaaagacagggacctgagccctaaggattccctagacaggctgcttaagtctctgggtatatgaacaggagattgaattctacaaaatcctaatttttataacaactgcacctttatgtaacaaaacaatgaaaacataaagaaataccagataaaaatgaatagatgaaaccacacagacaggcaggctttcttcttaccatcatcagctattttaagcctttattcattatagggctggcagggtttttctaagcttaagaccctctcccagaaacatcatcaggaccctcatggatctcctagatgtttctgagccatgagctacttaacttcaggaattcccacaacycactggacatgccaaccaccaatcattgcttaaattgtatctactttatatatccatatgtttgtttctattttctgtaaaagcattcttctagctcctacttttttccaacttgcactttttaatatatactgagaaattgtaagaattttaaatgatggtagctaaacaagaaaatttgtgtgtatgtgttatatatgcatatatattttaccctctaggagactgggagaagagtgtgatgatggagaccttgtgagcggagatggctgctccaaggtgtgtgagctggaggaaggtttcaactgtgtaggtaagttcaagagtttcagtctaagattgtgtcctacttttagaggtgtattattttgtgagttcttgatatcctgtaacatctagcttagtgattataataataacctctgatgtgtcccttgtatgccaggcatgaattgtttcacaggtattatctcagtcaatccttagaataactggggaagacaaagtgaggcacagagcttaaataacttgatttcatttatgcagctagaagtggtaaagtcagcatttgaactaaggaagtacagctctagaatctgcgtggtaaaccattaggttatactgcttcctagcttaatgttaccagggatttatcttggaccctccagggtaacgccaatatgtcaggtaagtagcacaatcaaatggactctacatacaaattagggtaaggaaacattctaagccaaagtgaatgcaagacatattttggtgactgtgtgtaatagattcaatcatgaagaataaaagaggatcctaacatattttagccttggagaatcactggtaaaaattttaactttgactctagagtataaggtgcttttaactctagactcttgccactccagggaggcagtctacaacacttttccaattctgattaaagctaccatcaacaggtttcttagatgcagattattttccattgtcatctgcatagattgcaatgatttggtagagsataaccacacattgaagtttttaaaatagcagtgcatttaaaaatattttaatgtcatgaaatcttaagataaagtcgaatgtgattacaattatgtataatttattaaggtgttaagtattatacagaatatacaaatgtccctgctctccagagccagacctgaatcatagaatgttggtggtcctctctccataaattcatccatccatccatttgaaaaaggcccatcgtgtgctatatgttcagtggtaccatgtattctgtgcttgttgtgtaccatgagtctgacagagtccctgatcctttcatgagtacaagtttagcagtgacttagagtacagcttctctgtcttacagaaatgcctcctaccaaagcatgacagatgagtttctagcttttgcttacctaaatctagccatgaagaatgaaccttgaaacagaccattctgtttacaaatggccttatctgttgtaaaatttttccccttttttccagttcgaaaactgaggctcagaacrttttaatgactcatccaaggacatacaatgaaatctttgcagagccagccctagaactcagctttcctcatgcttaatcaagtgcgttttccctgctatgaaactacagaggatatatatttttttctgttttatttgactaccattcagatatttgaaatacctctccattattctcctttccaatccaaacatcccctcatgtgattaggtttccagaccctttcttatttaccccaaactgtcatgcttcatgtggtcagtgcccagaagggaatccaatactccagatgtggtctggctatgccgaatacatcgaaccgattacctccctcttctgtacacaagtatttgttaacacaacctctgttagcattatttctttttggtagccacatagtggtcgcatattaaatgcaatatatattctccaaacactgaactttcctcagtgtagctcaagtcttatttaacctaagagcagaccttaatttgtgtctatcacatttgatctcataaaatttggctatttccttcaaccccagtaagactatatttaaattgttttaactatacagggtaaggttaaaatgatatattccaacagtagacattttttcagtgaatcataagttcatcatatgctaagcacatattccattatttctcaaaatatcaggtttgaaggaaccccattgtaaaatatatttttaaagtattccgatgaatttgaaagaaacataaacaaaaattttaagtccgtgcttaaaaaaatagagacaagaagtaagaagagtagttactgggttataagaagaaaaacaaaacaaaactatacgyacatgtagagagagagagagagagagagagagagaatcatcatgggaaagtcattccaaaagcacatacattggctttggagagtgctttgagtaggtttggtgaaatgcatgagttgaaagcccaaaatagactttcaaccaagtcctgtggacagtggcttatatctggcaagtagagatagatttaccacagaagggtcttagaggaaattgttaagagaataattaataactatatattgatggacagctggcaaattactggaatagccctgtggtattgctgtgaagaattgaacatgaaraaaaggaaatagtaacagtaaattttagtaatgctcttattgaatatatacctaggtgttgttattttgaatcttaatcttattttcatgtcctatttttaaatagaaaatggaaatttgaattgtgccattaatattaattgtctcatattttggtaaaaaatgcaacagaacttaaatggctttgtaggtgtttctcagctatctacatttgaaggcagtgtgtctatgtatctataaagagtcagtgctattcacttactaggagttatcgtatgagcaagaatggaacttgtccagtgcatactagctggctttacaacgccagtatattttcttagatattcatttatcacctgtttgcttttgaagacagcccctctgtcttagtttgaggcagtgttcagtgagctgctgaacctgcattctggctcttggatttaagcctgactcaaattaatgctctattgcttacctttcgagggtcctctacaaagtcacataaaatcactgagactcaggcttcctatcataaaagaaacaaaatacacacctcacagggttgtcctaagactaaaaaaaaattaataacatatgtaagcctcaaaagcctggagcctatattctccagtgtaatagcagtcacgcagttgaagaaacacaattaagcaacaaatagtgattgagaacaaaccccccgtgatactttaatatttcaaaaactatgaaaaagattcaaatatgtaatacctgataggatttatttagattcctttcttcttttacctacctatcttatatctctagtttctcccaaatatcttactcaactattacttaaaatttctttccacacccagtctacagctgctttttttctccctgttctttctcccctgatctcaaccatttctgtacttttataatgtagatggtttctacctttctcccaatgagaaaaaatccttattctttagggatgtgtgggatgtatgtgtatctgtgtgtttgaggtaggcattagactggcaggcaattgcagaattctcttcagtgggctggagaagaagtgttgtggacattcccatgttcatttttttcatgacatttatgaaaacactttttctgtgtcacacaatatttcttggcaggagagccaagcctttgctacatgtatgagggagatggcatatgtgaaccttttgagagaaaaaccagcattgtagactgtggcatctacactcccaaaggatacttggatcaatgggctacccgggcttactcctctcatgaagacaagaagaagtgtcctgtttccttggtaactggagaacctcattcccyagtaagttaagccagatgaatagagtcgagcctgcgcaaaattgtaaagtgactccccctatgcttacacttrgggtctatgtttggataattaaaagaagaagtaaggagttagaagccctagggaacattactggatctgccagcattgctattacaattacatgatgttggacaagtcacttaacctctctgggccccaaggttctcacctggaaaaatgggtatagtaacaccatttgcactgtttcagtggtttactacaatgatcaaataagctttaaaatatgtattaaagatcaaagtataaattgatttaaagaagttttattattgaagaaacccttgatataagtaaattcttgcgtacatattttttttctgaatatccacctaaatagatagaagatcctctgacggatctaaaatgctataccaatgacatctatgagatatagttgaagactgaaaagaggattaaaggctcacaactcttgggacctattctagatgcttttattgtgaaataaactcttccatttattagaataggcaatacagccctttcacagaagtgagatttaggcctctaggtatttcaggccagaatgaaataataggattttatacttgagaagacatctttgaagagattgaggagccagctaaggttgatgctccagttcaaggatttcatcaaggacccagggtctcctagattccagctctttcatcctcgggtgcagccttcttcctcctgctcaaaacatggctgcagttctcctaggcgtgaagtcagcatttcaaggaaggagggggcaggccaaaggaaaataggtgcatgccagctgagtctttccctttttattgggaaaataatagcttttctggaagttccacccgcctcttactggtcagatccaggccacttcatcacctttagttgtaagggaccctaaggagatgaacatttataaccagatacactgtcgccttgaacaaaattggagtttattaataaaaaagtaaggggaaatagataccgatcggcaactagccatttctgccacactctctcagcctaaattctagcatcttgctctttcaagtcctggcatccgatgacaggaagccagggaagttgggagattctgaggtaatgaccgctctctgaagtggcttttagtctagtctgtctgtcttccctaagtgaagtgggagaaatttcctggagtttcatttctctggctcctttgcttagctgaatcctcagtggttccctaactcagtagcctcacttttggggccagtggatgctgcctggtaagggcttcatcatcaccccagacagacttccctggctgttcctggggcagttacctgaaatatgccaggactatttgtaaccacccagtgtgtaagacccctgggccgatgataaacgagagttgttgtgttttctacccttgtaagttatatcttgatgttaaagagagcactgagaaattcttcaatgttgagaaaagttttctgccaataatgtgatcattaggcattcagaaagagagaacaactttgctttgagctggagagtttcattgtccttacttatatcttcacactccacacttcaaattgttggttgaaattrtatttcagatttgcacatcataccatccagatttacccaaccaccgtcccctaactggctggtttccctgtgttgccagtgaaaatgaaactcaggatgacaggagtgaacagccagaaggtagcctgaagaaagaggatgaggtttggctcaaagtaagtggcccaaatgtttcttttgtgcatgtgaaaggtgtaagcatatgtgtgtgtgtgtgtgtgtgtgtgtgtgtaaatggtgcatttggatgacttgtcagaaaattttcttttgttatctcaaagtgttaatattttgagtttattttcacctctctgtattgtggacttctttctgttaatacatgagtaatcagtttatcaaagtgtaacatacacacggaaaagtgcaaaaatcagaaatgcataatagctcaatgaatttttgcaaagtgaacatcctttctaatcacaacatagatcaagaaataggacattcacatcactgccccccctccaaggctctctcatgtcccctcttagttattacaccactgaggtggatactatttctgtttctatcatcatagattagttttgactgtttttgaaatttataggaaaacactttacagtatgtactctttgcaactgattctttcttatttggcattatatttgtgggattcattcatgctgcttcacttagcagtagtgttcattttcattgtggtataagcattgcaatgtatgaatacaccaccatatatttaaccattctaatattgatgaatatttggattacttctggtttttctctattatgctattacaagtcattctgctataagcatttctgtacatttttgtggtgaacgtgtataaacagatgggtatatttggaactgccagatcgcaagtaggccagctttggtaaataatcccaaataattttccacagtggttgtactaatgtatactcccaccagatgttttgagtgtttcaaatgtttcacattttcatcaacatttggtcttttaagtctccattttaatgttttgttgtatatgtaaaggtattgccctgtggtttcagtttgtatttgcatgatgactaatgagattgggaggctttcatatgtgtatcagctatttgtacatattttttaagggcataatcaagtcttttgttcaattttccattgagttgtctgtcattttcttcataatttgtattatttcatcataattatatgcatattaattctttttcagtaatatgctctttcatatcttccaacactatggctaacttttcttgctcttaaacacatctttagacgaattcaagttctttttttttttttaagaggcagggtctcgctctgttttccaggctggaatacagtggtgccatcatagcttactatagccttgaactcctgggctcaagagatcctcccatctcagcctcccaagtagctaggacaagagttgcttgccactacacccagctaatttttaaatgttatatagagatggagtctagaaaaggcaccaactcctgccagtatctaacatcaaactcaagttaaccaaagcctcttctttaaacctgagcaaaggggataatcaaagtaaactgctttcatgagacacaggggcaagcttgtattcacttaataattttgcctttacctaaattaatataacttattatagtccttgataccaaataatttaaatgtttagctaccagtgagcttcctttcctgtcattttcaaaactaggctgggcttatgacctttttgtttaaagcattgctaattctttatgttttattttgcctctcaaatgtaaaactgttcagtccccccaggcccaaagacaatcatggaagaggtgggcgtgtgagattataaggaccagattttgagagataaaattaactgagatcctccaaatcaaagacaggcacatagatgcctaaacaaaatgtttgtgttttgtataactaattactacaagccaagattatagcaactcaacacacataagtcagttttataaccttattttttgacttttagttttgactcttatattgcttaaaagaggtttaagagctaataagtgtctgcccaccttcattcctggctggcctaaaacaattaattagctataagtcttttaactctaactcccttgaccataaggatcccaccaaaggacataatggacccggggcagatagcacaccaccccagcatcggggtgagacaagaggaaagcttggctattaatactatttctgtagtgccttgacaaaaagggaaaacgtaaactgaaaaaaaaatccatggcccctctacagactgagtagatcccccacttggccaaagggaatcccctccaaatgctaaaaaatctaattcaagcctgatgagaaataaagggtcagacacacctcactatgctccaaacccctaatgtttaagccaggatcagaggccattccaaattataaaaataaagtattgccctttccgatgcaaaaaagaatactttttctcttcaattgggagacttagccttactgggagaaaaaaaaaaaaggataccttgaggataaattacaaccaaaatggaagggcccctatcaggtattattaaacaccctcaccatattaaacttttaaaaaataactacttgggtacacctctccagaataaaacctgttttttaatgagtcacaggcaccataacctacatctgcggaagaagccatgacctacctctgtaaacctttgaaagacctctgctacctatttaaaataacacatggccaaaagtaataatgtgatactgtggatagcaataggtgcattaattattttcttcttgattataataagtcttttctattgctttggccaactaccttctcctagaaaacacctcttgtatccttgttgggtgtagagactcttctaaggacctactagacaccatgttggcactattaatcctgtttgctctctcaattaacctaatccaatgtgggtggaagtaaaactttataataaatatttcaaaaattatagygtcagggaatcatctttgtgattactaaatttgtcatcaacatttccagaatagcaaattccaccttctggcctatccagaaaaatctcatggccatctccccagacctcctgactaatcactgcaatctcaaagtacccagacccctacttgttaggtgaaactctgcctcacttaatggattccacctaaaccccctgccactatgacctagacctggaaagttggctatctttacctccagtgcactaataattctatctttagtacccactgttgtgttaatgacacaaaaacaaaagtttcccttcaatgctctaatctaactctagttgccaagttcccaaggtcgcagcaaggtaaatgggattccacttgtgttcgraaaatctgtttataggccttctcctgaatcaaaacacacaggggaaaagcaactgcctaactggggaaggtggaagcacagcccccttctaaagaacaaggagagtttgaccacccccactggagcaggggagaaatatctctacagacccaatgtggctgcaaagggtagacatcacaccttgtggggcctctgtgccccaactgggctcgtttctgtttgtggtcatgagtgggaaacagtcatatctcataaccattcccgacttcctggggagccacgtgttctttcaggcatagctttccctaatttatcaaaaaggtgaaatgggtgaacatacattggccacccttacccctgtggggatcacygtctataaccccttaagacccaggaataccagaaataaatgagcaatracgttgattctggcaggaattggggcagtawtaagactagcagacccctgggatggcttggcctaccatgagttagccctaaaatgcttgactcaaaccctrcaatcattagccaccaacacagattaggcattaaagggaattcaaaaattcctagactcttgggcaaatataatacttgataacaaactagtgctggattatttagtagctaaacaaggcaagtctatgcagttattaataaaatatgctatacatatattaatattaatatattaattaattaatattaataacttcaaacaggttgaggttaaccttcaaaaaatctatgaacaaactacccgataacacaaatacaatgagggtactggccccaactgtatttggttgactatcaaaaatgttctcccaagtcttacctggttcttacctctcctaggacttttactgtaaaagctaataatagctttctgttattactaatttttgtcctttgccaatttaacctctttctttttttttttttttttcttttgtttgagacggaatcttgctctcgccctgtcacctgggctggagtgcaatggcgcgatcttggctcactgcaacctctgcctctcgggttcaagcgattctcctgcctcagcctcccaagtagctggaattacaggtgcccgccattatgcccggctaatttttgtatttttartagagatggggtttcaccacattagtcaggctggtctcaaactcctgacctcaggtgatcctcctgcctcagcctcccaaagtgctgggataacaggcatgagccactgcgcccagccttaatcgaacctcttaagaaagtttgtgtcttctagattacaacaattccttccttcttttttttttttttttttttgttttttgagatggagtcttgctctgtcacccaggctggagtgcagtggcacaatcttggctcactggaaactccgcttcccaggttcacgccattctcctgcctcagcctcccgagtagctgggactacaggcacccgccaccatgcccggctaattttttgtatttttagtagagacggggtttcaccgtgttagccaggatggtctcgatctcctgacctcgtgatccgcccatctcggcctcccaaagtgctgggattacaggtgtgagccactgcgcccggccacaacaattccatataaaaatgttagcagcacaaggcttycaacccatcccctcttctgactcaaaaaatgaaaacaccctccctttaggccccttaggccagctgtccaaagatttttattcccccagtgctaggcagaaagcaaagtaaaattagcagaaagcactcagagaagatagacctccacccttctgcagccccctgaggattaaggaggagtatctaatatctgagagggggttaaggtagaagatcagtaggacttgttttgtaagcattggttagggccctgctaatcagagcaggatctggttgaaacagcctacagtgaagaagccagccaaaaccagcagatggcaataaaagtgacctctagttgccctaactgctcattagcataaagacacttccagcagcaccatggcagtttataaatgccatggcagcatgctatggcaatgacccaaaagttaccctatatagttccgaaaactccttgccccttttccagaaagttctgaatagccatctcttaattagcatataattaaaagtgggtataaatatgactgccaaaagctcctaggctgctactctgagctcactgtctatggggtagccttgctatgagagtagcggtacctctgctgcctcttcataaaagctgctgtctaacaccactggctcaccttcaagttctttcctgggcaaagccaaaacctctccttggctaagccccagtttgggggcttgcctgccctgcatcagttttctgagaaagtggagttgaattttatctaatgctttttctgcatctattgagatgatattttttctctctttgttctgttactatattaactcacattaaacatttttttaatgttaaactaacataagatatttggaaaaccaacagccaatcacagagctttgaattctatttgagaatatgttgttggtttttcatctacattcattagagtttggccctaactttctttattttactgtcttgtcaggttttatgatcaaagctaaataaataagtttcttaaataagtttctttttgctccagttctcagctctatggaatattttgtgtaaggttagtgttaattttttgagaattcatcagtgaaactatctgagcctggtgttttctttgaggaaaaaaatacaattatggattaaaattttaaaacaaatgtagagaaatttaggttttctacctatcttaagtcaattttaataagttgggtttttcaaataatttgtcccttaaaaaaatctaaaatatcacattaagtttttcataatattctgctattttctttgtcatgtttctacagaataaggatatttttcactcatgctattgttaatttgtggcttgtctcttttatttttactgctcagtcttgctagagggttatcattttcattaaccttttattaatctttttatatgaccaactgaagatatatatgatcttatttttcattaattcctttatgtttgcattaacttgttctttttctagtaacttgaggtgatgcataggtaattgctttttgyctctgtttttaaattttatacattaaggccataaatttccttttaaacatgactttagctacatttcataagttttcacatcttatttctgttaccattcaattcaaaccaattttcttgttttcattgtgatttctttttttactcctgagttatttataagtgtgctgtttaacttgaaaacatatgtggatttggggtaacttttttttttwaaaaaaaaaaacatagctagagtcttctgtggtcaaaagtatattctatatttcaattctttgaaatttgttgagccttgaattatggatcagtctatggtcaatattggtaagtattacatgtactttgaaaggaatgtgtggtctgcaattgttggataaagcattccatatatttaaaatgtcatgtttgtccattgtgttgttgaaatttcctatactatatatactttgtatatattggtttttcccaatattgtgtgtactgtttccatcgggtactgagagacatgtattatattcctccaaaaaaatcttggatttgtatgtttctcttttagttttgtcatttttgagacatttagaggctatcttattaaatgtgaaggcagtctttacttagcctggtagtgtgaaaccacaaaataactatgcaagttgaaacctgcaaccttaataatcaatgggaaaaattacaattgcttcgtgatatctaaaagrttttttttttttgcaacattaaatgctctcttatttttagttataagtatgtagaaaatggaaaaaactagtgaaactaatatttagttcactggaatttgaaacagaaacatgaagaaataaagtgtttccttttttgtgaaaaaacaaaaaacaaaacttacgaagaatactttaaacattgtttgccttttcctcattatatgacttacattacaaagcaagcagttcttctgtgtgttgatgaattgtcgtgtttcctgtgaagtttgaatccacttccagcattttatcctttgcactttcaatgttatgaaatatctctgagagttcctttaacgtaagtttttttcttgacatcacttctgggacagcttcttcctttttgtcacaacttattttttcatttatatcgataatttcactttcactgactttctctggctgtgttcccagagtctcttgaatggcagtagagtcaacattcccagagccagctatttcttttataactccatttatctttgattcaaatttcacttcccagtattatcatttttcatttatttgctacgtgttcatcctttttagccaattccctcttttgattatccatttctgtaaagtgtcatttatcactaggagacaaaatggtaacgtaagtatacactttttagtttctgtgtgaatgaaataacagatacccagtgaccagtcagtgacagactttgaacgaaatgatgtgattggtcacccatcattattcacatttgttattcacatggtgatttttggattgaaggaccagtaatgaagttggtactttatatagttaaaattaatatattgtgcaaactgaaatatgaatcgtgttcttgggagactggttttagttagctaaattgttataaccgatattcatccatatgggaactgtgtaaactggaaactgtcagtatataattttagaatttttgtatcttttaggtgaattatctcttttaaaactaactttaaaagccctctagcaatacttcttgctttaccataaccttattgtagccatacctatactgaataacattttatatttgtgtattgtgtcttctttcatcctattacttttaacttttctttgtaatcatatttaatatgcttagtttgttatcaacatattatatatatatgtgcaatataaaattctctgttttctagttggagaacttagtacaattacgtttaatgtaattaagaatgttcagttttaaacttaccaacttaccgtttcttattcatttgttctatatgctctttatttgtctctttcttgcttttttttaaatatgtagtttgattatgtgatttctcattctattagtttgttagtgtattagggttctccagagagaaacaataggatgtatctacatataaatagataataagagggtattcatcaggggaatggctcacacaattagggagggcaattggttcacacaattaagtctcatgataggccctcggcaagcgggagacctgggatgctggtagcatgactcagtccaagtccaaaagcctcagaaccaaggaagccaatggcataattctgtctgaggccaaaggctcaggagcccccaagaagctgctggtacaagtcccagagtccaaaggcttaagaacccagagttctgatgcccaaggggaaagagaaagagtttcctgctctggaagaggaagaaagaaaagtctccccttctttcacctgtttgttccatctgggctcccagctgattagatggcactcatccacactgagggtggatcttcctctctcagtctgctgactcacatgacagtctcctccagaaacaccatacaaacacacccagaaataatgctttaccagccatcaaggcatccctcaacccagtcaagttgatatttaaaatttaccatcacagtgagctatacttttattttctaagtggttagtcttgaggttgcaatacgcattctaacttgttgagagtctggtataaattaatactctcacaattttataatgaataagataccttagaatgcttttcctgcatttattgctctctgcatttttaaagtaaaatgaatttaarttccctaatatttaccctctccagtgctctttaatcctttctayatttctatgcttccactatttttgtttagcttgaggaaattcacttttattatttctyttaatgtgggcctgctggcaatgagttctttcagtttttgtgtggctaaaatattttcatttggcattcattttcaaatgatatctttggtacaaaattctaggtagccagttgttttcttttatcctttggaagatgttatcccgttatcttttcacttccatattttggagagttagctgtacatctgatatatatttctttgaaggccatgtcttttattccctggtgcttttaatatattctctctgtcttttgtcttcaacagtctttctatgatgttccaaggcctacctgtctttgcatatgtctggtttgtcaagcttctccaatctgtggcttagtgtcttagtttcaaaaaaatttttttcaggtattccttctgctcatttacttttttttttcttggttgccaaatatacatacattacacctttttttgtgtatctttttaacttttctgttcttctgtttgttattcccttctttttcatgctgtcgtctgattattttacactgagctatcttctgtttcaataatcccaaattttgctcaatataatcagcagttaaactatttattaagtccttagttttgttattgtatttttaactttagaatgcctattcaatttttcctatatattctttgtgaaattcttcatcttacagtctatttaaaaacatattaatcacaatcatttttaagtctgcatctgataacaccaatatcttgatggaggggtctgtttaggttgactttaaaacatcgtatttatttgggcatttctactattatactgataatgttttaagtgaatatcaaacacaataaattgtagaggctctggctaatatcttcctttcaagattttttttttttggacatttggtaagatttgggaaagatcactttaattcaataagtaattaagatagcttgtgctttgtgagcctttatacatttccttttttttttttttttttttagttttttctttcttctaaggcctggctcttcaggggtctcaactaaaagcttggattaggacctccacattgacagtctttgaagtacaatttctatttcatcagcagtgtgtctgctaaaaactcttcttagttttttggactctctattgccaatttctatttggctttttataccgttattttgcattgcttaggatttgaagaatacctcaaaggctaaagtagcacagaatattagtttcccttcaatgtgttcttttttatattattattagacttttaagtcctgactacttggttgctctcaaatgcttttaaacttttttgtatacttaattcatgttttatgattgttcttgccaggacagtttgttgtattacacgctactctataatagctgaaaatagaaatctccagctggaattactttaatatatgtcagttagctacatcttacatttcaggtgtgtaccgtgttttagtctgccttctgatggtataacagaataccacagactggttagtttataaagaaaataagtttgtttggctcatagttctggagactaagaagtctaagagcatggtgctggcatctgctcaacatcgggtgaaagccttcttgctgcatcaaaacatggtaccagggtagyagggcaaaagagagcatgtgagacagagctcacttttatataaaagccactcctatgataactgaactactcccatgataatggcattaatctgttcatgacagcagagtcctcatgacccaattgcctttgaarggctctgtctcttgcacagtgcaagcaaaattccaagacatgaacttttgtggactacatttaagctatagcatacccagttcatactaaaactcatccaggagtaatagtctttgtattagaaaaaattattaatataattgaaagttcagttaatatataagacctgttaagaaaatgtagtcttcacaaatcaatacaacaccaaataatttagaaagtgatttttaaagataaggtggttaggttttttttttaaacctttcagagaaatataggatttctgactctttattcttcctttcagtacactttaatcttgatttgatacacaaatatgattagtatgcagtaattcagagacaaatttactgcaagtgagaaacaatgatagtggcaaacattagtcttgaaaatatcttcccaaaaatctttcattgactaaaatcttacttgcccaaaaaaawttctatcattttagtctacatttactgaaataatacycttagtttttcttttcttctaaycttgagccaatagagcaaaagtgtaagaattttcttaaatataataaaatgtagagtcttttttattatttacataataagcacattttatagccatttatggtttacaaagtacattctcatgcactatttgcatttgatccctactatagccttgtgagtttggcaaggtaggtgttttccaattttacaggtgagtaaaataagaatcaaagactcaaagtgctttttctacatcactcaagaataaaataataaatctgacgctcacatttatgcctcttgattctaatcccatgtttatccatctatactatgttgcctccttcaattagcattcactaagcacctataatatgccaaaaccagaattaagcactggtgacagacagaaacatagcacgagcaagcaaacaaattaaaacatatgttggattgtgaggaaaggcttccttatcttcttttgctgtgtttcttctaaattcttgaaagactgtgtatctattaatctagttcacaggatttattaaatacttattgtcaactcttggtgtcattgggggattgagaaagaaacagaaggcataattcttcccagaaagtcctttgtatctaagtaatatagacaacaaatgaagcaatttgagaagcagatactcaataagtacttgtttggtttcatagggagcccgtcaacatatgcaaaatcatatgttcatgtttattttcgtggctcctctaaaatgtctgcaatttggaatggtctcgttcaggctggactggttagcaatcccaacagcaaccaccacatgctcacagtgtcttccacatcagttataaattacagaccactgcctggaaacccttgctacataaagcccaaagcctattaaccataatttcctctcttcctttgtttgggttcgactctccaaacactgactgtgaatcttcaacagaaaacgcaatacatgtttaattgattggatttcaaagatgaaaatccctaacaccaggcgtcaaagaagaagaaacgcattgattgaaatttattctattactgatattttattattaattctcatacaaattcttactagagatatgatttttctcattctaaaaatgattatcttaaaattcagagatgttaagcactggctagtagagctacagataggattaaaattgaaatccagtttatggaaaarctcatggtcctttctctctacaccagggttttggaaacattttctataaagaaagcagattaaaaaactactttagggtttatgggccattcagtctgtgtcacaactacttaactactacttccgttagcatgaacatagccatagtcaatatgtaaatgaacaagcataactatatctcaacgaaattatatttatgaactcggaagtttgaatttcatataattttcatattattcatgtttaaagtttttttaaccattcaaaaatgcaaaaactmttcttagctcacaggctgtacaaaaacaggcagtgggtcagatttggcttgtggacaatagtgtgctaatatctattctatatcatgtttccagtaaatattaaagatatttactagtgtttgctttatttccacaccatgacaacattcacttttaattctacttagtaaacaatgcctcatatgaacaatatattgtgatatggagggatccaaagatgaatgaattaccatcttcacccttaaggtacatacatagcagtgggcatgtttacaaaaatatgatagaagacacaaagttgtaagtcatgtgctacagatacagtaaagtgaaaaatagacttgaaagaacctggtaactgattggacataaggagatagagataagcattatctcaggctgaattatttcatttatcacatcttccacacccggttacacacacacgcacgcgcgcgcacacacacactcacgggtttagtcattttaatcataacagatttattttagtgctgaaatatgtcagagttttcttttcttttttttgagacggagtctcgctctgtcgcccaggctggagtgcagtggcacaatctcggctcactgcaagctccgcctcccgggttcacacgttctcccgcctcactctccctagtagctgggactacaggtgcccgccatcacgcctggctaattgttttgtatttttagtagagacggagtttcaccgtgttagccaggatggtctcgatttcctgacctcgtgatccgcccgcctcggcctcccaaagtgctgggattacaggcgtgagccaccgcgcccggccagagttttcacttctctataacattcctggtgggaaacttatatttttttccttctctgtaaatgatttactcattatgtctccccaagaaatacaaacttaccttctacttctgtcatttagctcaaggattatttctattatagaacctaaccctttctaaactcttctcctgagccccaggtggtataattgatcacttcatccttgatacacacttctctcaaagtccctgtatactccactgttcttgtttacctatctcttcatcctgtgaactgtaaggatctcgggacagaggccatgtgtagtcaagattgtatgttcaacactgagtgcagagcctgcttattgtagtgttcaaaactggtgaatgcatgaataaatgacgagatattaagtcttagccttggcaatggggagcatattgataatatcttttatgacacagaatagaggtaaataagtaggactgtacactggtctagactgaaaagagaatggccactaccatttcttctgaggccagaaatagtggcaaaccacctcttcttgaaaagccttttaaaagatgggctgcagttcgagtggaaatcacatcaaagggaatttttcaaggatgaggagaatttgtgattatmtttgtttgtggcaggttggatttggattctctaggaaatacatattctgagatggaatttggtatacaggccatttactaaggagtggtctagggatcaccatctgtgagcgagaatggaaagaagcgtaagtgggtaaaaaaggaagttgagcagccttaatgttagactcagctgactccttctgtggagaaataatatatatgaccacaaaggacaaggcggttcaaagtagagtagtacttctgtaaggtcctaacattattcatgagatagtaatattttttggaagtagattgcaataagctagagatgcatattgtaatctctagaataaaaatacacatatgcacaaataactgtagaggaaaagtcaaagagaagattaatggaataataaaataaatggattcaaagaaggcaggaaaagaggaactaagaaatgaataattgttggaaacaacagaaaataaataccaagatggtagacttaaacccacctatrtcattaattacattatttaaattatctaaaaactccatgcaaaaggcagaaattgtcatataaaaagaaccagttacaaaactgtttatgaaaaacacacttcaaataaaaagacatgtacatcaaacaaaagggtgaaaaattatgtaccatgtatatcctaaacataagaaagttgatgtgccatgttaatatctgacaaaatagatttcaatacagtgtgttaccagagataaaggagcatatttcataatgataaataggttaatttctaaaatagacataataatcttgttataaattgaagcacttaagaacagaggctcaaaagaaatgaattataaattgacagaactaatgagcaaacagccaaatttataatcatagttggggatttttttcacctatctgttagtaattcatttaataagtaggccaaaaaatcaaaacagatatataagatttgaagatcattatcaaatatcatgacctaactcacatttgtagaaacactacactcaaaacaactgtagaatgctcatggtacttcaccaagacagaccatatactagaccataaaacaagtctcaatgaatttgtaatgtttgaagcatacagacaaattagtagcaagatatctaggtcattcccaaattaagcaatacatggctaaataattcacaggccaaagaagattgtatggaggaaattagaaaatattttgagctgaattataatgaaacaaaattgaaatttgtggatgcaattaaaaaaagtacttacagggaaatttatagcatttaaaatgcctatatttaggaaagaatcaaaataagatcaacaatcagagtttctaccttaaataagtagaaaaagatcaaattaaaatcaattaaaataaaaaggaaaatcacaaagagcagaaattagtaaaatagaaaaacttcaatatcattactattattttactttctctggaaatagaagccagtgcagttagacttttgattttatactttatgagatataaaagaagttaaacataaaatatgaaagaaggaagtaaaattttagttagcattgaaaagagaacaacctgaaaattatttcacttagtatcacagtttaatacaaaattaaggtgaaaataaatgtgctgactaatttaaacaatcaccaacaaaaatgaaagtatctcagtagcaataaaaatggtaaaataactagaaataaaactaaaaagaaatttgaaatatctctatgaagaaatgctactgagagataccatgagggcttgaataaatgaagaggcacaaactggtcctgtatagaaagactcaatatcatacgaatgctgattctccctaaattttaaatttcccataatcccaataaaatccaaacaagatattcaaaagaattatacagttgattttaatttttttgtgtgtggagattctgaaaaagatgagtaatggaggcctggccttatcagatattaaaatacatcataaaattatagtcattaacacatcaaggtgctatatataaataaacagattaatggaacagggaagttcagaagtatgcccaaacatatatacataaatgtagacttaaccttaaacataatactttaaaggcaatgagactagtacatcatttccacatattgttgcccaaacccgatattacccaattatctctatttaattaagatgatgggaaaaatgtggtatcttacttttgttatgtttttcatttttctaattattaatggggtatagcatcctttacataataattatcaagcatttaggtttttttctctttaattattagtttttgctaagattgcaaagataccttttcgtttttaaattagttttatacttttgcctgtcaaactttagcctttaatatattcaacatttgtttttgtatacagaataagacagggatctacttttaaatacatgtataatccaatttttctaatatcgtctgttaaagcatccacccttgtcctaatgattgtagtctcgagttgattataaccaagttctagacattacgtgattctaatttttaactctcttttatattccattggtcttttcatctgtttcctttaccagcaatacactgtttttattactatagctttaaccatataaacatagctagcaggacatgtcccctctcccacttccttatacgtctttttcaaaactgaattagctttgaaaccaatgagaatgaagacacaatgtaccagaatctctgggacacatttaaagcagtgtgtagagggaaatttatagcactaaatgcccacaagagaaagcagaaaagatctaaaatcgacaccctaacatcgcaattagaagaactagagaagcaagagcagacaaattcaaaattgaatgaactattcattattcatgaacacttactcgttatttgtgtgccattgtgcatggccaagaagtcattattaaacacacacacaaaattcaagaacttgctacctatactccttgttgagaaaaaatattaaaaccagccaattttagatttgaaattttagaacaagccttaagtcattttttctgcctcttgaaaaacatacttgtacatatggtctgaacttaatyaaccccttgatttgtattaattgatatgaacttgtgatttttctcctttgattcataattatgttaaatagccttggtagatttttytttttagttgtcaaatcatttttgccttcgtgaagcaagactacatacttattgtatattttaaacgtattgttggattttattgggtaatcttttatttttgacttttgcatgtagaattattttatatattcattttttgaatattccaattatagaagcctcatataattgcttgtacaattttctttttttattttctggagccacttgtataaaataaggatgatctgtttcttcaaaatttggcagagcctacctgtaaaaccaactggtatggggcttaactgagagaatacttatgactgtcacttaaatttatttgatttttattaatgtcttatttttttctattttttccaattttgaattttttgttatttccagaaatttattaatttcttccatatatgcaaatttagtgctgatatttgttcataatgtgtttttattatatttcaactctattttagctgtagttgttacatcctttcttgtgtatatttttgaaccttctttttctctttttcttgattacgcatgcatggggtttgtctggcttatcagtgtcttcaaagtacaacttttactttcattcatctctcgttttgttctcgtttttgttttttgttttttttttgtatttcgttgatttctactcttatcttcattatttcctkgctttttgtttgtctggatttacactgatgttctttttctaggttttggtgttgaaatgtttggctaatttgttttaggtgttccataattttcccctctaagtactactttaattgtgccccataaattgtgacatataaggattttattgtcattcagtcgtaagtattttgtaatgctcttataatttctttttaaaaccttggatttttaatagcattttgtttgtttctagcacttatttttcagggcataataacttttattgtgccagctgtgtctttattagatatttttttctccttttcttggccctacattttattaggaagtacttaaatagtgagtctttatttattcaggaattaagggccagtccaaggtaaaaatgtgtgcccagtatcattcactggccaaaaagtgtctaccacttttaccaattttatctctatttttgtttttatacataaacatccacaagatccttttctctattgctcttttcctttttaaatttgtgttccttatacttctttcttttctctgttcatttttgttttccttattgtgaattttttaagttgatgtgtttcattttttattttcttataactgacaaaaccacacacacacacacacgttgtacactgtaaatatatataattttgagacggagtctcactttgttgcccaggttggagtgcagtggtgtaatcttggctcgctgcaacccccatctcctgggttcaagcaattctcttttctcagtctccctagtagctgggattataggtgtgccccaccatgcccagctaattttttttcttttctttgtattttcagtagagacggggtttcaccatgttggccagactggtctcaaactcctgacctcaaatgatctgccagcctcaacctcctaaagtgctggaattacagaagtgagccaccatgcccggcataatgtaatactttgagatatatttatatgtgtatatatacatatgtgtgtgtgtacatatatgtgtatatatacatatatgtgtacatatatgtgtatatatacacacatatatgtgtacatatacatgcgtacatatatatacgcatacacattgtgaaatgattgccacaatcaagtttattgtacattcttacatcttttcaactttgggttgcagaaaaaaatagaacaaccatttcaatttaaattttagataaacaatgaattttttttctttagtatgggtatctccatgcaatatttgggcatatttaaacctcattgtttatcagatagtcaaattcaagtgcccatactgtgttttggtttgttttggctaaatctggcaaaatagtttataatttaaaaaatrtaattagtcagatgctaatcacttattcagagatgacttcaaccacccaggaaactgtccagatttcataatttagcaaaaaaagaaaaagcccatgtacagatggcaccaagtccaatcactactttggattatttgactgtgtttataggaaagttgacaagatcctttgttagagctgttgactttacattgaattctaacagtatttgttatctgaatttgcagtctgttttataaaaggagcaacaaattagtagggatttagaaactgggagaaaatatacactcagaagaccagtaatgtaagccttgtttttaccattaaccagttaagtgaccttataaaaatcatattacctctctgggcattagttttctattcaaatttgtttcaaatgatgcatttggattggatgatttctttcggatctgcatttaagtttaagcttgatggtgagttcataaaagaagataataagcaaatatggtgaatgaaagtattacaatcttagactactaagtgctaaaggcaaagataattatatctattaatagctttaaagtcttgttactcaaaatgtggttggcatgcagaaacattggcatcaccagaaatctagttagaaatgcaggatctcagctctaggaactcataatctgcattttcacaagatcctcaggtgatctgtatgcatattaaggtttgaggagcactgcttcagaagactgttaccttagcatttagtaagataattgatgttcaaaatgatttwaaattgtctccaattcattaagtgaaaattcagttaagtacagcagagatacccaaccctcaggctatggagcagtactggtccgtagcctgttaggaacctggccacacagcaggaggtgagaattgggtgaaagaatattgcccccctgagctccacctcttgtcagatcggtggcattaggtgctcataggagagcaaaccctattgtgaactgcacatgcaagggatctaggttgtgggctccttatgagaatctaatgcctgatgatctgagatggaacagtttcatcctgaaaccatcctcctccattccctccacccccatctgtggaaatactgtcttccataaaataggttccttgagctaaaaaggttagggactgctgaatttcaggattctctacttgaggaggcagaaaattgtctaaggtgcatttaagttatttctatatccatgattgaaatttctaaaatgatcttgtgcttcagaagaaaatcttctgttgtttggaaaatgaatctatgtggatccctgcattttgtgggaatcctgcaaaagcacagatgactgtgtgtacgtgaatctcatttccatcaaaaactaactgagtgcgctgacagaggagctccaattctcagtgggtcaatagtttattctgagggtaaagcactcatttccctctttcctgtttcattgttactaatctttttattgatttttacatgaaagctttttccagtcccagacatggcaacttcacagacacatgaataattgggatagcaatgtttttttatccacgatagaatcctacccagccggggaatgctctcattcctttctttgcttatgcattcttgttcctgaaagaatcatctccagctatgttccataacaccttttctcaatgtcaggctttgtcttaaatgggtttctccaggattcagactgagaggaggatttgccagcagatagtttattgagaacctgactcagagcaagatctgtggaggagtgaaagaactagcattgaacagacaaaggagaactgaaacagcccccggcaggtgtcagcatcccacagagagctgggatggcccttcagagttgtcccactctgtataccactcaccccaaccaaaaggttattggacattgcctgtccactccacctcccactccaagaaaatggcatgtccttgtatagagaggttttttcccccctctgagggcagtttctggaaagattctttccaatgagctgaatgccagagtcatgaaagaggggatgcagctgacacatcacagtatccaatacaaatttgactttgtctctttctgacactccttccaagttctataagctcttctaacacagaatctctgcagacttagccttggtgtctaaaatcacagtttgaggacatgctctcagaaagaattcagccagtcgtctgattctgatctaacccccttccatggacttgacaaatcatacattgttgaatgtctacccctagttcgggtgggattatagtggttcccccttcatttcaaaaaattatgagttgatctcacccttctgaaacacacacacacacacacacacacacacacaaactcatgatgtgtttgtagcctttcttatactatgaaggaataactcaggaaatcagctgggttttagccatacaaaggtgggcaggggctcaaacatcagaagaaagtaaaaacaggctccaaccacacctacccattttgacccacatcctcaatcatggagacaaccatggcagctcaktgccttatatccccccttcatccattagatttggatttcaggtaagatcccttgaaactttgattattaaactcttcctcgacaaaatttcagaagtccacacagatagcaatagtattaggttgaaccagaagaaattgccaatatttgataattcttcacctataaaaaagtaatgtggttcaatcaatagtgcaagcattcttaatctgatttctctcaacctctaattggaccacgaatggcttttaaaagtgtctgtcagcccccttaaaattgtgtaaagcttttatgactaagagattatgtgactttatttctggggggagtaaaagcacaaacatcaataagttttctaatctatgatttcctgcttaccccaaactaagaacattggttcagtcaacataatacagagcttaaattgggaaaaaccaagttccttcctctctagcatttacctagggaaagccacttaagctttcagaatcctagtttcctcttatgtaatatatcctttatatcttgaggctactgttgttcaaaaatatcaaaaaggaataaaatcacaatgagcgcagtggacccaccagcaaagcctgtaatcaggcttggcaaactgtgaagtgctatacaaaaagaaggtgatgcctgcctacttttcttctggtctaaggtcttctgtttccctgtggaatcaggaagtgccatagatgagtgaaaatgaaaaggcacagaagaaaacaacaatccagtaaccaaaagcattttaaaacctcagagaagattcttttcaagtttgtggtagagtttcaggatctgctatccagtgagygccacaaaggatgacctggaagttgaaatgcttggcttgggagcatattgagtgtgtctgtgcccagcaggcagattgaagggggatttcttaagcccaaacagttctacatcagagacactttctttcaatcttacccttcaccagtggccaatggttagattgcgtagttaacatgcagcctttggatgaaaaatcaactgagtgtgtgagactggctttcccatctctcagaatctatctatctatctatctatctatctatctatctatctatctatctatcatctatctgtctgtctatctctatctgtctacccatcctttgttcattttctctttgtttcaaaatattttgtaatgaattcactaagctaatttcactagcaatccctctatcatgataccaattctcagacctgagaatcacttgcttttctaacagtacttgtctcctacctgatatctagctaaagtttttcttccttgcaagagacatgcttaaattaattttacattgtgcatgtaatatatgaaagtaaactctttgttaaaaygaatagtaaaatgttagatatagctaataattcttttgactttccagcactttgattttttcttatggggcatcaatgatgcacatctcagatctgagtagctcctaaggggtcttttaggagagctttgtcattaagaggacagctgttcacaagcatgcatttggagtgatcagaagagtgtcatacttgcagtggcaaaagtgacacaggcatacagcttcctactgtcaaactgtcttcctgatgtttctgcttgtctttcatgtctaggagaataaattcattatttatctctaataaagcaaaaatagtctggactctatatatatataaaatgtatttcttttgtacaattccttgtattcctgtataaaatgtattctctctmtatatatatgtatgtattcctcatttaaatatatttttaaggttgctctttccacagccaagtcacaaatgtatatgtaaaaawatatatttatatatattttatgtatgttaaaatgtatatttatatatttttaaatatatatcttataaaatatataaatatatttatatttaaattaaagtcacatatatacatatatatttgttacttggttgtggaaagagcaacttaaaaataaatatatttaaataatgaataatctgaaaggatttctaaattgcagtgccaattctagaagtttctatgtccttatgtacagcaaaagtagatttttaataaatacattttaaactaaatttctgaaaagcctgcaagaaaaattatatatttattttaaagtataatgtatttttcatagactcaatttataaagtagagatatattctgtaccaagagcctacaatattgatcatttccatggaagcagatcttggaataccagttcacatttctacaagtatcaactgaaaatagcatatatgaaattttttaggctatacatttcagaaaatcataattccctctatattaaaatatacaaatatatgtttagttttaaatttttattttttttacctttttcctacattgtaaatacactaattttttttttggaaatacaaattatcgaacactgaattcttactaaataatagtgaccattctatgtatttttacctgatttcatttaatagccatagtcaagctgtcggtaacatctctatttcttagtagcagaaaagagaaaccctaggctcagagaagagagatatattgctcagatttaccagcaaataaagaacaatccaagaatcgaactcagggtttctgcctggcttactctctctctctagaactgtgaatttagtgggttccttttgcctctgcttgaatttattatacatgtacatgcagattcaggctggtttctatttttgaagatccagcagttgtatgagggttcacactttcttgtgctagttgctgttgtgaacatacgtggggtccgaatgaatgaaacttggctacctttctgtgtcactgtgaaaggaaatgcccaagactcagcattccataacttgatcaaacacttgtctctgtttgctttgtgtagcctaagactcctctctgcctgtgtctcctttgtaagcttcatctgaggttttcctacttaagccatggcctggaaatcctggcataacttcttcccacaaatcatggcacagagaccttgccaccaggaacaggcaaagtgatttgatattcaaagacccttggagcaaggaggcatattgctaggagatgaaaaataggttggaggtttaggcagcgacgttcaaaaggtagacactcacaccataaggcctacctttattaactagcttaaggtgggtatctattttgggatccaacagaaggtgggaaggctgggtttcctccttgttgaagccaccctactcttcatgcctgagtcctaatggggtaaagccaccaggtatttgtttggattctgttcctggctcagaaaatgacacagaactttcttccagtactcaggtttcttttgtggtgtatgaaaaggaagaggttatggaaattcccagggggctttgatgtcatttgctgctggagctgagggcattgaattgggctcttggttaccttagggtgtgtttcatgtctagccctcatccagacagggacaaaggacttcatatggcaagtgtaatcttgggtctggttgtttcttaagttatgaagaaacatttgttacttcaaagaggagaaataaaaagggggggaaagacactgtaaaaagagagagtgtgactggtctttcccttaaagaaggagagaaagaagggagagccgtgctgctttgaccactgaaaatcataaaatcatcctaattaagccagcagtgcaaatgaactctataaacatactgccaaggctcaggaaaaatgagtctgtggacaaggaagaattcttgttaaaatgaaaacatgttttactctcctgctccccacttttagaggaaggccctgtcattagatgttgtaccctgcttttacactgggaacaattttcctggagcttcatcacccttagaacctgataaaaagctatagaaatgcacgtagaactttgtaaggttcagttccagattctgatcatacaacaccaatataacaccagggaaagttgagatttattctcaatggaaattaagagaaatattcagctatgggaaataaaacaaaagtagaattaccatatcaaataagtccagtgtggaagatgaacactggagtctcagcagtagcaagaatctgctcttcatcttccaaactctctaagatgttttttttcttttctttttttttctatcaaaggatttctaaggaaaacacttccatagttcactctgaaagtctgttttagtgttaatcaccctaaccatctagggacattcctgagtgatacatgaattttcctgtgtcccattgttggcttattttcctggccggggactgggtatacatgcttgatgcaccaggaagacacataagaataaacagtttggcagattctaatttcagaagcaagagactctgccacagcatatctcccatgtcagagttcacatgctatgtgagaggttctgataaaaattttggggagagataggaagatggggaaagataactagacatggcagttcagaacttggaaccatttagagcaagatgctagtttgatgattcttctccactgttttcactttggcaataaggagatatttattgcactggctctgcagtcatttattgtctctggcaatggtttctttaaatgattgttttcagaaatttaaagaaagacagggtcaagtaaaaaaaaacagttcaggtatcagtctcagaaaaagataggatgttcagcatctgaaaattatcttctttccatttgatcttgttrtttgatacaaccttgaatacctttctgtgtctactccatatttttagcatttataaaaawaatggaagctcttactttataaatagtgagctctctaagaagaataaaaattgtatagcacatgtcttgatagctcaatggaaataatgacttatacataaatgtgcttatgcttaggtgtgtttcaatagaccaggagaggccagagcaatttttatttttttgacaactgatggcctagttcccggagagcatcagcagccgacagtgactctctacctgaccgatgtccgtggaagcaaccactctcttggtgagtctgacaaatatccctttagggtcactagaggacaacccggtagacccagaagtcagcttgatgtctgtcttttatgttgtctgggatcttgcctacatcatacatctaggttttggcatcatacacctattaagaggataaaatgaatacaagatatggaaacayggtactaacaatggctgaaaatatgattcatctccgtttatcttcaggaacctatggactgtcatgccagcataatccactgattatcaatgtgacccatcaccagaatgtccttttccaccataccacctcagtgctgctgaatttctcatccccacgggtcggcatctcagctgtggctctaaggacatcctcccgcattggtctttcggctcccagtaactgcatctcagaggacgaggggcagaatcatcagggacagaggtacaaacttccctttctttcttttgtttccttttcttgtggctctaatgattggctcacatttacatagtgttatgtatagagtgtttgctcaatcactaactgaaaaatgaatttaggaactactaaaaagacataggaagcaagcaaagaataatttgtggaaggcatacttgggttttatattttgttcttctttccttagctgaccataatttttatgtaaatatttaatgtctttacaaggtcttaacatcttttttacatataaaaccaccaacttcaaatcaacattgttatataaactgccaaaaattctctgccaaaaactcaatgttccttaagcaatgtatatttttccacttctttccacctggacagtgtatatagcaagtttaacaattgcttgctagggtgtgtcatataatcatttagaattatatgtggaaataggaaatgcattagctacatatgtctttctgtggatgtctgtgattgtcatcctctagacagatgtggctatgaggttcactagcatctcagcagcagctattggagggattgtactcacagtgttggtgtgcccaaggttaggggaaggagcctcccaaacacaataatctattctgcatttgggctagaatcactctatgcatggtctaatcaattgagtgggactacaggtgacagggttcattcctcagcaagggaggtgagatcgcttacttgttactaggtgattatgatcctagtgacaaaagctggggttccaagaagtgctccatcaccaaaaagaaattctggtgccacaaagctcattcaaggcatcccagatactcagacctcacagggatgggagtagagagtactggtgtactatgttagttatctattgctgtatagcaaattataccaaaagtcaatggctgaacaccataaacattatctcacagtttctgagggtgaggaatctggatacagcttcgccaggtatctctggcttaagatctcttatgaggttgtagtcaggctgttggccaaggctgtagttactcaaacctcaagcagagctggagaattcacttccaagctcactcctgtggctactatcaggcctcagaagatccayatccaagctcactcataagtgctggcagtgagcatgctcacatagaagtgctcaattccttgccaagcaggcctctccgcagctatctgagtgtctttgtgacatggcagccagtgatccaagacagaaagagagccagagacggtgaacacgtgagagactacccaagaaggaagccacagtctttttataacataatattggaagtgatagtccattacttctggcatattctattcattagaaatgagtcagtaagttcagtccatacccaaggggaggggttggcataggggcatgaatctctgggggccagtaatagtagtttatgttaactgagcattaactacatgccaggtattgttctaagtgttagaaagggagaaacagtaaggggtaatgaatgtcataaggttaactagttcatctgcaactttaaagtcttctttcttagtgaacaaatgcctccaaatattaacacaagaatgtagactattaaaataacatttattagaattatggcctctctctcatatattttcaaattatattctctactggctctacctctggccttaagccatacagcatttctttcaggtccctgaaacatgtgttcttggtgagctttgcacatagttcctactctggtgactgccttctaatctttcttcacttcaactcatactctaccatcaagattcaccttctgtgaagttttggcaaacggattcctccctgttcccataggacatactgcataatgcaaactctgcaaaagcagctgtcacattgggtgataactatttatttacttgttgttctttctcattaaactctgagcttcctgtagtggataattctgctcagtatctctgaatatctacagaaggcctagcacatagtaggtatgagaaactgttttggatgacagttgccgactttatctctaaatgctccatgaacagaactgaacaagaaaaaaaaaaagtagaagttacagcctttctagacatgaggaacaagaattccccttacaatcatagctgtgaagtytcaacaaagaagttgattaattgtaattactgccgctagttcttcacttcttctcatgtggcactgtgggaaaaacaagtttcatatgcatgcatgcaaaccaggagaaataggatatgattctccagtttacactgtgtatctggaatgcataagcatttccaaaccacatgtgactgacaggagccatgcaaattgacttttccttgtcagccagcaaatcagtacaatgtagtaaattttgatataccgggagcctggtaaatcccatatactttaattgtgaatataactgaaacctaaatccctatgtattctcaaagagtcaaagtgtttttgcagcctgtgtctgtcacagttgtatatgtagaggcaccacgatataaaaccctcaaattctgggcatagtgagagggattcctggctacctccttcttaccccttatgacctgaattccactgatacttacatgggcaggggagagctgacagatgcctgccagtagaatatgtgttatccattttgtatttaaacattaatgaccagtggcccatccctcctgcaacactacactttaaaaccaacctgattggcccacagaatctcagatgaaagccagtaaacctaagtcagcctctccagtgatgttcatgatctttgtcttggacaaagtaatttctccttgcttcccacttagctactaacaacacagaatacgaaaactcttatcaaaatgaaaaagcaagcctggcagccagaatctgtgaggatttcctcctgattacaaatgtactggggttaaattgagaaacataattggaaatcaaagcatgcacggtttttattttctggaaaaaaaatgcatttaaagaatagagccatactaaaagaggagagggaaacaggttattctttcttcattccctggktcctttaacttggttctgtctcagtcttgtttctcactctgttatgatgactacccagtttatgaccctttgagcttattctactgatcatgaaccctttagtcttgaaaaccaagtttagttttcctgattttggccaccagtgctcaagaagagcttaattcattcttaccctccagttgtttccagctctggccactttagggataggttctgcacaacttgccacagtatcaggatcaggcaaacctccaaccatcccaggattgtgttgatggctttgggaagtggaaactatctattttattaatgtaatgggatttgcagtgtgtctaaaatataacccagacaccaatatgttaacatacctaagtgagtgaattagtttacagacaaacaggactctttctactttgggaatttacaaggtcaagatagaaaagtttaacagcaggcaagaattgctgatgggcatgtggtttctcctatcgaattttgttcttccaatcacatggataaaatgaaaaaattgattgtaacttctgtgacttacctgataatatatccataagatctatgagtgctgaatcttcaaaagatacagaacattatctccttttccaggacatggattgatgaccataattgaaacttttgactactctactcatctctttacagcatttacactttttcttcaatctgcatagatttcccagtctacctggttgagaatgtggtgtcaaccttttatgcaattgtgcttctttcatttttcccttgtattccaaacagtttttgatttatataawttgatattagatagttaagtatataattttttgtgagccttttatctttattaggatcatacatcttgccaatccttttacccctttaaatgcctgtggctttgtattctactctttctggaattaaaatgtctatccctgccttccttttgtttgtatttgtttgataaatatttgcctttcttttatttttaacctttctctgtctttgctgccagtgagccccaggcacatagcttcactgcactgtttacaaagctttcagattttgccatgtccaactactccaagattttattccaaaagtttatcccatgatcctcaaacctctaggattctttaggactcagtagsattttacctttaggacatatatctcccaatatataacggcttttgccactggttccacaccccaccctacctcactaagacctctatacttcctaacctgaagtctgaaatgagtaaagaaaaggtagtactgatgggaataatgactggagaacagatctctgacccatgaaaaacagggcccagttttctcgtctttacaggggccaggaaatgaagaaagaatgatctgtttttttcttttagtttggcttcattactattctctctttttcaggaaacaaaaagtacatgctttggtttccaatgatgtttctcaatttaactccaatatttttttcaatcaagagaaaatccttacagattttggttgccaatcttggtttttggtattgataataattttcatatatttctatattgttagtatttaaatgggaagccaagagaaatgaccttatagtattcttgtgagattgactgaaaataatacatgtgagatttgtaacaccttctaataccaggttggagtaccacctgtggcaattttcacagtattccccatctttattttttgccaatcaggtgtgctagttatcagtcaatttgtttgttgcctcttggttccaaatccaccctcatcacatgtattgtaatagtagagctggatttttatcactatttatcctttgccaacgggtatcatgttacacatcatcagtagagggtgctagatagacaatgcaggaggaggggttttctctgctgtttctggtgtaatttcttctcttctgttgctgtgacatgcttggccagtggtgtgcagcacacctatagtcaaatacagcagacattttttcagttggctcttcatcacaataaaccaaacatggcagcttgagaaatagtgatgctgctggatgccgtggattactagcatcccatatcccaatgattgtactcaagaccaaaggcacaatcaaacttgtccccaaatcccatccttgtgaatctgtcttgtactattaaccccagtaccatcccatcttagttgggatccaataaggacacagtaattaaaatagagaagtttcataaaagtaattattaaccagtaatggaattaactactaaagggcagggagaactctaacaaataaaagaatgattgataaagggagcaaccattacttttatgagtgatagaagagtatccaagaaaggaacaaatgtggaagaggctcccaacccaaagctgaggttcagatctcactggaggaggtgcagctgtggaacattgtgtggcagagaagtttgtggaggttctacagaatggaatggggctggtagtcagaaaatgctcactggggtgcaggtaaaagctcatgaagaagctgcctctggaacacaattgggacttctggaaagctgtcactgtggtgctgctggaactttctgggagtctccccactgggcactaatgaaacttgatgggagacatccacaggggtgccactgagacttgttgagaagccagctaagatgctgataagacttgctgggacatgtggagtgtccctgaaactcactaggtggtgagcaccactggttgtcccacacatggctggagaagcaaggacgggaaagcacataggaatgaaggcaagcctcttcatcctgcaatgtctctccagtgccatctactgaagaaaaaagtgacatgctagctggtaaagagaaatgttttcatggtccagctctagtatcataaagcagggcaatgaagggtggatttggaactgagaggcaataagttgataaccagcagagaaagtcttgtcaaataaccaagaggaaacctctgttctctgtgtctttcgtgttccacacaggagttccttcctggcttcaatactgtttttctttttctttttttcttttttttagagacaggagtgtcgctctgttgcccaggctggagtgcagtggctcgatcttggctcactgaaagctctgcctcccgggttcacaccattctcctgcctcagcctcccaagtagcagggactacaggcgaatactattttaaaatataatttctgaatagatttgagctaattagaaattcatatttttttaatgttttgaacttaagcaaagaccaacataaagtataaataccttattagtttattcagtataaatacacattctgattgagatggaaaacaagtaatagatactcacaaatgtaaaatcatagtgggttctaaggtttgccttgaactataacttatcaaagccaggtgttctaatataaaattgaataagatattaatcttttaaaataaatatccatatggaaactggggttcttctctcgcttgttctcactctcattatatgtgtagtgtgtgtgtttgcatgtgtgtattcatgtgcgtttgtgtatagaaagagatagactgttgttcaaaaaccatttaagtgactcaatggaacaggmataatttttcagctgaggaaactgagactcaagggcacaaatttactttatttgggattagcaaaagtaagactggaatccaagtaacttgtttctgggaaggaaagcttctattatataaatggtgaactatttcagaaatcgattcatgtctactactcttcaagaaatcctgccaccctctctcaaatcatattttgattcaggtaacaaaagtttaactagccctggaataatcaaataacagctgtattttacatctacttatgtgaacgggcatatttgttttgaggaaatgatgacttgtaaattcaggctccaagtaatacaggcaagctggggaaacctgatgaagtaggttaccaaggggaaaattgtaaagatactttggacttttgggaaagtgtaggaaatatgcaattcagattagggcaattttatgggcacaacccagaggatttgaagacaatagaaaaagagaagttttgacccagctcctatggggtcctagcccagaccaaaaaaataaaaaaataaaaatcttgtttcttagagaagaaaaaaaatctgaggaaacatattctactctctctgagattaaagtgcatctaacccaggaaaagaaacataattttgaaagcctggcttatgtgtgtattagttttctaatgttgtataataatattactataaatatagcatcttacaacaatgcttatttataatcttacagtttctgagggtcaggattctaggcaacgcttagctgggtcatctgtaaggctataatgaggtgtcagttaggaatgtgttctcgtttgaaggcttgactggggaaggtccacttccaagttcacatggttgttggtatttggttccaaaagactgtcagactgagggcttcagtttttatgctggatgttgcacagaaaccacccttacttccttgccacatagtctgctccattgggaagctcacctatggtagcttgtttcttcaaagccaacaagacaaagagtctctcagcaagtaaattttacaatcttttgtaacataatcacaagtgttacagcttgtcaactttgtattcaattgattagaagcatgtcacttgtcccacccacactcaagttgtggagattatgcaagggtagggatttcaaaaggcagggattattttcaccacaatagtttagcctgagataggcgaatgtatgcagtaaccttggagttatccaactacatgtgtctcatatcctgaaagagccacatgctataatggtttcaacttactagacagcttagggcagaagggatacacaaataacttgcttgcaggaaaaaagcatgaaggaaaagtagtgattccaagagtaaggtcttttcatagaaattccccagctcttggtaggtggattatccaagcagttctctaccagagaatgtccttgcaactctcttttatctagaaaaagcacatctattttatgaatgatacctgtccagattttttccccttattctttagtctgcttcagagccatcttcttcatggctcaactggtatttttataatatcatcaaaatgaaatttaatcagtaatattaatgtgtttcctagaaaataaaattacagtcatgtaccacattacatttgtctcaatgaaagactgtatatataataatgatttcataagattataatacagtattttttgctgtaccttttctatgtttagatttgtttaaatacacaaacacatcattgtgttataattgcctacagtatttggtacagtaataacatgctgtacaggtttgtagcctacgagcagtaggctacaccatatagcctatgtgtgtactaggctatatcatataggtttgtgtaagtacactctttgatatttgcacaataaaatcacctaacaacacatttctcagaatgtatcccaatgttaagtgacacatgactgtatataaaaacacaaaaattaaaaagttatggttactgtttcaattatctttgttctgattatttttataaagatggataattgagagttagcagttttgatccagtatctatcatacacatatttgaccacattggtggtcatacacatacaccaatgtggtcatatatctgtatgaatatatgtgtgtgtgtatgtatgtgtgtgtttgtgaatatgtttcactttatacaagacagtcgaaaaaggttaatgtgatatgcattgaattataaaaccaatttgtaaaataatttaaatgtttaagtggttgtgccatttaaaagagcattgttgttttatttttaaggtctttattcttttagagcagttgtaggttcacagaaaaattgaaaggaaggtacagagatttcccatacacccaatgatcccacccatgcctagccactcctgctatcaacatcccccaccagagtggtacatttgttacaactgatgaacctacgttgacacatcataatcacatcaaatctgtagtttacattagaattcactctcagtgtttgttgtacattctatgtgcttgggcaaatgtgtaatgatacatcattacagtatcacacacagcattgtcactgccctaaaaatcctctgtgttctgcctattcaccaccataccctacatccctgctgtcccaaacttctcacaaccattaatatttttaccatctccatcattttgccttttccataatgtcatattctggaaatgtcatatagttggaattacacagtgtgtagggtttgcagattagcttctttcacattgttatatgcatttaagtttccttcatgtcttctcatggcttgatagctcatttctttttatcattcaataatattccattatgtgaatgtacaaccgtttatttatccatatacctattgaaggacatcttggtttcttccaagttttggcaattatgaataaagctgctataaatatccacatgcaggcttttctatagacataaatttttaaatgtctttgaataaataccaaggaatgtgattgctggatcatatggttaagaggatatttagttttatatgaagatacattgtttttcaagaaaaacataaatattgttgtaaagaacaatggcatcctcagatctttttcctcttctccttctttccttttttcttttcatcataaatctttatttttctatttacttaaataaaactaagcctgtactcttgaacatgtagattaagagtaccaaccctgtacagtaaaaaaaaatgcatataatttttgacctcccaaaaacttaactattaatagcctactgatgcctgaaagtcttactgataacataaacaattgtccaggcgcggtggctcacacctgtaattccagcacttgggaggccaaggcaggagaatcgcctgagttcaggagtttgagaccaggctggccaacatggtgaaaccctatctctactaaaaatacataaattagcctggtgtgctggtgggcactggtaatcccagctacttgggaggctgaggcaggagaattgcttgaacccgggatgcggaggttgcagtgaaccgagatcgcaccactgcactccagcctgggtgacagagcaagactctgtctcaaaaatcaaaacaaaacaaagtgacaacaacaacaacaacaacaaacaattagcacgtatttgatatattaaatgtattatatactgtattcttacaaaaataatagtaagctagagaaaggaaaatcttattgagaaaattgaggaagagaaaatacatttacaatttattgagtggaaatggatcattataaaacatataaaatttgagtcaaggaaaaataatgagttcacgcattgtgttattatatggtcctatatgcaaagcaaaaatccttgaactgagaatttaccttttgcattaaaaacatttaccattgtcctgaatggtaatgcctaggttttcttctagggtttttatggttttaggtctaacgtttaaatctttaatccatcttgaattgatttttgtataaggtgtaaggaagggatccagtttcagctttctacatatggctagccagttttcccagcaccatttgttaaatagggaatcctttccccattgcttgtttttctcaggtttgtcaaagatcaggtagttgtagatatgcggcattatttctgagggctctgttctgttccattgatctatatctctgttttggtaccagtaccatgctgttttggttactgtagccttgtagtatagtttgaagtcaggacataggcgtgggcaaggacttcatgtccaaaacaccaaaagcaatggcaacaaaagccaaaattgacaaatgggatctaattaaactaaagagcttctgcacagcaaaagaaactaccatcagagtgaacaggcaacctacaacatgggagaaaattttcgcaacctactcatctgacaaagggctaatatccagaatctacaatgaactcaaacaaatttacaagaaaaaaacaaacaaccccatcaaaaartgggcgaaggacatgaacagacacttcccaaaagaagacatttatgcagccaaaaaacacatgaagaaatgctcatcatcactggccatcagagaaatgcaaatcaaaaccactatgagatatcatctcacaccagttagaatggcaatcattaaaaagtcaggaaacaacaggtgctggagaggatgtggagaaataggaacacttttacactgttggtgggactgtaaactagttcaaccattgtggaagtcagtgtggcgattcctcagggatctagaactagaaataccatttgacccagccatcccattactgggtatatacccaaaggactataaatcatgctgctctaaagacacatgcacacgtatgtttattgcggcactattcacaatagcaaagacttggaaccaacccaaatgtccaacaatgatagactggattaagaaaatgtggcacatatacaccatggaatactatgcagccataaaaaatgatgagttcatgtcctttgtagggacatggatgaaattggaaaccatcattctcagtaaactatcgcaagaacaaaaaatcaaacaccgcatattctcactcataggtgggaattgaacaatgagatcacatggacacaggaaggggaatatcacactcgggggactgtggtggggtcgggggaggggggagggatagcattgggagatatacctaatgctagatgacacgttagtgggtgcagcgcaccagcatggcacatgtatacatatgtaactaacctgcacaatgtgcacatgtaccctaaaacttagagtataataaaaaaaaaaaaaaaaaaaaaaacatttaccattaggctgttattatgtacatcatttggagtccagcctctagctgttgtatatttatcataaaactgaacatatacatataattaacatacctgccttgctttgctaaccatgcttgtgtaaagaagagtaccaagtaattttcaaaaatgagtaatcagtgaataatgtatatttggtttggcttgcaatgccccagactcacagatagagacctgcaaatttgtgacatgaatactaatttagtcaccttcattgtctctgttaacctctgttcttcagtttactgttccctgaagcagggcctgcaaaaataaataatcctggtagaaaaatcaacaattagtcatccaaatgacacaaattttcccattgcagtttatgaatttgggtaacatgccatgttaatcttatcttcaggttgacttactctggctgcctggactcctcagatcccctccaatgggactgtgtgctagtgacacgaaagatgtctttagccttagaaagctattcttgagaaggtcgatctgctggcagagaaaatgtaatctgaatcattaagtccagtgcaaataatttatgtgttaacctctattgttcatggagaattcactgtagatacggaattataggtgggaagtagagggatgcagtagaaagaaaaggaacttttccatagaacttcacttttatgtcctaatagtccccagagaatttctggaaggaagtggctgtctcatttaggagaggtagactcaggtgtgaaaatgtttcttcttggttacactataggttacaaattgagctggagccagcttacaggacatctgagccccagtcaagggagaggaagccggggcacagctcagtactttgccattccatccctgctgtaatcagtctctgagtctggtcttggtaatagtattatttcatctctattatctgtcatgctgcttcatgctttatttttccctggaaccctcatctgctgctttacggattcctattgtgcttcaattatttggagctcagatttgaaatgccaactcttttccctcctcttccacctggattgggttccaaacctttccagccttcttcttcctctgctcagtcctatgtagaacgtttggattacttcccttttgatagcctcaagatgtgaaggctcctccttttttttttttttttttttttttttggcttagggagtgcattttaaagcatttattttttgactcctcatctattatttttatcataaggtttccttttaatgttcctgagtgatgggaaatgttctctcttgctgctgggaaaggcactatagaaatgaaatatgtattgcctttctactcatctgattatctgcctcctcaaagtagtttaacaaattaacattgagtctcttattttctacacagtttcttttaagcaaggaaagaattatagctgttcaactgctcccttgctttcttgcccaacttccttttcccataatgatttgtccataaaataagaaggaagaaggaaaacccactagagaggattctgattcccctggcagatgatggatggctggctgtatgacaagtcagctttgggcggcacagtgagctatttgagccttttcaactgttttttttttttttttctttcaactcatgaggttatagaggaaaaatgaagaggccatggacatggtcttttgggtgggcttaatgaagtatggctaagacaattccagaatagcctttattgaaacattactttgtctgagattgttcttagtgggatacattctgagaactagctgggtggaagcttttggtcaaaagctaggaacaggtgaaaccagcttaggaagacttagggttgaggtccacccccaaggaatagactgattttaaaacaactcctccctagtgacttatcatagttcctgaaattccatcattaagaattattttctttaagtctcaacaatctccagagtctcagcaatctccagaggcctctttaaaatagtaaataactatatactagaagtaaaagtgttttaagtctttaccaactatttataccagaagtattctcttatggattttgataattcaaaaataagccccatggccctgctgaaatttataccagaagtattctcttatggattttgataattcaaaaataagccccatggccctgctgaaatgtaacctagtatagccatttagaagttttagggaacaagagaagtagaaaaagtagtattgaaaagagggatgaattaaaaatgtcacctacttcccaattttgctcagagctggccctgtcagtatagtctgtattcatggcagctggtggagagagcacagaaaataaaaggaaaccagtagtatttccaaggttctgtcattttgccagcctgccaaggaggcagatgctgtagacagatttgaccrtaagctctggttgaaatgactctcaggccgtgtctggttttgtgtgcaaccatagcactgcaggcagaggaagtctggagattgaagtggcagcaaacccaatgcccagacccctgcttctcacttttgtctacatcatttagtctcacagcatgattttagcacagtctcttcccttcctcaacccttgatttctccataagcaaatgagccatcagtgttgcaaggctccagtaggctaggaagagcaaaagaactgaagacaataatattccaaatctgatatcaacaaaggactgacaaactctaggattagaagatgacagagtcaacatgaagcttctgttggggagtctagaaatttacaaggaaaataaaccaaggagaagtagggagaggtagagtcccaaaggggccccacaggtgttttatgttcttacttctgcatgtgaatttgggagccattcaaggagctggattgtaaatccttaagacttccatttagccgtagcttatgtatagcccacagagcagccaggctaccctgtcttcatgccctgtagatactgttctaggagtgacacagtctgaagctcatgcccattaaacttcatcacggggctgtattgttctcacctaactcttcatgtttcacaatttcccaagctcaggctatgaatgtagttggggaagtgtcattccctagtgaatagcttaatttgtgtccaggaataaataatagagagagagtcagcagtgcagtcccttggagggtaccagtgatcattgctctttaggaagtgccccacaaggagatggctactgcctttgcaaatcatgtgtgttgggaggagaaaagcatttagagttgacgcttgaacagcacatggattaggggcactgacctctgtacagtcaaaaatttgcctataatttttgacctccccaaaatttaactactgaaagcctgctgttgactggaagcattaccaataacataaagtccattaacacatatttgatatatcaaacatattacatactctattcttataatattgtaagctagagaaaaaatgttattaggaaaattatgaggaagacaaaatatatttacaaattattattattattattgagacagagtttcgctcttgttgcccaggttggagtgcagcacaatctcggctcactgcaatgtccatctcccgggttcaagcgattctcctgcctcagtctcccaagtagctaggattacaggcatgtgccatcacgcccagctaattttgtagtttagtacatggggtttcaccatgttggccaggctggtctcgaactcctgacctcaagtgatccacccacctcagcctcccaaagtgttggaattacaggcgtgagccactatgcctggccatatttacagtttattaagtggaagtgtatcatcataaagatcttcatcctcattgtcttcatgttgaataggttgaggaggaggaagaataggaggggctggttctgctgtctcaaggttgggagaggtggaagaaaatatgtatgtaggcggactggcaaagttcagactcatgttgttcaaggatcagctaatatatacatatctttttgtcgtttcaaataaatgattctgcttcccagggcaagtgctaggaagcacattaactgtatattagtctgcaattgaattgcttttgttctttctttggtattccagagattttataatctatgttaaaatcatgggttctgaaacttggtgagacagggcttttgaaagagagcacttttggctgtgtaatgtaaatctgtttctcttcagaaagacaggggccctgtagataagactcttattattattattattatcatactttaagttctagggtacatgtgcacaatgtgcaggtttgttacataggtatacatgtgccatgttggtttgccgcacccatcaactcatcacttacattaggtatttctcctaacactatgcctcccccagccccgccgccaaaaggccccggtgtgtgatgttcccctctctgtgtccatgtgttctcattgttcgactcccacttatgagtgagaacatgcagtgtttggttttctgtccttgtggtattttgctgagaatgatggtttccagcttcatccatgcccctgcaaaggacatgaactcatccttttttgtggctgcatagtattccatggtgtatatgtgccacattttcttatccagtctattactgatggacgtttgggttggttccaagtctttgctattgtgaatagtgccgcaataaacatacgtgtgcacgtgtctttatagtagcatgatttataatcctttgggtatatactcagtagtgggattgctgggtcaaatggtatttctagttctagatccttgaggaatcatcacactgtcttccacaatggttaaactaatttccactcctaccaacagtgtaaaagcgttcttatttctccacatcctctccagcatctgttctttcctgactttttaatgatcaccattctaactggcgtgagatggtatctcattgtggttttgatttgcatttctctgatgaccagtgatgatgagcattttttcatatgtctgttggctgcataaatgtcttcttttgagaggtgtctcttcatatcctttgcctacgttttgatgggcttgtttttttcttgtaaatttgtttaagttctttgtagattctggatattagacctttgtcagatgggtagattgcaaaaacttgcttccattctgtaggttgcctgttcactctgatggtagtttcttttgctgtgcagaagctctttagtttaattagagcccatttgtcaattttggcttttgttgccattgcttttggtgttttagtcatgaagtccttgcccatgcttatgtcctgagtggtattgcctaggttttcttctagggtttttatggttttaggtcttacatttaggtctttaatccatctacagacaaccatggtaaaacccatacccagaatcaaaaataagtgaagcaatttgcccagcactaggacccccaagtctagttctgaacttacaaataggtcgcattctaggaagagatggacacatcctgacagatctattttgaggacccaaactctgtgctgagacttaaataaaggagcagagaaacttccactttcccagggtaggaatggaaggataagtcagtttggcgtgataattcaacatttttctatcatgcgaaggaagaatccgaattactgctgagattcttctgtttccctcagatgagaatctttagaggagaagaacttgaattaattttattttcccagttagtagggttctcaacacctcaaagtaccagcattggtcctcccaagaaggaaatatatttaacatttaacctggttcctgtcctacaaagcagagatgaatccagaagtgaggaggaagcagaatggggagtcagaatcaagactttttttctctattagtttggataaatagcaaagctatctaaggatgaatgctgttattgttgttaatggtttgcatttggtggtgggaaaattaaatgaggactctgtctcatccagtccactctacattctgtacatcctactcctatctgctgccaaattcagagcatgcattccttcttagcccataccctcttatttgcataagaatcaatacaatgaagtgaaacagtagagaaaaattggatcctcttttactacttaaccttaaaagagctgtttctagaaagacctctgggactgctatttagtcaagggtggcacttcttggataaatgaattgcaatattttgtttaactgaacaactgaaaagttgggacattacgctaaaaaaatatactgagcaagaaagattatgagaaactctttcttgagttctctaccacatcctgcctgttcatgggttttctgcactcccaccccaataccaccatcacctcatctgtgaaactcaataccatgttaaagctggaagggccctttgatagaagtcagttcaaccccatcattttactaatttgcagatggaaggccaagatggttaagagacttgcccaaggtcctagaggccagcaggggcaagccaagaccagaacccaagtcatgtggccttggtctactactttcttcatcacattgtattgtttcttgaaaagtgtagtacagatgccagtttctcttaagcaaagctatacgctasataaaagttgtgatcagacttttatgaatgcctgggggagggtgggatactgactttagagaagtttatgagctgatgtcaccctgattttaagtctgagctaaagctcaattaagtgcttctttgttattatattacaatcttagtattgtaggaagttctgaaatatcccatcatttcttttgggctaacttttctcatttaatacaagaaatttgagttgaattatctttcagatctgtttctgttttaatgagctctggttcctctaaaattgttgttaaatgcccaccgttccccacctccatcaccatcaggaaatggagtttttaatctttcacgcactcttacataggaaaaaaaattattttagtactgattctgaccgactctgaagtattgttatagccttctggagttctttcagggtggctcagaacctcagggaaaccttgaaccaaagcttcagggcagctgtaggcagaataacaggactttgcctgtttgctaggaactactgagctccccgaatatggacctgtattggaagctatgccaatrtccctgcgatagcctcaaaaagtggacaactaaaagaggtgcctggtttggcattctctgggggacagttcatggaaagtttattgatggggctggccactctatctgcaaataatgatgtcttttttctggtgtctaccttaccctgttcctcactaaccattgaaagatgcaggaagactttgggaacctgcccctaagtctgaacctacccctaagtctgttttcagatgtaaaggttgacacctttcagtatagaattatctaaagttgttagtcaagatttaagagatctgcacacactgaatttttttcagttcacggtgataggggaaatggtatttttatccatgttttgagatttctatttttcctttgttctgtctgtaaagaattgaagaaaactttccaggacatctcttgcctttccaaattctattttcattaaagtcaaatcaaattcaataataaaactttttcagaaatagccatgaatttataatcagtaacacatgatttaattgtttttttctctttagctgtattcaaagtttcttcagaaaaggggatatgttttatgcttttsatctaccttgtggcttctttttgataatttgagtttaatatagtaaaacataatgatgaagcagtggggccaatgtctccttctggagtcagtcttggcctatagaatttattgacatatctttcaggttacatatatctagatctttatggggtggagctttactcctagtgagtatcaacactttgaaacttataaacatcaaatgctggaatcccactgcaggcctatggaatcaaaattttcaggggataaagcaggagtatatgttttttaaaaagcttcctaagtgagtctaatgcacagctatggtaaagcctgccttatggaataagagggccactcttagaggcttcccaagtacagttatcattcacatacacaaccaacaagggaaaaacacacatcattattgcagggcattgctaggattgtgcccgggtgcccacaggcaggttctgtacaagaggacaatagccaagggttaacatacattttgaacaaaaattcctcaatcaaaagcatggtttttttgtttttgttttttttgtttgtttgtttttgagacagagtcttgctctgtcacccaggctggagtgcagtggagcaatctcggctcactgcaagctctacctcctgggttcatgccattctcctgtctcagcctcccgggtagctgggactacaggcgcctgccaccatgcctagctaattttttgtatttttagtagagatggggtttcaccgtgttagccaggatgatctcgatctcctgacctcgtgatccgcccgcctcggcctcccaaagtgctggtattacagatatgagccaccgcacccggccaaaaacatgttttaaaacattgcaacacaatgacattggaagtgaagaccagcagaaagagagtagaggcttatcagagcggagagacaaagagcaaatctagggttatgtgtaggtggccatctacatagtatgatttctaagaacttgttgacttaaacctcccttgtgaaaaactcaatcctttggcttaaaacactgactcttgttaaaatggaaatacctatgaatcatatctgacaaggtacatcatattcttacctgagaacacgttgtaatggggtggggaaagagctggaaacatagatggaaagagagagggtattgccaaaagaggatgcacactgggcaggacatcgtgcagacagcagcagctggacaaatatcatcactttgatttactgctatttaaaagagaactgctcaaaactattggactattagatatgctatgtttttcccttgcctaccctgctgaggagctccttggctcactctggcctctgctgctagctcctgaattgggaagaaagcaacaggaaagcaacctcatcccgtgggagatggcccggtggtctaggctggccctgagagtgagggctctgagatccagcctgaggattttcctctgacttgctgtgtggcctccagccagtctccaaacagctttagttttcttgtatgtcaaaccaagataaatacctaacttcccacttctctggggcattgtaaggcttcacttctgccactttcagtaaggtttgtccaaagatcataagaagaaagcttttgagaacttttaagatgaattacttttactacttatgtagtattaggtagaaaggagaatgtaccgggagggtgggataatggagaacacaacaatctcactcagagaagcagtgtttgtagtggaagagaaacacaaaaggggttttggggttggggtgcaagggagagaagtctacaattggtaccagatgccatcagaagctaacgacctgacaaactctgtcctcataaaacaaattccttaaaaaggaagcaaatggaaatataagctagtgaaagaatttgcagcagctgccctaaaaccatttctcacttcataaacaggtctgggtttggtcctttttttttttttttcgtgttggtcttatttcatgccacttttccctctcatattctcccctgtctcattcttcctcccttgcttctcctgctggatggacttctcacactggcagtcataacaatagtagttcccattttgatggagggaggctcattcagagcatttgttttgtgtcttgtctcaacatgtatttgtcctcaatgatggcatggattaattggacgaagtcactcaaaaacagcacttgctcttttcaccctgacttctttccaataaactaatgtggaccagagtattaatgactctctgtttcccagtacttcctgtttagcatgctgaagaagagattatgtttgggacatccatggcatgtggcatctagagaactaggagttctttagaatcactaatgaagcatcttgatcacatttcataaaggatggtcagattttagcttccttatcagatagattaaatacatatttggagacaaaaattcatttcctacattgcatatcagcattgaatttggggaattcatgctgactcattaacaacccccaccttatatatttcttccttcatcaggtctcataatggatacttcatcatctcaggaaataaccagggcttaaacttgtgaaaacattttcttcacaccgatcacctccagttcttccaacttatacataataaacatagataaaagaaatgagagtatcactgacatatgatttaaatcccaagggcataagagcagggtcagcaactttagcatatttagtctgaattcacccttttggggctagtgctttttaagtcaagtctcaattatttcaaggtagtatgtgcatattcaatgatatttattttctactttcttatattgttgcccagatctttgataaagtagttgaccactaacacaattcagggacaaacagagcacactactgatgacaagattcatagtagtcatatctttgggctaataattagcaccaagggcaacaacatcaagagcaagaaaatatcttgctagtcttccatactagactatgtattccctaagagcatggttcttataccactggtactcagatcgaggccttcctaacagtaagtgctcagtaaatgcttattaatgaatggtggagcaagatggttgaatcagtgtttaatgatattttcatatttcacatccccatttgtcattataaaatttaacaaatttctcactttgatagctatggactgactttgctctctataacatgaacaatcgtaacttagcaaatttttattgtgtcaactacagcaagtcatgcgttgaatataaagtgggtaagagtcagtyttcctcttcagagtgtccataatctagttggaacattgagcatttaagagacactcagatactaattaccttgtgaataaaaggataaataagttaattcactgattaaagaatgagaaaatgcatacacaactataacagaagataaagcaaaagaaatttagaagggagttattttttaaatttcactgggaagttcaaaggaagagggcatctgaagggacttctttgagaaggagagtgtcttagctcaatttgtgttgctataactgaatgcctgatactgggtaatttataaagaaaagagattcacttagctcatggttctatagtctgggaagtgcaagaagcatgacgctggtgtatgctcggctttcttgctgtgtcatacatggcagaagcaaacacatgcaaaggtgcaaaacttgagaggcaccctgactttataacaatccactctcatgggaactaacctattacagtgagaactaattcagtcactaccacaagaacagcactaagccattcatgagggatccaccctcatgacccaaacaccttccactaggccccacctaccaatactgccacattgggaatgaaatttcaacatgagttttttggggacaaaccatatccaaaccatagcagaaggccttttagaaatctcaacaaattgagcaaaggtacacaaatgggagaacaaaaaagtggggtgacaaacagcaaacagaccagtgaggccttttgcagtgcttcatgcagtagaggaataacaactctgtgaggttgccataattatccccgtcttataggggaaggagttgaaacacttgggaatgaataactcaatccaaatcgcacagatgttaaatgatgggtccaggattcaattccagagagcctgaggctaatgccctaattattaacctctatggttctgccatggcaagagggtgacactcattttgctccagtgtattcttttttttttttttttttgagacggagtctcgctctgtcgctcaggctggagtgcagtggcgagatctgggctcactgcaagctccgcctcccgggttcacgccattctcctgcctcagcctccctagtagctgggactacaggtgcctgcaaccacatccggctaattgtttgtatttttagtagagatggggtttcaccgtgttagccaggacagtctctatctcctgacctcgtgatccgcccgccttggcctcccaaagcgctgggattatgggcgtgagccaccgcatccggcctgctccagtgtattcttgctgctgttatgatccaggctgagtctagattggccctggcaatccaagcagcagttctctgctgagaggatgtctgtggaagcatctagcataagttaggcatgggacatggattcaagaggtgtgaatttcctcttccagtaatcggttcaatttctgctcagtctgtgctaatattcagtggtatgtactgctatggctttagcagttgtgaaaatatttccataccaatcggttaattggtgttgcctttctgtcaccttagaaacctaggcccttcagacatggccttctgtgtcaccttgtgatcaaacatttgaaagattcatgcctgacataatgaggggcctccaggattcactcctgagctttgtcctggatttgttctaattgcttgggacccaacagtactggttgttaaatattttgagtgtcatcccatgatctattcatttctgagccacacagaactctcagaatctgttctccacctcatttcatcaccatttgatcctcctggaagaaagagccatagaaagtcaactaactgttacttgttagctgttagtttttatgtctattatgctgcatggtgttgggtagtagagaaaaaaggtgatgagttaaatatcagttttggagaaaattgttctctctggtttaggagccctcccagatggagctgcaaagtcattgctcctccttaytggttctcarccagtcctaagatggttctatttctcttatcccagctgtatccatcggccctgtgggaagcaggacagctgtccgtcattgctgcttgatcatgctgatgtggtgaactgtacctctataggcccaggtctcatgaagtgtgctatcacttgtcaaaggggatttgcccttcaggccagcagtgggcagtacatcaggcccatgcaggtgagttgaaagaacactatcaccaggaccaagttcctgggaaggggaggtattcacactcttctctctggctccacagggaaagagcagatgtttttaaaccatttgaaagcaaaacatgggggctctaacaagcagagagaatgatggcttaatagaaatgcaaggtatataaaagcatgtacagtgctgattaagtgggttggtgggcagtaaagggcaatgcttattctgttcttctcccttgtttatttctgtcagaaattattttccctccttttgcctttaagatgagaatgccaaagttcagacttgtctgtaattttcaggaaagactggttgtaatcagcatgtctgtggttcacaatgtccaccccacaacaaccctccaacaaaaagactgaagaaatagaacccgattttctccccagaagcattaaagctgttactgaggcagagattctgtcatgattctcactctggccaaattttccaaatttctacaagctccatttcaaatttctacagcaccattttcagaatttcaagatggtttggaggtagtagaatatgtagattaacagggtgactcaggagacagatcggaattaaattttggctccactgtatataagatgtgtaactttggattaaaaaataaacaaaagaaattaatctccttaagcttgttttcacattttttaaatgattagaacagaatacttatctgattgagttattatgatggctggaaataatttaaatgcttttagcaaaatgataggtacatagcactctatttgttaaattgtcagtattatgagcatgatcatgtattctcaactaagaattctgttttccatcttgcctttagagagtcttcaattccccacagagaaattttaaacataaaatcagccattagaaaacatgaccatattataagatagaaaaaggatgcaccagggaagagatgatggtgctcgaggaaaaaaacagaaagatgtggtctcataaggaaagagtggacatacaactgttagctagacatcagtgatttacaagagttgattttttttttttgtgccaattgattgcttaacaggttgggaacctgtgggagaattccacttgcttagagatgtcagkatttaaaggtatacactttggcttcagctggcttaggttctgcctagagagaaacagctttaatataccttgaggcaccaacttcttggtctgtgaagctttagccaggaaggcagagcccttattacctgttctttacccatctcaactcaggcaaaggaatgtccactccagaaaagaaataaaaagaatggaaaaaaatgcagggactgaatccactcgtgataggtgaagaaggggagagaagaaaagacaacatgtataatgcattaaaattagaagcaaattcaaaacaaaatggacagtacctaacagagacaggagaagcaccaggcaatagatgcagattttgagaggcattctttttttttgagacggagtctcgctctgtcgcccaggctggagtgcaatggcacgatctcagctcactgcaacctcccaacctccacctcccgggttcaagcgattctcctgcctcagcctcctgagtagctgggactacaggtgcatgccaccacacccagctaatttttgtatttttagtagagacggggtttcaccatgtcagccagaatggtctccatctgctgacctcgtgatccgcccaccttgccctcccaaagtgctgggattacaggtgtgagccactgcccccagccttgagaggcattcatgaggtgatagtggctcattgtagttagagccagacttgcaggctgtgttaagcatgggtatcatctgggctgggagaagggtgggagctcacgctttgccaaccacatggcacagtcagcaacagtgctctccagctgaccaaacgtgctgtcacctcaggctggtcccatgaagaaaattatagaatcctggtcgtgatcacaagacagtggggatatttgctttttgttgacgcaagaaccgaaactaaacagaaaaatgtgtctggctttgaattgggtccttctggcaagcaatggagaaacactgggaagcgggaaggagcagctagccaggagttggtgtcaggggtgacaggtgccttcagcggtcattgtacctgtggctttggtgccactgtgatttcctggcaggatggctggctcagccatagaaactcccctttctatctttgacctttgataatccagtagctagaatgttggctgcacgtttttcaaacaagccataagcttctaggtctccaggtcctgccttgttacattccccccaccctagacaccttcttctcccacctccccctgtactgctgggaagtcctgatcatttttcaaaggccaatcctgtattacctattctgtggaacttctcctacatgctctcctccctggccgaggatggcagttcctcctccagctcctgttataccatcacacaggagcatgcattatacaatatggctttattgttgcatatttgtgttttctttcttcttgatcccagttttctacttctgttttatggttttcagtctttatatggcattctttccaaccattacagaaggggataggatataacaaaccaaaatgtagctctaacatttccttctttactttcttttctgcctttctccctccttttctcctttctattcttcctccttcacatgtttttgaaccgttgtttcaacatgtgatttgcttgcctggtcgatttttagttcccggaggatattttgtttaggacaggacctggccctcttaggtgctcgataaatatctcttgattgaattagtagcagtgtgctgtagggctgccctactgaaatgacaggcactaggaaatggctagaatctctcacatttaaccacaaggtttggaagatgccttgtatgcattaactctcagcaccattctcagtggaggtaattattttcagtagcattatcagctggcttattaataagagtgccagcaggagacagatgacatactcaaaagtgggcaatttgagagaatttaatcaagagaccactcataaatgtgcaggcaggatataggaaaatcacaaggcgatggtgcagtatcccaggtgaagggactcagtcatcacccctaggcctgaaaggtttaccttaggagtgcagaatcacaggaaggagcagaaactgtktagagcaggcttccagaagatgcagccaatctgcagcgacccttgggagagagtggggagaatcagcaccctggcctccctcttctcctctccctctccaggctgctgacactgtgtcctggatctgaatgcaagtacaagtcagaggcatgaaacccactggagtcagtttccctggcccagagcagagtagagaagggtagagaacaggtctggaggagcaactggaaagcagacaacagagctggcctggaggagtcttgccatgtcgtgattctctgacactagcaggcttcttttatcagcatcatactgagtgttgtaagaatgtatattaaaacagtgaggcctgaagagggagaaaggcaaaataatttgtcccgttttaaatgtttagacagataatcaccaagactcttctaaagcctggaaactactctgatacgccttttaatgtgactttgacagaagcaatttctctgtttctagaaggaaattctgctcacatgttcttctgggcactgggaccagaatgtgagctgccttcccgtggactgcggtgttcccgacccgtctttggtgaactatgcaaacttctcctgctcagagggaaccaaatttctgaaacgctgctcaatctcttgtgtcccaccagccaagctgcaaggtattgtctggtcaaccaggaactgtatgcaagttctctgccatccctcgctcttgagggtactttgggactcttttcgttaccccaacacctttcctatttgctccactgtgtcaccatcttctgataactccagaaaagtcccaaaaggcaacaccactctttgtccccaactacttgaaaggatgcactggctcaggttctaatgaatgaaggaatcttagactttcctctatttttatttgacagtgtgtaccccagaggcaagcctactggaatggttgtcctgataatattcataatcaagatacactttattgtgcacattttaaaatttaatatttacagccatcctttgagcaatgtgtgaatttgtccctggctttagtgctggttagagatgaagatggagtggagcctgctctagctgatggcttctcagactttggtgtgcctaacaatgactcaggaggcttgctataattgcagattcctgaacctttctccaagagattcttgcttagtgagtctggggtgagataatgatgttatggtgaatagtccatggactgcattcggagaaaccatgaattgtactaaggcatatggtatagtgtttaaatacagaactcttcatccaaactgcctctgttcaaaccgtgattctgccccttactagttcgggcaagttaccgatccccaatttcctgatctgcataataggggataataataggatctatttcatagggttgtttgaggtttgaaatttacacacgttaatacatgtaaaatgcttagaatagtgcctgccatataataagcactataaaagtgtcatctactattattttaatgcyttctatgataacatcactgctatatttttattatatgtaggtaggaaaagaagtaatgatttagttggtagcccttctttcatttgggtcaagaaagatttatctgacctctgttttatgtaagagcatcacactggatgctctgtaagtaaaaagatgtaggactaacatttgatgtgggatttttgagatgctactcaagaaagaataatatgacttttgaaaggcaccagtaagttcagaggtttttatttcatctgctatgattatctttctgggctctctgttctgagcatcttgtgcttctctttcctggagtcaggactgagcccatggctgacatgtcttgaagatggtctctggtctctccctgaagtctactgcaagttggagtgtgatgctccccctattattctgaatgccaacttgctcctgcctcactgcctccaggacaaccacgacgtgggcaccatctgcaaatatgaatgcaaaccagggtactatgtggcagaaagtgcagagggtaaagtcaggaagtaagttgaatgttcctggtctttggagttctacctacctcgctgcttgttatgtttgtttttctgtataatctctctttacctgcagggctatattctccagtcatgacaggcaggcaacctgctgtgctttctgtaaatatattctctccaatagaagatcccacagtctcacttgcatactttttaaaataatttctgccctaatgatcgcttttcttgaaagtaagagttagcagcgtctcaggtgttatatgtgttacctgaatccaactctgtgcctgcatatactcatcagtccagtttacaattgcaggcctggcctggtccccagtgcagacacttatgagctgtggatattgggaagtttcctttctctgcctcaattttctttctgtaaaaaggagatgatgattaaaaatatccgccagttagggctgaggtaggaactaaatgaattatatcaatcaaacataaaattcagtaaatttattttaaaaatataaaactcaactcattttggctattaatattgttattatatctttctcctttcttcttcctgaattttacgtatgtgcactcctagacccatggcaagaaacacttttcctccaatgtcgtgggggatccgaaagaacaaaagctttataatgtaatttaagaggaaaggcttccaagagagtcatcttggggttcaaatcctcatctcccctttatcagctgagtaacctcaagcaagttacttaactctttgggtcttggtctccttcctttcttctaggtctcattcttatccttttaagtttagaataatgcttgcatccatgttgagttgaaggataattcaaccttcaactcaatatccaactcaaggttaactcaatatccagcccagtgcctggcttgtgccaattactcaataaatggtttcagaaaaagaaactttttctgagtgaacgaaaagctttcaggaaaagaaactttttctgagtgaacaaaaagctttcaggaaaagaaactccttgcatttaggaaatagtagctattctttctctaccgtaaattatgtagctacaagagaaaaccaaatctgtttcttacctagcacttagttgaaagcctgttgatatgtattcttctaagattttgtttttgaactaacaaaatcctagccatggtattaccagtggtkccagggcatacaacctttgcttgtaagctaggatggtctaaagggacagaaaaaaatatcaggaaactatctgactcacatttaccctttctctagttgatctctcaaccatgttaacatttggccattagagcaatggcctctcccagggccttccactctagaaaaggcccaggctcatatgtgggaggggaagaccaagcccataccctgccctttccaccagagggaagggccaggctgattagaacataaacaatactgatgaaaaattcataggaggcaacactccctggttcagtgggctctagcaggtgtagtaaacagtttttgacaaccaagagcacatttgcatgtgattttcatagcatctagaggcaatttgcataggcatgcactgatagacagtgagtacccaggtaatcttcaagtgaaaatgttactacaattaccctgaaggctgctgttttcttgctttttttctctctagtcttgcctcttttttttacacaccagcagccacctcagatatctgcagaatagtgccatgaagaataaatgaccagggggccagagaaatgtcttaggaccaggaggaattaaagacagcaagatcatcaccagttttctgggccatgtctcagctttatgttgggaaaaaacgaggcctccacccagaactctgggtggagttctgggtttgaggggcatttgtggacacagcttttctgactgagaaagtggatgcttgcatcacaatgtcagcatcagtttgggcttaaacgttgacattcacaagcaccattctgaggaaagattaaattatttaccacgttatgtaagctgattaaatcttagtttacatctgtttacatagcaggtggcggattggtaatcagaagtttgcaagtctggcataaatcactgccacttgctgctcatgtttactcagtgaactatgtcagcctggttccttgtatgtggaaaaagcccagcattgtacaaatgaggccctcaacttctttctatgatatgcaagcacaaagagaagaaattgagaaaagcagaagggaaatcaatccagagagaatgggcacatgctaattttatgctactgtacagtgtagtaaaacaaacaaacaaacaaacaaaaatttgggagttatatttgaaacttgctgggcatgaccctgagcaaaatactcaacatccatgtatctcagtttttgcatctataatatgtgaagtagtaactatttctatccaacaatgttgttttgaggctgaatgtcaggtaatgtcgtgaaagcattttacaaactttgaagttcaatacacatgctatgtattttcaatacatatgctatattactttttgttcatcttttttttaaaggaaggaaacaattactaaaatatcagccaaatacattcccttcctgcttcttttcaagtccatagtttcaagacaaaagaatgataagtgctggatttgacttcctctgatgtccctgttccagctttgtctcattctacccagggatggcacggatggcatattcatcccctgcatgctctatgccagtctctgggttaggaataaagacagacacataaataagacctgggctgtccaatcttaaaaatggagtcaggatctttattatagtgttttggccacaccttccttcttgaaactcttcttccttgattctcttccatcttgctccctgattgatgttccttcttcctgtctgtccacccttgatttccttttctagctttttttcctttgcctatttctttaaaattgatgtttctctgagttctcttttccaacttgtcaggcatgatgctcattcaccctgtagcctcagttaccatctgcrtgctgatgattcctaaattcatacctgccactatagtatcttcccttaagggccataaggcccataagaccaactgcctatggatattgctgcttggatatcgtgtctacatctcaaactcttaactatgcaaaacagagcctattataattcctttcaaatatgcatatctttctgtgttccatgaagctggttgaaccgggtgcctgcacatcacctgagactcctcagcgccctttaccttctctcaaatcagttatcaactctgagtgtcattatcttactgactcagatatgcttgtttctctccatccctgctgccaagtctctataatagactattatcatttttcacctctgaactgatctttctgtctccagtcttttctccttcaacatattcaccactttgcagcaaaaatggccttcaaaaaactcaaatccaattatgttatttccccrcatgaaaatgaatgaccagcctacctgccactctatttaaggggaaaagttgaatattaagatagtttcagtgtctgcacaatctagcagggcttcgcttacttctccagcctcattgctcactatcttccctggcagacccttcagctcttacacaaccttcttagcataggctctaatactactggacttcttttatatcttcgtggaagccgtggcagttagggccttcagacatggaattccttcttcccagagctctccgtgacagtgaccttttgcttgactaactcctactctcttatttttagtgcaggtatgatgttgtccaggaagcctaccaggtctccctagactgtaggactcctctcataggctgccattgtacaccaaacttctctgatgatatcacttatctcactgattacaaatgatctggttactcatctatattcacgaatagaccatgaatattttgcttagcatcgtgtgcccagtgactagctacttattggcaggtattcaatactttctaaatgggtaaaagcattgcatttataagcaaacttatgatagaattttgatgttaaagttgatgctaaaaatagtaaaggaaaggagaggtttttcttatgcggtgatagagatccctgtttcaaatgctttagagtgaatgagaactttaaacatatataagtaatttttttctaacaattatctcaacaacatagaaagaaagctcattcttcaaagacagtttcaattttatttattcaacagacatttatgcctgattagtaccactctatgcaagttaatggtaacagaaaaacgattacctctcaacaagctcaccagaacaatgcttctcatacttggctgctcatgagaatcacccagggagatttaaaaaatcctaatgtccagatcacaccccaaaccaattacatcagaatctctgggggtggggcccagacatcagtattttccaaagctccccaagtcgctaccatgtacagccaaggtcaagaagcactggtctagtcgaacttttgatcctgttagattaacatcagttatgagattttgactttcctgaaagatccagaataagatttttctctttttaaaatttttgtagcaacacttttgcatggtagattttaacacgtctctgagacttttttatttttgaaggtaatagagaaaatgtaagcagaattgtaactccaaggaggttgtaaagtatatgtagtttcaggagttctttcctcctcacattgtataataggcacaaactctcttttaagaccctttcttttttcctcccatgcaatttacttccacatacacatcatcattaatcactcctctgctgtttcattaacctgatttcctgggaagctaaagtaagtgtgtttgacttgtattttgtcaataaaaccatattatattctcccttatctttcacttccatggttgcctttttctcattatgtgttatctttgtgtgaaggttaggttaacgtcattagagcccataattaatttaacttctaaacgattcaaaccttccaactttagttagtcaatctctgtttctataagtcactcgtcaagatgccatctgtggggtgctatagtgtcagatcttcttgtgggtaattgtaaacatccatcctttctgagggttgcccacagcatcaacttttccaaagtacgtaaatctgtttaagttctataaacacaaatgaaggtcaaggctgaaattaataggccccacattgtgactatttattgtttaacaaatgtttggttggtgaatgcctttagtggagccttgtctgacctaaattgggggagagcctgagatgggctggagctgggcatgtgtgtttgacccatttccacacacacagaaagattggtgtggcagagtgttaaaaagcttaaaggctgggctctgttctgttgggtattgatgaggatgactgtggtgatgatgatttgtcactatgtgctatatatgctaagtattttgtacacaataccccataatttctcataacagtaatacattttatccttaacaaaataatagtatagtaaaatatattattatataatagtatataatttgatatagtaattataatattttagtgtattattattatcccctattatagatgaggaaactgagattcagtgtgtttaagtagcctgcccatgatcactcagccaataaatggtaaaattaggatgaaaaccattctgactccaaaaactgtgctattggctaaaaatgcttttagtttcagcaaatcacttcatttctctcagccctttcctgcatttgtaaaataaagggaaataattgagtgatttctagctccaaacgtttctattttattttctatctcaacagaaccaatgagaagagcaacactttggtaaaacatcattgcgagaagtggtagatacataacaatttattaccatcagaaaaaaagcagtgatatattaaaacacaaatgctgcacagacatggacttagtagacagtatttagggcactgttagagtaatacttggtgaacttttggtccgcatgaacagccaaggttttgttctttccttcttgatgggttttggtccattgttttccattcacattcaaggagactgggtctagttctcccttgaagacagaatattgggaaaatttttttggaatttctagaattaagttttagaattaaacacatccctaaaacttctaaagaaggtaatgtagtcaaatggctaagaagggttttcttagtccaagatttatctcctcatttactggttaattatacaggctctggcattattgagatctaaatttgaatctcaactccgctatttattagctttttgaccttgagcaagttactgatctgtagtgaacatcattattctaatttacaggatagaaataataggtgtacttacaggtttttgtaaggaataaatgagataatagatggaaagaactgagcaaaatttttggtcatattaagcttcagttcatcaacactgctgctgtttatcatcatcaccatcatcattatcattaccatcatcatcatcaccataataatttctaccaggttaatggctcttacaaaataactgttgctgtttgagctatccttctggtgcaatagggaaatttcttctttaacaaggagtatactcagctacatttttgtcactggccactgtctcccatctgttgttggttcctatgctaaaaacaaaacaaaacaaaacaaattaaaaaaaaaaaaaagcacagagtccaggaagactggaattggcattcgaggtcagaggtacaggtcttcaattaccagcagaaaaagtgcatttcccttgcctataaaagaaaacacaccaaaatagaaactttattaaattaaaaaaaaatgtactattctcccccaattagtacactctctgtctgctttatatcatcctgctgacaactcaagtactacagtggcttcaaatagatcaaggaaaataggggaaagagggggaaaaagaaacaaaataatcagcaagatagatctggtcataatttaaaaaattaggatgagcaaataaagtcaggctggtctggaaggagaagggcaagggcatgtcctggagacattacccagatttttaggctcttgatctttttgaaccatagcttgaaactctggaagattcaaactgattttatcctatcctaggaagggaaagaaagacttggttaataaactgaaaatgtgcagctaaggcaagctaaaactcattaagtatcctggattcatagcttttaaaaaattataaaagtaatctacctaattgttaagctctgtgtcatagcggtgtgcctatacattaatgaataggtgctaaacctatacacttatatacacatgttctatctatgattgctcaaggaaagaacacacattaatctctatgtacactcatgtatctgtgagaaatagaaatttgttttctttccaataagaccttgcctggctttataattagtgtttatagtaaataccttcaaaatttatccttgaaatcctcaaatatcttgccattgtaggataatgtgtgcttcaggctaatttattaaagccccttttggcttcacagtgattgaatctctgccccaagacttagccattcacatacacacctgggtgcaggccagatcttgactgmgggctacaaggggcctggtgactggcatccatgctctcacttcaaactcagcccytgttgaattcataaatttccctattaacttcaacctcaaactagagagcatcatattgtaaaactttctgttttatattgactgctaatatctattaatcagagtacatttttaaaaacttgagtaagagcttaattgttttatataaaccagtaggactttattcaacctgtaacttcaccccctgctgctctttctggtcttcgtttgtcctactcctcctgtgtctctggctcaccctttcttcaagcccattgagtgaacattttggttgtggttttgcttttgctctctagtgatggggtcaagccaggccaaactgattcataaactgtctcctgagggattctgggtgggacagaaatacgaagaattaagtagggtggagaaaatgagcagaatgttaacattccatactcatcacacacacacacacacacacacacacacacacacacacacacasagagagagagagagagagaggagtgtggctgagcagatcttctgatcatcagggatagctagtaatttctgctgcttattgatcatggtcatgtgctattcattgtactgcgtggtttaaatatactgcctcacataatctactcattaccctgtgaagaatgtatgactatccctattttccagctaggaaagctgagaataatagaggttatgtgatttttttaaagttagagatttattaagcaccaaggctagagctctaacatctcctgattccaaagcacctgctttcagccacgctgctacacattcttcctgatgggaatctcccaggtgcagccactaaaggcctgctgaagccaccatgacttccgattctcccttttcagtcagggcaacgtaaatgctaatcagctctttttcttccagcccacatcaagggatgtaatgtcaggagtatggccaatgcaggatccacctgtgtatattccaggtccttaggtataccacaactttttagaagttctgataacacattagcaaactagggtcttatcattgctatggcttccagataagggacaatgcaaataactttgctttctcaaggagcaacagtgacctgcagtggttaagttaattcccaggtgagggtgtgagtgtgtgtatatacctgtgagcactttcaatcacgcctgtctgtgagtcagactgatcaggaacagaaatataacaatacctggaggaattcttgtgctgaaaactttgtgaagatgcaaaagttcttacaaatgagatcagcctgccccctgaagttgagtgtatacagtgtgttgctcttttctgccagaattttgttccagtggacttccctcaggctcttcccctgccctgactctccccaacagtaggtagaaaagagagggagggaaggagaggtggaggggatatgcatatttcctccatttctccatttacagttttggctaagacttttgaaaatctctgggttctcacctgcactgttccctctgcctggcatatcctcctctgctcctctacctggtgaacccactcaaaggcttcctttactgttattcttcatgtctgcaggcagtgwtggcagctctstcaggtcagtattccaaccctattataatatttctatttgtttttacaaccgcaagacctaatataataaataggcatattctcggtgctcaataaatatttgttgaatgaatgtataaatggacaagtaattgaatggttaaagaaagaggttcctattaaatgttttcatgtttcaagtccagttcacccctgaattttgrtgtaatttccagtttctcaaccatgcactgatgagaattgatatttggactttgtgaaataatgctaatagctattgtatacatttgtgtttaaatcacatgaaatggagaaacctcatgttgtttttagtttggggtgtaacctgggcatatttggcagaaaaatctgttggctgcatggagaatggaagaaactcatgaaaatagatgaagtaggagctgttgaacttgatgtgagagagacgaggaaaggagatgtagatgattaagacatcagcaatggaaaatggagaaggggccccaaacttgggtttaggtgttcagacctagggaccaggcattattgtacctgccaatctggagacataagatttagaagaaagtccaaagataaaagtgaggggcgggacatggaagtaaaatggtctacacacttttaggagttagcaggtggctcattttttcagagaggctctattttacatgtgagaagagctttgtaaggggctttttttttttttttttttttttttttttttttgtcagggaagaaggccaaatctaatatgtcttgttggatagtcctgctgatgctatttcttatcctgtagaaagggctagaataggacatcaggagacctggtattagagagtgcacaataactatgatgggctgtaracttaccatgtctgaagtctgcttgctccctatttaggatattggcttgggaaaccaggcctgcaatttgttagaggaaaactggcatggggtttggaagtgctgatggttctgtttggggctaagtagagaaccgtgtcttttaaaatggtctagatcactgtttctcagtctttaatatgcataggaattatttgggggtccttttaaaatgcacattcttgttgagtcagtctgaagtggatcctgagatttatttctaacaagctccctggtgattctaatattgctgctctaggtaccacactgtgtgtagtaagaggctaaagtgtattcggagtgaaaaggctttctaacttcagttcaaaaatggaccatgtatcagacaaaacaactaattaatgctttagttttctaattcatgcaatggaaatcatgcaattgcctctttcccttacatcttctttttagggatattctaaatgataagatttggggatcctcagcacaaatgcactaagtgaagagaggtaatttatccatagctccattggtagaaacctgaatgcttccattttataatataggcatttggcatgagactcatcatagtgcacatccctgctctgccatcaaccaattagataaccccaggcaagttattttatgtttctaaatcttacctcatctataaaataaacatttatacattcattgaaccaatatttattgacagctattatgtaccaggcattgtgctgcatactgggaatatcatagcaaataatgctttgccctcaccaaactcttttccatggtgggagctgatgataagcaagtaaaaccaatacacaaaataattcagggtatgcatcctatgaaaggaaaaaagatgctttgattaaaaaagaaaaagttagaggggcaaaataaggatgctyttgggtggtaagaattatgcttagataggaagaaagaaaaggagccagtcaggagaagataaaaaaaagaaaagcatcatgactcgagagaatggcaccaactcttgaggctgggaaggtcatgggttgtgcttgggattctaagtccagtgttggtgaagtgtattaaggaaggtgaatgtggcattgaataaagttggagaaaatggaaccagaacacacgggacctcgtaggctaaagaaagaagtttggatttcatttttcatcctaacagaagcaattgaaatattctacacagggaaatttatttttttgaaagttccctccgactaatctttgctgactggctgggaagggatctgaaggagaagtggggtgtccagttaagaggtgagagttggtggcttgtgttaatgtttgtggtaatgctgaagtatagagacaattttcagaaacacctgggaggtaaagcaggacttgttgatgggttagaagaaagcagatggggtgaccaaaaaggtaagattgagaggaagaatagaatcagtgatggcttttaagttccaagcttgagcaacagggcagatgatagtatcatttacggagttggggatggttgaggaggctaatatctggagtgagggaatcaagaacttaaacaataatagtccctatcacacagagtgggtctgaggacaaaatagtatagatgtatattttcctatacaatagttagcacttaagtgctctatgtgttattgtttttctgttgttgttattattcytgagggagtacccactggagacatcaggtccccttggtcagcaaagacatgataattctctgggactcaacaaatcatacttttattttcacaaatggaaaataaatgttactctcgaaaaccctacaatggtgatagaaggatggggtggactatgtgtgcctcaagcaacatcaatcaaactttcagccaagttttgatgacaagatctttatttctagcaatgatgtaagaagcagaaagagcacagctgggttttcagcattaggtggataccataagttctggaaattgggaaacgcaccttctaacttggaaattgtgctgatttgtctggagaagttagagggaaaataaatacaaaccttcccctaaccccgactcctcgtgataccatttacagtgtaaggaagaaatcacagagcaagaacgctcaactaacaaccctagccaaaagactggatgcttagcaaagaccaaatgggacagttacagggctgtgaggtggatgatctcgctctctggtttctacaccttactagcatgagaaggtagcatgaattttagtagtttaccaacctggctgcacataaaaacttctggcaggtttaaagatacagaatcctgggcccctctcaggagttttaatgcagtaagcctagcaatctagatttttaagtggcttctacataattctgatgggattggtctacacatgtaagttggaaatcattgatctcatgatcagaatgttatattatgatttgaaaactttgaatctatgaattgctgtgcgaacattgggtaaatcgcttcatggttactaatgtgatttcctgcctacaaatgaggtattttagctgacagacagcaagtagaatgttttacatggagggtacttggcatgggctatcaaagatgttttggaatctctatcctggtaagggcctgtttgtctagtatccaatgctgtcattctttcaaatgcaatctattcacttcatgacttcaaggagtcgtttggttcctgatgcataggccatacacaaaggatcattgtgaataaaaccagttttttcattaacrrttttaaaggtgtcaaaggtcactcctcaacatcaccaaactagaagcaatgcagaggcactggggatcagtccatccattgctgtgtctcagtcagtttgagctgccataacagaacaccatagatgggtggcttaaacaacacacatttgtttctcacaggtccagagcttgagaagtccaaggtgctggcagatcccttatctggtgagggtaccttcctagcttgcagatgattctctttttttttttttttagacagaatcttgctctgtctaccaggctggagtgcagtggtgcgatttcagctcactacaacctccgcctcccaggttcaagcgattcttctgcctcagcctcccaaatagctgggactacaggtgcttgccaccacacctggctaatttttgtatttttagtagagatgggggtttcaccatattggccaggctggtcttgaactcctgacctcatgatccacccaccttggcctcccaaagtgctgggattacaggcatgagccaccgcgcccggccagatgattgtctgttttctgtgtcctcacatggcagagcacagagagggcaagctcttatttgttttctcatgagggcattgggaggactccacccttgtgacttaattaccttccaaagaccctactccctaaaataccatcacattgggagttaggatttcaccatatgagtttgcgagggccacaaacagcgctaggtaacaaaaacatgaacaggattggtggcaagatttaggcttcagtcttcttcaagggccctatggggaaaccaaatttcttgggactaggaagaatccagaacactctaaattcctggcacaatccaaccagctcatagcactgaagtgccaagttccataccatgaattctcaagacttgcgccataagctgggatccatgaaatgaacatcaggcaaaatgagacagccctcactattgggccccgagatacttaacctatcaaatgctttgctagaaggctgtgggtgaggcttagagacgttggttgtctgatgtagagagatgcagaagtcctgggaggcccatggagagacggcagtgcaaagctgtcttctgtacaagggagaacaaaccataaggaaaaagaatctttgaggctgagaggggcaaaggaacccctgcagaaagaaaacagaatttcctagggaattgggactctctgccaacccctcccaactcctgcctgcagtgcctcctctccagtctgggtccggtgtaactgttctattctcttgctgctttctagccatccccctccttgtgttgctggtggtttgtagcgcagggcctgtctcgttgtctgggtgccatgatggaaggctacattcttcttccccatccaagtttgatctgtctactctcacccctgaggttattaaactggcaaggaaatatatgaaatcggcattcttgaatggctctttaactctgggcaaggaaagggaagactatttccatggttgaagtattccaaccaattcagagaaaaataccacatgaagtcaaaatatgatcgtcctggccaagcaagggttttcctttataatcatgctgacatgcaaagtttttacagccgtgcttctcccctgctgtcagtggtattgcctgctttctccagctgggggatatcagttcagcagaggtaggggaaggatttcatctgtgggaggtggtagaaagaagagagtccccggaggatataaactctgcagtgtgaaggaggagtaaaatatccattctaggagagggacaaaaaggagcctcgttagagtaaaaaagagctgcaaacccttaattgaaaatagatttggagaggcatttttaaatgtcatctttctggagggaaagaagaaacttactaagcaatacatttcatttgtataaagtttaaaaccaggcaaaactcctctatgctgatgaaagtcagaagtgtctggtgttgcaaagtagtatgctgtgagggtggggggattttarctgggaaggaatgcaagggggaattcttaggggctagacatgttctgtatcttgatctgactggtggttacccagctgcattcacaggtaaaacttcctcaagccgtacgctaagatttgcatatttttctatatgtaattcattactcaatacaaaaatttaaagtgaaacttcttttttgcccacttatggatgtggcattgggacacaggtcatctgagtgctcagcccaggatgaggacgcattaataaaactgtggagcacgccaggaacagtcagagcctgacgtggcaggaggaccgggggcttctgctgtgagcaaacctgggtctgcatcctgcctgcagggtttaccgtgtgttttgaataagctttaattttctctcaggctcagttttcttcttaagtgtggataataacatttacctttaaatgttgtttgatccaaataccatatgttctcacttataagtgggaggggagcactgagtatacatggacacaaagaagggaacaacagacagtggggcccacctgagggtggagaggaagaggagggtgaggatggaaaaactacctacaggatactatgcttattacctgggtgatgaaataatctgtacaccaaaccactgtgacatgcaattcactcatgtaacaaacttgcacatgtacccctgaacctgaaagttggaaagaaaaaaaaagtgctgtttggaggattcaacaaaataatgtacataggtatcttgccaaacacttgaaatatagatcaaaaatggcatttattttaatagctagaagatacatgtccacacagactatgatgctaaaaaattccagtcataaaaatcagatttttttttttttggacacagtctgtatcacctgggctggagtgcagtggcatgatcatagctcactgcagcctcaacttcccaggctcaagccatcctcccacctcagcctccccagtagctgggactacaggtgcgtgccactgtgcctggctaatttttgcattttttgtagataagagggttttgccatgttgcccaggctagtctcaaactcctgacctcaagagacctgtctgcctcagcttctcaaagtgctgggattacaggagtgagccaccatgcccggccaaaaattagatttctattgcaaaatgtccttgggaataaagttatgaatctaaataattatttaacaataaaacactccacttatttctaagtatatattatttacatatgtttaactattaaaatattttattattaaaattatttgaagttgaatgaattctgtgatgtgaggtcttcgagaaattacttaacatcctttagtgtgtttctgtgaggtgggattaaagagatgatttcataggccgggcacattggctcacgcctctaatcccagcactttgggaggctgaggcgggtggatcacctgaggttgggagttcaagaccagcctgagcaacatggaaaaaccccgtctttactaaaaatacaaaattagccaggtgtggtggcacgtgcctgtaatcccagctacttgggaggctgaggcaggagaatcacttgaacccgggaggcagaggttgcagcgagccgagatcgcgccattgcactccagcctaggcaacaagagtgaaattccatctcagaaaaaaaaagaaaaagaaaaaaaaagatgatttcattagtattataatgattcaacttggtgttatcgaatgtgccttgcaatgtacctgacatgctgttagtttcagttcaatgattcaattcagcagatacttacttaatgccgaatataaaccagatatcactttagttcttgggaattacaaacaagaccaccacatagcctctggcttctggaagcttccaatctagtgggaaagacagtcacatgtgcatttataaaacaatgtgataaatgttttactagtgctgcagaagctacaggaggtattgcactatagtcagttagaagacaacatgcaagggttggtgggcatatttaaccttaaaaggggtgtaatgagactagaaaatggtgatttaaggctgccacatatttgaaagagtcaatggccaaagggttattcatattttagaattacaagcttatctgtaaccaggagtgtttttcattagaagtggatatgttaaaatggcaaatggaaagcactttcaaactgcagtgagtcaaaaggggaatggaatggaatcctcagtagggaggaccctaattccattgactccaatccacatcaaatgctgtcactctggttggggaccatgtctgggcatgagaaggaggaccaattcttccagggcagtattgagtcatgtctactttgagaagctggtgaaagttatgaactctttccaaggaaaaataaacttgtaaacaaatggagcagtcatctcagaagttattttccttctgaaagttaggttcagaatctctgttttaaaagaaaactcatattgctgcactttctcccctctctgaagaaccaataaatagtagcaacttcatcaattatattgccatatcaacactgttgatcctcaaatcacttctgatcagttctttgaatgtgtgataaccttttttgtaccccatcttacctgacatttcgttgtacttagatgtgagtcttttccaagatgaagatctcagagaaaacccaattacaatttagatgctgtactatttatcaaaccctcttaagaataacctaaatgtccaacaatgatagactggattaagaaaatgtggcacatatacacaccatggaatactatgcagccataaaaaatgatgagttcatgtcctttgcaggggcatggatgaagctggaaaccatcattctcagcaaactatcgcaaggacaaaaaaccaaacactgcatgttctcacccataggtgggaattgaacagtgagaacacatggccacaggaaggggaacatcacacactggggactgttgtggggtggggggagtggggagggatagcattaggagatatacctaatgctaaatgacgagttaatgggtgcagcacaccagcatggtacatgtatacctatgtaacaaacctgcacgttgtgcacatgtaccctaaaacttaaagtataataataataaaatttaaaaaaagagtaatagatcaaatatttctatacaacatttactactactttgaataataaatgaacattactatttttagttccatgatttagaaattagcctaggacagtgggacatatggctcacaagaaccatctgtccctgcctatttgctaattcttatgccatattgctgaggatcaagtctttcatgaccttcttgaaagattctgatgagctatttttgttttatgttttatcagcaagctcctgaagatacaatgcctggaaggtggaatctgggagcaaggcagctgcattcctgtggtgtgtgagccaccccctcctgtgtttgaaggcatgtatgaatgtaccaatggcttcagcctggacagccagtgtgtgctcaactgtaaccaggaacgtgaaaaggtaaggaacattttttgaacttattttcatcaggctgtgctctaatcttgatgcccaatccaagaaatttgagaaatgaaatttctaargaattccaacaggcagggacttgggattctaatcgggagtgttggtattatgcaatagaaaattcagaaaataccacatttttaaaatgttctctcctgagttcagaacttcctctgaggtaagaagamtccartgggtagagtaccaggtatattccaaaaagaatgctgggatcctgatttagcaatgtgatctcctctcatggatggccactgacataagttggctacaaatactagtattattatttttctaaaacagagtcctgaacagaaacacaaattcctcggcaaagctggaagtgctgtttgactcttcccctccctaggattttggcacaaaaggtctcaaatgaaaaacacagtcttatctttgttgtgtgactaaaagcaattttattttagaatctttcaagcctcacacacatacatgagacaggaagtcaagcagacttcctaggcaaaggtcagcgtccttgtctgctcccttggcacctgttatcttagtttccagtactccaaggtaagcaccatggaacagatgtgaaaagaatatggcagaaaatgagacccctgagaaatcaagcacatccggttgcactgatgggttaaggaaccatcaagttgaccagatgaagggagggctacctacatttctaaaatcttactttttggggttttgagagttagtgctactctctatgttctagatagagtataattcgtgaagccaagagttacacaaaccagcacacatgtggagaaagggaatagaattttggtgagaccaaaaacaactatgatgtgtccatttaagcagacaggcaaaaacacacctttaggaaatattatgaattggtttcactggatgaaactcgtcttgaaaaaatctgacatttgccaccagcaacatttgtgtgatagtaggggatgaatcagtgtaaaacaacaccatctgggaaacaattccaaaaatagctctgaatatatgagcttcggttgatagctgattgtgttcctatatataaaggaaaatacattgttaatgcatttcattagtggaaaaaaattgtcatcatgattcctctgcttggaaaaagcaaagaattttttttttttttttttttttttttttggccagtaacaatatgttgtttcaatagtgtcttttggtccaggttctagaactggagaatactaccacttaatcagaccacttttttcaactctcaataaagttaacaaaacaataattaagatgtttrcttttgatattctagcttcccatcctctgcactaaagagggcctgtggacccaggagtttaagttgtgtgagaatctgcaaggagaatgcccaccaccccsctcagagctgaattctgtggagtacaaatgtgaacaaggatatgggattggtaaggataggagtgaatcttaaagtcaatttctatgtcattcttttattaagcacagctgaattttttttaattttatttatttttgtcagacggagtcttgctctgtcgcccaggctggggtgcagtggcacagtctcagctcactgcaacctccatttcccgggttcaagcaattctcctgcctyagcctcccaagtagctgggactacatatgcctgccaycacacctggctaatttttgtgtttttagtagagatggggcttcaccaggttggccaggctggtctcaaactcctgacctcaggtgatctgcccacctcagctgggattacaggcatgagccactgcacccagcccgcccagctgaatctcgaatcagacactgttctccctgaagagtggattgaaatgcaagttgactcttagctgctttagtaaaattgagatttatggcaactttgaggggcctagaccagatggatttgtggtatggtttgtagctccaagatgaaaggtgggactgtgtagccacatagcatgtgtctgctgggctcctccattctacttcattctctgtggttgttactggagtggagaattactgaaagagatgatttgacattcctctttcatgcatcattcttcagccattctttctctgcagaggaataggctccagagtcgtggacaacttcttattcaagcaattacaattaaaggtcttcgtggccagagctgatttatagtcatgttaactttgccttggctggccctaaatatcataggaaagagttgtagctgatgcgaaaccttgtaagattactcctaaattctgaactgcattagcaaggagtaattttatcggacattctaaccaatgccaatgagtataatttgcattaattaggaagctcattgccatcttcaaggtgctctttgcacagtgatgtcttgtggtcaggcatagagtatcagggaattcagatgctcctcttgggtggtatttcacaaacaggttctcatcctccaagcctccaatttctgcgttaaaatatcatatactcacatatctagaggccttaagaggaatgtagttcttttgattgttttaaaagtcactgaacccactaactcgtcggtgggtgcagcgcaccagcatggcacatgtatacatatgtaactaacctgcacaatgtgcacatgtaccctaaaacttaaagtataataaaaaaaaagttaaaaataaataaataaataagagtcactgaaaaacatagaaacctagacagtaaggactaaaaagaaacttggaaatcatcaaatctatagatgaggaaatagagaacctagagagtgtattttctcttaatataattttaggagacatttggactctgtgtggaagggaatagagcaagatttttctacaagagaccaacacatgcccaaagtctctgcttctgattcttcactgcttcctcctttaatcaaataggtttattggctgctgatgcaattatctttagtacagcaatagaaagaatagtctctggagtaattttataatttctgggccatttcccgccacccaccaccaccaccaccagcatgtcaagttcttaggtagtagttgttgcaattttaagcttccaggagaccatgtaaacaggaatattagatatatttaaaagttatgagccaatcaggatagactttgtctagctagagtcctggaggggatcttggaggccagctgggccaagagttaatctttcaattactacatcatgtagaaattcaggcattccagaggaggggttatcctggacaggacagaggaggggacacctgcagcaagttgagttaggttggggcagagtctctttaccaattagtgtgaaggtattcctacaggaacacagtagatgaatatcagccctgcctacaacgtcataatatggtgacccatgatgaaagcagttgttctttaaaaactcaaagctattgattcctgaaagaaaaagaatgagatctgggaagttcaagtctctgctgtaaacttctgttctttcaggtgcagtgtgttccccattgtgtgtaatcccccccagtgaccccgtgatgctacctgagaatatcactgctgacactctggagcactggatggaacctgtcaaagtccaggtgaggaaagggacattgttatgtgccaaagacatgagtctgctgagcaacacttggagcattattttttggagtaatttcagaggctttcaaagcatcctcaaagcaaacaaccacatggattattcctagaaagaaggattaaacattgaaaagaaaaaagagggaagcttgaaaacaaagatatccgccgaggtgggcggatcacaaggtcaggaaattgagaccatctggcaaacacagtgaaaccccatctctactaaaaatacaaaaaattagcccagtgtggtggcgggtgcctgtagtcccagctacttgggaggctgaggcaggagaatggcgtgaactccagcctgggcaacagagcgagactccatctcaaaaaaaaattcaagtatatcaagtatacttttagatgcctacagagtttatttgccttgctctgggggttctgctttgtattcctgcctgacttatagaataatacatttttattaaaggaagaatttctgaggtcttaggtagtctggcgttttgatgaaaaacatatcgaagtagcaactgacataaaaggaagaatgaggtcctccggggttcaaatacaatgtcacttactccttggagcctctgtctgctcacctgcaagggtgagggtaatatctagcttgcatggttgttattaaatttaaaataacacatgtgaaatgtcttgcacagtttctagcacatagttcttaattaaatagaaatgagatttcagttcacttagtacaaatcttaccccttggaaatatcctccatccctgaaaagatatcactagctatctccatgcaaaataaagaaaaatggggttctatagtttgtgtgtgtgtatatgtgtgcacgtgtgtgtatatacaataatgtctaggtcatttgtctttttttgtctcttttataaactgtgctgagaaaggaactaatggctattcactgttccctattggaacacctctgacaacagaagcaatttctaagagctttttattgtgagactgagaagagaggcaggatgaaaatatagtacttttagatgtgtcaagggcatgctggatgtgagagacaagggcatgctggatgtgagagatgtaagggtttgaagttttcagatggactttctaggcccttgtcattgcaatggtgtcttcctccttcacctgttacgcatggggatctagacccttctggtggggtaaggagtatactgacagaaaggaaggatgccagaccaatctatgtctgccagccaaggtgattgagcagtgggacctggcagttgcgacaggcagggggcagccgaatcgtcaatggtgatgcccattgctcatgtcctcatgtgcccagatcaaaggcctctgcccaatgcccctgcacctgcagcagcacagacactcctgttgtccaaggcacctgcacccagcaagtgggagaagctccctcagactttcactagaggcacttttttattttctcatcccttttttttctagattcttattctttttcttcttttctgccatgctaatcccaattccccagtaaactgtactactgctgagggtggaaatgataccttctccttcacccccggtatctcctcaatgcgggattcatttcatcttttactcaggaggaggtggctgcaggaaatcaaagggcccacagaaaaggatgactgccacagagccatttctcaaagaaarcctttttgttttcccaaaaagcttatgttaagttgaatttttatgattatccttaatcatgatgtcaagagagtgttttactgtatctcatgactttaaaataggaaaaattaatgttttgcaaagtagtagtccttcaggagactgatttcatggagaatttttttaacatattgtggcaattgtttgcatgtaaatgagtttttctaaatagcatttgaaagtgtttccttctgaagtacaaagacattcatcatgacatctcatttcccctattattttgcttcataaattcatttttccacagactaaacagcactatttttctggaataccataattatgaattagtgaggtccaaataaatgagattttcctgtggatacatgaaataggtttgcaaagagcctttaacactatatgaaatctctcccaaattcccagcttttcaacagaattctccagttatatcaaatcttataatttctaactttgttttcccaaattgttccccaaaacataaatagtgctttaaataaaaatgactgttttaaagagaagggagaaggaggaagaaaacgagaagataatacactggcaaaagccacagtttccaaccaaatgacctcactcttccctctggctcttaatgctcagccccacccccaaagtgtcctcttgatgggtacaactgtgtgtaacagctccagtgacactggctgcagatcattggagactcagacatgagtcatggaaaggtcttctttttcatcatttttaagcatggaatcattccctctaggcatcaagtgtcccatcactggaggagagtagacaagagcgtcttggaggaaaggggaggaggaacagaaaagcaagttgcagggtagtgtgctatggtctaaataaacatgcaaaggatgttttactcaggagcacatacatgtagcaataaggaaattatcacaaatgtggacattggcagaactctgtgccctgatgtgattagcagcccattctgtcaaataactactcccattaaaaaataattgagcaattttctgttagcctttattgttggctattcttgagttttgtgacctttaacaagacatttaaccaggcaacggccttcatggtgacttatgaccatcctagtaacctttactgtttctttctttctctttcttttcttttcttttcttttctttctttctttctttttctttcttttcttttctttctttttctttcttctttctttctctttttctttttcttttctttctctctttctttctttttctttctttcttctttctttctctctttctccctctctcttttccttctctttctttctttcttcccttctttctgtctttcttcctccctctctctcctctttctttctccctctttctctttctgaccccctctctctctcccacgtccttccttcctccctccttcctttcttccttccctcccactcccttcctccctctattttcttttcttcctttcttttccccttgctttttagaaactttcaaattgtccaatcaggaggaaatttttaaactaattttctcttaaactttttttatgttggaaagttcaaaacaaatctttggcatttagatactggaactcaatcatgcaagaagttgcttgctaatagcataattgcaatagttgcaataacatagtaatgcatagatttgcatttgtacaataacaaattcagaatagttgttaccaatagggaggaaggaagtataattatattggagggacatatataggagacatgaattgaatctatagtgacatattctggaaaatgttaacaatttttgataaagttaggcaaaggatataaagttttcttatcattatagctttatatgattgtaatttttcaaaagtgtttcagaaaataagaaaatcagctgggcacagtggctcctgcctgtaatcccaacactctgggagggcaaggtaggagaattgcttgaggccaagaattttagaccagcctgggcaacacagtgagaccctatctctataaaataaaaattttttaaaattagcctgatatgatacatgcctgtagtttcagctagtcaggaggctgacgcaggagaatcacttgagcccgagagattgaggctgcagtgagccatgattgtgccactgaactccagcctgggtgactgagactgtctcaaaaaatatatatataaataaataaataataaaagaaaagaaaattgtttcacctctcaccaggagccagcccttccctgtccatctcactgctttgcttttcttcctgtttcacagccctcttgctcctcaaatgctcccatagaattgagtcttgaaaaacatttgaaatttccctccaattataattgctaagtacttgttttattaatggcatatacatatatttataaatagggaacatctttatgagatatatgattttcatagaagaaggctagagacacgatatcataattagtggctggcaaatgcttgtaaaatttcgtctttccataagtcactgaggtaagaagtaggaatgctagatagtccctattctaaaggattttgcaatctaggaaaggatatgacacaggtaccaccaacttttgcaatttctgtagcagttaaggagagatgtcagtataaattaattagtctcaaaattgaattatgcatcattaaaaatctataaggtgggtattgtcaactccactattatgaatttattcttcagatatacttgtacatgatttatatataagctttgtttgttatagcaaatgactggaaataaccaaaatattcatcaacagggatctgattaaagattttgaactctttaagggccttractaggtttatggattttcagatccccttgctcactggaaaatctgacccatagtgagtgagtgaggtatttatatgtttggtctgaattgaataactgactgattagggtggggaactgggggtccatagtgaataccctyctatgagaaggaataaagttctcatacatttacctttcaaagaacaaattgtattttgccattgctactatctgggaccccaaagtagtacaaaccattgatattttaaataataaaatttatgaccactgctcagtagagctccagtggaacctgctttaaagcataaacaagaattatttctagttaacagaattactgttgatatgcaaatggttctgcataaatggctgtaagtgcaggagaataactcactttttcagtaggctgaacaccccttttgtgtttaccttatatatttattttgataacccctttttaatacaataatgacttaagccaagtcactttcaaatattgcaatatgaagttttgaatatcaaactttataaggatttatactacttattttccctctagagaagctgtgaaggaggagttttagcttttagcagtacgactccagaaaaatattgcagatccccattctcctacctgactatgaggtatatatttatagacctgcatattagcatatgtgaatgtctccaatctaatgattacacattgttagctttctagaattcctgtaggtgctatctcgtgtaaagctcctgtgttgccatgtattctttttcttctgagtgcatggaatttcagttggactgattaaaatgtgaatatgcaggtctgcagaagggtgggttggtagcaggctatggagagaaccttcttttctctttgaaacctgccatgggactttcttttatccttagaaaagcatattctttgagaattttaaactataaaaagaaaaagaaaaaagttttgtgaaaatgagttattattatttaacaaaaagtagatgactatttgtttaaatatgcatctggaaatggccatcaggaaagaggcagtcaacagcatctcaagatgaacgtaactgcgctcccaccagcttgatgttggtgtcattttgagtagcagtgatttcacactagccctgtgtgtcctgcatatgtgtactgtctggtttcctacagggcaggctgcatgatgataccaagaattacagagtgcaatttcacctccagtcctggtgtgggcactcacatcttataatctagcatttctgaggtccacatttagttgaagaatctgtaaaactgtatttgtcgatctttaaaagcccattgtgtgtgatcaacacaaccatcttacaatttcttgtaacattatttaaaatttcaaaataagtggaactaatattatgcctgaaaccagatgaaactcattataatattgaggatgcttttttaaaccacactacaccactctgaaaatttcggtatcttgggaaagaggatgaaaagtttcgagaaatctcctccactgagacttcctgcctgaaccacatctgtcagggtgggcagtgtgcacgggaaaggctagatagccccaatccactttatgggacacaattagaaactagctgcttgagaaatggagttggactcctgtggtgagctcaggatttgccccttctcacacacaacaaatgtctttaattttgttttctgtttttcccgtctttccccttagagcattgtgtgcactggccggcgtcaatggcacccagaccccgtcttagtccactgcatccagtcatgtgaggtaagatagcctccccttccccaactcagactagagaactcaggtggatttaacttatggagcttgaatccttctaatttaggacctggyccctctcctattcctctgtcctttgtttaacttcttaaattaagttggttccacgatcttaaatttacagaaattaggagttctgatttttgttttgttttagcaaaatctttggagatccactttaaatgacttaataaaagctaacttaaaaagcaagtcagaattatttatggttttgggattctgtaactgggccttgtttgagcttaattcactcagggttttggagactgatggcccactgacaggtttatttggccagcacaatgtctaaaaccaattttctttttggttgccaatgtttaaaaattaggatttttacataaaattcatatgtgcatatataacattacacacatatgcacacatcccaaataaaaataaatatttaaaactctgcacaaagatttttctcttgaaaaacaagactagctggcaaccgtgatgacaattagctggatctgagtagcagctgcaccccaggtgggcaactctctccagttagcacagcttttacctttccctatggctacttacctggtgggcaccccttgtttaaaataactgcctgggtcatgcaggcatctatgcttgcaatctcttaggtagacctgttgtccactgttgattaaccaaactagacctttaccacctcaagaaatcttgtctacttcttcacatagtagattccccaatcagtggggggatgtaggctgctgtgatttctttagttagattaactgaagttaattttaaaagtcaacttttaaattgaagttaattttaaaagtcaacttttaaatagggcagaatatttctaagaaacgatgacctagaaattctgtcataggggaaggagatgcttacacacacacacacgcacacacacacacacacaccatttaagccctcccaacctaagaatagccagtgacaagtacaagcattctcgtctcagtcacaacaggttttgtcatccatatctcacactggaaggaaataagccacttagcagcaatcttgggtaattatggctcctgtaggtgctgcagagagacccctttaactgccctgatttccagcttcttccctgatgcacacccaacccacatgcatgtcaagtccattcttctgtatctctgtgtttcttgatctaattctgggaatccaggatccacatgagactggagagggggaaagggtggggtttgagagaaaagggaaaactggctggggaaatcataccaataaaacagcactctgcgagcgcatcaggaaaaatgctagcatggagtgtgctttgttatggtgtgggccaacaaaacagctcatcttctgccatcattagaaaaacagatggcagtggggtggggacgcgggagagagaaggagtgaatcatccactgggcagggggtaagaaggagggaagagaggaggccagggaaggagggagataaacagacagaagactggggagctgggaacagatcaaagggatcctgagaattcccttctgctgcttctatgcatgatctcaagtgggagggtggatgacagggcttggagctggcttccgtgtttcccagagggttataatacagaccttttcccatttgttctcccctcctccctgcaccccagcacatcagcggggtcacttatccagagcttcctaggctgtcgtcagtccctttgttgatgtgacaaggaacaaaagctccatgtctcctctgcctgactgctgggctgatgtctcctctgcctaactgctaccaggcaacagctgttggttcccctgctccagtggttctcagcatcacctgggagcctactggaaatgcacattctcaggcccccgaatacctactcgatcagaaactgggagtggggcccagcagactgttttaacaagcttccaaatgattctgaggcttgctaatacttgagaaccaccgccccaaccgagagtttgttgtgcagcaataattgtagctaacattatttagccactttgagggtggaaggaagatacaacgatacaggtgaatcaatccctgtaggaaaggaaggggaactggacaggagaggagaaggagaaacaactctgaagaaataagtaataaaaaatgcaaagaggcgggtgaaaatgaaaaagaaaggacaagagaggctgaaactggcatgctctaggggcaaattggcagacacttaattctttactggaaaaagtcagcaaaatatattagggagaacagaagagtgtcagggacagatggagggaaaacagactggaggcaagataaagccaagccggccaggtaggagagaggaagcttttaaaagtgcagcacagaaatctgagctcaaataaggtattttgttacccagtatctaaaagggttttctgctttttgcttcccagtactgaatatcattctaagaggcctccttttaatatttagccttgtaagggtggagtgcctcattcattatttctcccaataagcccaaggcagtaaatccaccagctcagtatcctcagcccatattgcccttcatgttacttcagcacttttgtttgcatcatattctcttgrcataaggatttgctttcaattatccactattctgtgctgcttatgttttctgaggtgccactaagactttctttaaaaactcttatctaaataattccatcttcttatgttaggtcataagccagttgttgctgcttgtgttcccattgtcccagcaagaacacacgtatgctacatatctgcaatccaaaattgttggtacgttcaattctatttttctagttgttgcttgcatttggcctttgagacctgaatactccttgtatcttctgtttctttcgtaaactgcatatgggcaaggaatggcaacttagttaatggaaaacttttgaagtcaaacgaccctagattccaatcctgggtcagctgagtagtgtgagcctctgtattgggaactgggkcaacaaagctattttaaggagttgttaagagggatgcatgtgatagcatacataacgcattgagtgtcatgcctggccygtaagagattcttactggtgtcatttatttaagctattagccacttcgtgaatgtttactgaatgagtaaagcagaatgcaggggcattgctgctggtgtagccccaatgtaattagttgtaaactgaggatgtgaaaaaggaaaggaaaggaaaagaaaagggaaatcggtcataccaataaagaccaactgagatccataattcacaaatgacttggagacatcgattgtgtccaatcagtcatcaggtcagtcggtcaccagatcattatatgagtagctctactcattcctacagttgcccacactggttgggacctcaacatttctcatctggacttttgcagtgatttcctaattgctctcccttcctccagacctgtgcccatcaatttccttcattctctctattgctaatacagggttctttctattgtgtctcttctgctaaaaatatctcaggaactccccattgttttcacatttaagccagactcctttgcaggtagtaaataagyctttgtctttcagccttctgtctcttcaaatctctttgtgcacactctactccaggcataaaaagccttttccaacatagttttctaaaaaatgcttgggctttgcactgtctgtttgcttgatctaggattgaatatttgtcccacctgtggggtgacactgggcaagttgtattagattcttgtgcctcattagcctcaacatagttttaatagagtttttataacagggttttaatagtaatgcttatttcataaggttacagtgaagataaatgagataaatgagttattataggcagtgagctcagtctaatgtcttgtacataattgtgcattataaatcttatctatttcattatccatcacaraagtattgttgttgccacatgttacttcactccctgtatcttcatgcatgttgaaacccattcccgggactcatcctgtgacttatttctctaagccagtgattctcagctagggacaattttgcacccaccacttctcacattaggggaaatgtctgaagacatttttagttgtcacgactgggcgaatgggaggagatgctgaaatatagtgagtggaggacagggatgctgctgaatatcatacagtgcacagtatagcccacaacaaagaattatcctgccccaaatgccaataatactgcccttgagacactgctgtagactaactcctcttgatctttcaacacattttttctacttggagtatttaatgactggcactccacccaccacccaccctcaaccacagatgggttatataatcatactctggtctctattttaccacttaccaccttagggaaagtattagtttcctgtttgtctgctttatgatgctgtaactacttacaagctgaagatattgtcttttccattattatatcttagctactcaacacgatgtttgaatgtttgaaataactggggctcagaaaacatttattgattgaaagtaatttaatttgcacatggattttaaaattatagataagtatgcaaatattttatgataactgtataaaagacctgttaaatgcttgtccaataaagtgtactttcttcccagcatagagaaagaaaggaagagaggaaaagaaagaggaaaaatggttttcctcatctcctggggtaataattgaagtgagtgttcactccatccatgaacactgtgatattatcagataatagattaccttcttccttcccttccttccttccttccttccttccttttatttttccttttttctttttttctctttcataaagccatatttattaattctaccaaagtccacaatcctagattctacttaagccaagaagattttgttctctagggaatgtacctagggataaagacttatcttataattatagtctccttttacatagaactgattagttttcttcatacttatgggatgattaaaatccacctaattcttggctctgctttctctgtgagcatgtatttcttgcaagttcatcctattctttccagcagtctccattttgaattacagttttgatctcttcaactctttgttgatagagttgtgccctttctttttaaaaagagagagctgcagagaaggacagaggccgagtgatgtcagagaattaggttcaaattctgactctacccttcgttagctatgcgcagtacctgtcaggctttctcttagaacttctgtgagaatcaggtgaaataactgattttaacgtgttttatgaattgtcaaataatataacgtactagcagtgatactgcctaaggaatgacacatgtaactttgtgaggacagggtcatattgaaacaagatattaagaatcaaggccaggcacagtggctcaatcctgtaatcccaacactttgagaggctaaagcaggaggatcacttgaggtctggagtttgagcccagcctgaacaacatagcaagaccctcatctttacaaaaaaatgaaaagttagccagctaactatggtggtattcacctgtggtccccagatactcaggaggctgaggtgggaggatcacttgagtccaggagtttaggttacggtgaactatgatcatgccactgtactgcagcctgggtgccagagcaaaaccctgtctctctcaaaaaaaaaaaaaaaaaaaaaaaaggaagcaattcaattacatctagtttatatctttatgactttttattatacactgcaagtatccatggttaattgatatccttggggctaccaatgcaacttataaggccttttaaagtttgggaggaaatttccaataactctgtctgagcctgagctgccatttcctctctaaattcaatgcatacctttgtagatgcctattgtctcatctatcacatatttcaaggttatctaataggtctattcttccagtagtctaccaactcctgagtggcaggaagtgtgttttgttcacttttgtatcctctttgagagacacctaattcttcagtgacacctgcttctattcccctaaagacagagatggaaagttgcagacagaactttgactttgagagtcttaaatggaaaagactgaatcagttttctgtgaagttgcatagtggaagtaaagtagggacaatacagatggagaagtagaaaataaaaaccctgtcatgagtggaatcaaaaggccttgtaacytcagtgaaagtggcatggtggcagaaacaaaggcttaacacagctccatctctaattagctatttccttgggcaagtcagttaacttttctgaatttaagtttccttatcttttaaattagacagataaaattcatctcttaaaattgttgtgaagattcaggttcagaaaactgtggagatgtggtttggggccttcagagaggtcacacctcagtaaagcatggttgtgctaatttttcaggaataacggcaaacctgttcttgtttctgggaatgttttgccttccaagtagattttggttttcattacacccacaggtccttctcttatagggcctcttttcagatttacagccttcttcttggttagcctcaacttcttattcattggatggattaggttttggaaatctgttagtacttccttccttgactttcatttcaagaccaattctggttttggatttactgcttctaccatgggactagcccacccgcaagagaaaactcagtctaagataggatggatatgagagtcaggacatgataaaggatgcacaagtacctactgtgtgaatatttgataaacataattgagtatrtgataaaggttagtcaaattgcatttatcagtaatgctgaatcacttctgttactcaaagcacaaggatacttctccccactattaattctcatagaacagtgacaggcaatacaagtgtgtgtatatgttgagagggcgagaagctgagctgggctggagagagagttggtaaaggactgtttaataagaccagtaagaccttttatatcacctacctaagtattttgattttcttgaaagaatgaggagctgtcagaaaagccaagcagtatttgccattttagaaaaaaagaagttgaacaataagagctacctgcctgccaagtttgatattttctttctttctttcttttttttttttttttgagaaagagcctcactctgtcacccaggctggagtgcagtggtgcggtcttggctcactccaacctctgcctcccaggttcaagcgattctgctgcctcagcctaccaagcagctgggactacaggcatgtgccaccacacctggctgatttttgtatttttagtagagacagggtttcatcatcttggccaggctggtctcaaactcctggcctcaggtgaaccacccatctcggcctcccaaagtgctgggattacaggcgtgagccaccatgcaaggccaagtttgatattttctactagaaaaagttttagaacaaatttctctaagtacagaccctaaatttataaggaacatgctctcctatactgatgccgtgttctgtgaaagaatcaatgagtcctataagataaagtagaagccacttcttaaatttagtagatatgttattctgacccaaatgatgtactcctgctttcagaaggcagccaaaggagttgaccccatctcggatcattactacatgctctgttgattgggaagacccagccagtgcaatgcccagggctgtctctggtcacaccttgtctttaagtagttcacattggcaatggattcagcttatagtgtaaaaaaaaaaatgcttaagaattatatagggtgcggggtatttattttttaaatgcagattcttaggttctgcccctccctcccaattcttttatgtcaagtcaggtgtgaaatacaatgatttgcttttttaacaaatacctcaggtgcttctaatgcaagtggtcttcaactgtgctttgagaaacactaggcagggattaattcatatgctggcaaatagttacatggcagtgcccagctcgcattttgggagaaaaggaatcatcttccagtggttctcaaataaatgaagaaatcacttggaatagaataaagttcagaaaggtcaaggatagaagtcagaagatctgacaaacagtggtaaaactgtaattatcctaagccagaaaaaggtgaattgttttaaaattatagttattttttttaaattgtgacttatcctgggtaaacagcagcatggctctggtcttgagacaacaagccacatgcaaatagctataagcaagattatcagaaaacctgagtatttcattgttttgtcattaatctcaccatggatctcattctactttccctttagggttagcttccacaggcattagaaaatacagaacctgttgagggccaaaaaagtgatataaaaagattaataataataatacctttggaaaaaatcaaaagaagtgaggtttcccagtctaaaatgagaagaataaaggttaatgtagtaaacatgttcatgtattgaatattttacttagagaaaagtttgcagtcaccatcccccagtgagaacagaagagaatataatgggcttaaaatactcaatgaactatttaaagtaaatctatgtgagaatatcctaaaagtgttaaactttatacaaggttataaagggaggtgttgaaaaggcatattagtctttggagagttttaaaaggatatatattctccctctctgatatggttacacatttgcttctatctcaaacactgcttatagtttggtactctctttccctgtaaatctaggactccatggatttaaatgtgtttatatttgtattatcttaaagcagtcaatagagatattttatgtgtcattatcatctgactactacttccaaaggaatttatgtaggaaggagttgggagtagaaaggtggggccttgggacaaatttaacttcattggagtggctggattactgaaatggaggtggaaagttgtattgtttttacacatttagtagttgataccaacaatggttccatcactaattcaatccatctgttacactattccttggattctttcttctctgttktcttggacctctctctgcctcccttttattatttatattccagatggtagccctgttagctgtgtctgggacacgtgcttattgatcactcatgggcactgcctgctatcctgctgcaactctatgggatgcagaggccaatatataactcaggtggtggaaaataagggcataaaaattgagggttttcgtaccatttttcttgcccagagttttagccaagaagaggtagagagtagctgaagcctgactaacaagtcgtaattgaggggatgtacttcattctgggatgtgaaaggctgcatacaggcctggaaatgagaggatcagaggaggggatggggaaggttagcttgccggagacattgcccgaggaatagtggcaatcacgggcttctgcatcatgtcggaccctttcagaggaaggggtttgtcactttgtggagttttgtctccttatttttaggacaagatgcagtgtgtgtgtgtgtgtgtgtgtgtgtgtgtgtgtgtgtgtgtgttacagttcttcccatttgaccctgtgaagcacccctgtagtgtggtaaaatctgtcagcacattcagaaattctagagctctttgttctaaaaagtgaaatgaaatatgtggctaagacactccagtgcagacgccccacattctctgtggcagtgaaaatgggctcaggcccacctttaggaaaacaggaaagggattttctcccaagattacatacttcaagacagaattcaggcaggcagttttgcattcatccatagagctcagatgctcaggacttccaagtgacagcagttgaaacctggacctgtgaagaactggaatggtttagggggtcccaacctttctggaaccagcgactagtttcatggaagacaatttttccatggacagtgtcggtggggggagtttcaggataaaactatttcacatcagatcatcaggcattatttagattctcataaggagcgtgcaacctagatccctcacatgcacagtccaccacagggttcgtgctcctatgagaatctaatgccaccacaaattttacaggaggcagatccaggctataacactggctcttccaccactcacctcctgctgtgtggcccggttctaacaggcagcagaccagactggggacctctggtctagggcaatagtgtggttctggaccagtggcagcagcctcacctgggcacttgctagaaatgcagaatcttaggccccactctggacttctgaatcagaaactgtgggggtgaggtccagcaatcagttttaccaggcctttcagaggactctgatgtacttgcaggtgcaggattcgctggtctagagtgtggggaaaatagtwgcagaagaatgacagttttgagggacttgaagaatacatcaacactaaggttgcttctctgatcccgaatctctttcctttctgttcccctcagcttcataatgaaacctgttcaactcttccttcctcagtcttttctatctgtaagacttctattattacactttagtaatatattttttatcactggatagtcacggattattcttaataaatgtcaaggcttgaaagtataatcacagcccaaaatggacttagaagtgtgaccagatggaattgctactgctctttcaaaaagcatctcacttgagtatgtctctatgaattcttattataaagagaaaaatgaatcttatttgtgatawctgcataaaaaaaccaatgttctatttcaactttatcacttgtgcattgtgtgatagttgtttaacttcttttgtttcctctttatttatatgttgtcatataaatwatagccaacaattaaacttctctttgccacacttcagctgtttacaaatcagatataataatcattccttccctgtttctcagaaggcacatcttcagggctgatttttcttttaattcttgccaagttttttaggatctatgagtgaaaaggggttataaaaatgctaattagggtagggataataatggcctacaagccaataatagggacagctactagacttctagcagggatggtgtaggtccttacaaatctaaatctaaatatgtgttagacatattaaaatccagagaaaaattgaaaatttgcttaagttggaactgtcttccaggctcactacctgccaaattctaatccccttgagatttgtttgtgaatttcactgccagttttgtgcaatatctgcaccagcctaaaatcccggcatgtctttaagcttgtctagagtcccatttggttcagggctcaacttcagattctccagctggaatctctgaaaatcagattccaaatgttaattaggactaggttttcattttgaaagctaaaaccattgcccccacacccctacaccccctacctttccacctccagctttttaaaaaagtaaaacattaaaagcacaaccaaccgtccaaattgtaaaacctcatctagattaacaacattcgtgagagtttatgcttgtctaaaattcctctggagcygtgctgtgacttcctggtaggctctctgacaggctgcatttttgcttcttttgtcctcttggccttctgggtgggccactttctcactctgttaattttctttatgacatctgttatccctttttcctcccactccaccctttttctgatttattctgggcttttttgttcttttttttttggggggagggttctttttctctttcactgtccttccctttttagcccagacttgcagataatttaaatattactcgcctgcagaattgccatcacagaaatgctaccatcttttctttaacctgccagaccttcagctgcttcttaatgattttgctgaagttataagaatgggcagcatgcaaaattatgtctatagataactctagattctcctcttttcacagggactttgctcaactaagacttctaattgtgcttcaaaactgtgttttaaatgcattctaatcatggcacaaatacattattgagattattcgtgaatcctataaggcattgcttattttacaatttaccatcatggtaattgtcataatttcttaattaaataatccaatagacaggctctttcagaaagttcataaaatttgaaccatttccaattcattctactaacatagatgttcatttaagtgaaattattttattaaatacttatttattacaaggactgagtgctagcaatgcattttactaattttcttacaccttttttttttcttaaactattattttaagtttaagggtacatgtgcaggaagtgcaggtttgttacataggtgaacatgtgccatagtgatttgctgcacagatcaacccattacctaagtattaagcacagtatccataagctattcttcctaatgctctccctcccccaaccaacctgccccgacatgccccagtgtgtgtgttgttcccccattctgttcatgtgttctcatcattcagctcccacttataaatgagaacatgcgatatttgatttttcattcctgctttagtttgctgaggataatggcttccaactccatctgtgtccctgcaaaggacatgatctcattcctttttatggctgcatagtattccttggtgcatatgtaccacattttccttatctagtctaccgttgataggcattttggtttattccatgtgtttgctattgtgaatagtgctgcaatgaacatacactttcatgtatctttctaatagaatgacatatttttctggatatatacccagtaatgggattattgggtcaaatggtatttctgcctctaggtctttgaggaattgccacactgtcttctacaatggctaaactaatttccactctcatcaacagtgtaaaagcattcctttttctcttcaacttcaccagcatctattgtttctttastttttaataatagccattctcactggcatgaaatgatatctcattgtggttttgatttgcatttctctaatgatcggtgatgttgatctttctttcatatgtttcttggctgcatgtatgtcttcttttgagaagtgtctcttcatgtcctttgcccagtttttaatagcattgtttttctcttgtaaatttgtttaagttccttgtagactttggatactagacctttgtcagatggatagattgcaaaaattttatgcaattctgtaggttgtctgttgactctgatgatagtatcttttgctgtgcagaatctctttagtttaattagatcccatttgtcaattttggcttttattgcaattgcttttggtgttttagtcattaaatcttttcccatgcctatgttgaatggtattgcctagattttcttctagggttttatagttttgaatcttacatttaagtttttaatccatcttctgttaatttttgtatatggtgtaaggaaggggtccagtttcaattttctgcatatggctacccagttctcccagcactattttttaaaaagggaatccattcctcactgcttgtttttgtcaggtttgttgaagatcagatggttgtaggtagcagtcttatttctgagttctctattctgttccattagacaatgtgtctgttcttgtaccagtaccatgctgttttggttactgtagccttgtagtatagcgtgaagtcaggtagcatgatgcctccagctttgttctttttgtttaggattatattggccatttgggctcttttttgcttccatatgaattttaaaatagtttttttctaatcctgtgaagaatgtcaatggtagtttaatggaaatagcattgaatctatgaattacgttggacagtatgaccattttcacgatattgattcttcccatccatgagcatggaatgttttttcatttgtttgtgtcctctctgatttccttgagtggtgatttatagctcttcttgaagagttccttcatttcctttgttagctgtattcctaggtattttattttctttgtagtaattgtgaatgaaagttcattcattatttggctctgtgcttgtctgtttttagtgtacaggaatgctaatgatttttgcacattgattttgtaacctgagactttgctgcagttgcttaccagcttaagaacctttttgctgagacaacagggttttctagatacaggatcatgttatctgcaaacaaagataatttgacttcctctctttctatttgaatatgctttatttctttctcttgcctgattgccctggccagaactttcaatactgtgttgaatgggagtggtgagagaaggcatccttgtcttgtgctggttttcaaggggaatgcttccagattttgcccatgcagtatgatgttggctgtgggtttgtcatatatggctcttattgttttgaggtatgttccttcaatacctagtttatggagagtttttaaaatgaagagatactggattttattgaaggccttttctacatctgttgagataatcatgtggtttttgtcttcagttctgtttattacaccttattttttaaagtatatatgtatatgcatacatatgtgtgtatacatatgtatctgttcttttgactaacccaacagtaaagtgatgacagaggaaagggcaacactcctaagttgattacaaatatttgtaaattgcagcaaacagcatgcataatgaaaataatgcacacttcaattcctgactaagaggtttaaatctcagctccacccttatatttatttgtaatattttaaaaaattaattttaattctataaaagtgatacatgtacctagtttgaaaagctagttcacacctctaggtttatttggaagactagcagttcctacccctctgctcctaacctcagcctctctcagcagaggccatcacttcatttttgttgttgtttttgcttcacctgtttcacttatttcttctgaaaattacatatatacacataaacatgcatacatgtatatgtattgtaaaccaaaagttatctgagacaggtctcaatcaatttagaaagttcattttgccaaggttaaggatgcacccatgacacagcctcaggaggttgtgaggacatgtgcccacggtagttgaggtacaccttgcttgtatacgtgttagggagacatgagacgtcaatcaacacgtgcaagatctacactggttctgtaaggtaaggcaggacaacctgaggcatgggcctccagatcataagtagacaagaggcaaaaggttacattcttttgagaacttgatcagccttccactgaatccacaatttagtctggttcagtgaatctgcatttttacataaacagtagggcagaggaagtattcagatatgcgtttgtctcaggtgagtctcagagggatgcctttgagttctttccgtcctttttccacaaggaaccttcttgtggacaaattgtgagggaggaaggtatgtggcttcttatctttgtagctatcttatttaggaataaaatggaaggcaggtttgtctgacatagttcccagcttgacttttcctttggcttattgattgtgggatcctgagatttattttcctttcacagtgtatatatatatatatatatatatatatatatatatgtacacatacacacacatatataaaatttatgtgtgtgtgtgtgtatatatatatatatatatatgtatgtatgtacacacgtatatataatgcttctactgctaatcttaattttttgatttaggactttatctcctgatttcctaatacaatagatgaggttttagctctctgacatcatcacgcacacacacacacacacacacgcatacacactcctgcacttttgcctttagaggtaccagatgcctctaattcctgagctttctgttggttctaggtattctaggcatttaggtttctgctttcctgcatctgctgtgtcagctactattcatccatccattttccagttttctaatgttgttgacttatttatcagctgccatcatctctcctgttgtcttttttttttatgagttcatgccttttttgttccttttttatactaatattttagtggaacttctggaagggaaagatataaaaacaaattcaagtgttcacactttgccagctctaagcctgagagataataaatgcttggtgaccagtgtgctattactactaactacttccttcaacagagtctgtgcctatatggaagaaaaagaggcacctgatagagaagatgtctcttactttgctgttttttctctctgttgtctcttctaaattcttatttcacctaaagtcaagcaaagatctcttcaaggtggttaactcctgaaagtataaattttagatagaggagcacttattaaaggactgtatatttattgtgaatgaatcatgttagatcctaggaatataaaggtaatcaatagaaagcacagaccccatctcctaggaatccccagtctgccttggggagaggtatgttctaagcgctaggggatcagagaaaagaaagtggttgtgtttggggagcaggcaagaggtgagcatgggacataaatttggggaagatttcataacaaagtagcactcactcctggggccttgaagaataataattccactagttggggacaaagtggaaagctccatgggcagagaaaatactatgagcacagggcacaggagtttgaaaacacaagatatttagagaaccactagaggatggagcatgtggaaaactggagtctgcagagagtcttgggccagattaggaagagtgttgaatgctgccgtgcttgggatgtaaactttttctgaaggcattgagaagcctgacacattttatcaccaggaaatgacaagatcagatgtgatacattgctggaaatgtagtccatggaagagtgacgggtgataagcagaatggttaggagacggtgtccgtatttcaagagagaaatagtgacagcccagacaaggcaccaatagtatagataggaagaagtaatcattgaaagcttttcttttaagatataaaattgattctagaattccatccaatggaggaaatgaggttctgaatctaactccctggtgcttgggtagatgttgaatgccattaacctctgttaaaaaaaaaaaaagaaagaaagaaaagaaaagatgcaggcttataggagaagataatgggcttggctttagactgagtttgttcagtagaattggaaataaaaatctggatttcagaaacagagtctcagctggggacttatattgagaaaggaggaacgtatggatgctaattgaaggcaggtaaatggatgaggtcacgcaggagtgtgaatggggagaggaggtaggtggggaaagacatagaggcaggaagttagcagaggaagtgaagccagtcaaggggacagaggaagaatgactagagaggcggaaggaagaaaaggaaggagtggtcttaggaaacccatttaagaagggaggcctaagggaaaaagaaatggtgaagagtgttaaatgctgccaaaagttggccagcacaagaagtgagatggcagtaacttgagtggaaaacagttcatggaaagacttttgagatgaagagactgraacatgtttattggctttgagtaataatctgattgagagcatgaagactaaagataaagagaagatataagggattacagatactgctgcctctcagtcaagagtcaagtgagaagggagtaacaataactaaagacaaagtttatagagtagcagatggaattcaagaattcaaggtattttatatgcaatggtttcttgtttctctgtgtggactttcccattcctgtcaatggcaacatctgccgtccggttgctcaggacaaaatccttgatgtcatcttaatttctccattttcctcatgttcacatttagttcatcaggtaattctattagctctacctttaaaatatatccacacaccagccacattttaccatctgacccactgccccccggtatgagccatcatcacctgttacatggcttattgcaagagcctcctgactggtctcactacttcccctgcctcttcacagcctaatcccagcatagcagccagacagtcctgttaaaaatgtaagtgaaataataatgctcctcagctgaagccctgtggcaattccccacttcatccagaataaaagccacaatctttgcaatggcttacctagccctccacatgtcccctctctgaacctgtgactgaaaattgcaaccatcttcactctcttgttctctgcccatctccccaccactcccaattcccttatactggccctattatttagtagaattatcactttctaatttgctgtagagttatttgttatgcttgatgtctgttttccccattggaatataagttccacggggcattaagttttgcagattgtattcactgttatatctcaagtcttaatacagtgacgtagtgactggcacatggcagatggtcaatagtttttgagtgaatgatggaggtaagaagttaagggcatccacatgtcagggggagggtcagcagcagggtagtgatcttcagaagccacttgaccatgatagagaaaggaaaattttgctgacttgagaagagtaaarttggcaagagatcctgaatgttatgagtcctttaaaagtcttttctattgacagttttgttgttgttgttgttgttaaattaagcctatggttagcatcactctgtactgggactctggggatgaggaagtttggtctctgagggtctcttcagctatttgaaggctgtttgtacattggagaaagaagagttggttccacttcttgcctttattctctttggttgtgtgacctcaatcaaagtcatttaacatttaactcttatgaaaaagtatctcccttgcttgacatatacagttcttttggctctcaaatgagataatgtttgtgagggcatttgtagacamtaaaatgctacacacatatgggattatcatcattgtcatccccgtgtgagaagtcttctgaagcaagccaaggctgagccgaggcatagccatactgcaggtgatacatcctgtgtgctgcccactttgagtcctgaccaaggaagcagaatgccttccaggagttgcatacataaagctgcagcgtgatctgataaagagaaagagagcctctgcactttcagtgcagtccagcttaaagcctggaactagtttttgcatctctttgaatctacttgagtgcaggcccccaaactgggtatcagaccttgattaaggagactaacaacagcccagatctggggcttcctagtaaccccccagcaccagctgagcaacttggggtaactttccttcagaagctcctcttgggaggatgcccacactccatagggggtacaaatcctctaccttatttggcctctatttcattgaacagagtgacaagaaaacagcaaataagtctttggatacttaaccaaactaaaaacaaaacaaaacaaaaaaaaacaacacgcacctattttgaaaacatggacttgccccatccttgtctccaaagcccagtgatcctaagtaagccttttggttccagtaggttctccatagccttttcagtcgtatacattgtttttctatttaagatcagtaatgagaatttggcaggagaaagattcaaatgggtcaggaggctcttgtggcttttctcgggcttgttttccacagttcattctagcctgcaacatactttgcaagaataaattggctggagatctaacccatggtgagaggccgccactgaggcagcatttcagaatagggagactggagccatgatcagccttcctgaagcacacagccggggtgtttccttacacatgcacatgcacatggcagtgtacactggggatcctcatcgagaacagatgttgctgcccactgtgccagccacatgtcatgcatggcattttcttctgctaaactcctggcaacagcgtttttcttttcttctcccttccctctgcctcctaccctcttttcccatctcctacacccacagcatgtgcaaattctctcctgattcatacttggccagcctcatatttttgttgttgttattgttattgcaaacattagaggcttccaaagctggggaaaaaaaagtaaaagaaaagaaaagagaaaaagaaagaaaccacaacaacccccaaaggaaatatgttctaacccaggaatgtacgatacttcatgcatgggaagcatcttcccacctctccaagcttagctacagaaacaaaggctccaaattccaacacatgaaaaaagaattaatccagcttttttgtatgtgcctcataccatttttcagtctaaaagtctgctgctccccccaatggctaggatttgcaggaatgtcatagccttcttctcaacttacaccatggttacaaaattatgatcactgcttcaggtccatttatgtatttcttcagtgaaaattatattttctgagtacctacgatgtgttgagattacaaaaatgaatcagaaattcccatcacagtgtacacaatagagataaaaaatatcaaattactatccaatgagtataagccgataatacaatcatatgaataagggcatatgggagcacagggaataaagcaaataacttatcctaattccatggagaaagttttatagaggggtaattatttgaartagatttgaagcataaataggcatgaaaggcaaagatgtgaaaggaaatggcatgaagctgtcatcaagtctttctgtaataaagctgcataacaaaataatccacaaatataaatgtcttaaatagcaacttctcactcatgcatctacaagttggctaaagtgactctcttagtttgtggtctgggttcaagtttactttatatgtctctccctcagggacctaggctttagagtttcacggttagcagctacacagggcatgttcttttcatggtagatagctgggcacaaaagggtgagttaaggcatgctcatgcatttccaactttttgtcaagtgtagcatgtgtcacatacatttatgttccactagttaaggcaaaccacatggctgcatccaaagttagtaggaagtgaaattatgctctgctgacagtggactcatggcaaaggaagggtgagtaaaaagaatatagacaaagaataatatctactagtcagcctttgcagtcgcaagcattcgttaaacacattcactccaccctatgccaagacactccaacagtcttatccagtcctagcatcaggtttgaaatctagaatctcatgattgataccagattgcaatgtagcttctcttaatctggagccttatgtactaaaatcacaagctccctgcctcccactcaccccacatgcaaagtggagcagaaataaataactacaataaacattccctttcaaggagaaagagtgggaggtgcataaagcccacctctcattctttgagcaaaagttgtaaaaccactactgggagagtagggagcacttcttgtttagaaactttcgattactccctgggtgtcacctcctagttgattgttcttcatgactcttggctctgatctctaaggagtcttcattttccaccatctcatttggtcatatattaaaagcagtgaggaacatccacttttggaagctgagtatctttcttaacttccttcctccttgtagaatatagggggcccaaaggtcactaacagtaggtctcttacaatccaggttgatagtgattttggcacctcaactcccacaaatttgattgatttttgtatatatttaattccagtaaaattcataaggcaagagctatactcacaagtcttttcaagaaatgcctctcttaataaatataggtattctgagcttatgaggcttctcttggacaaagttcttaggctgtttcctcagagtccttttgtaaactgcaaggatctcctacgtgttgatttaatccaattgaaggtcctaacaaatgatgtaatggttcactccttaatttgtttctttgcctaacattgtcttaacttcagtcttagaaggcctttctaatgcagattattatgaaatttgatcttttactggccagagataagaaacggttttatttttcagtactacaagttttagaatttctaataatttatattcccggtcaattctactggcaaagcaataaccttttctgcactcatctcttctcgcagtaccttatcaaattaaggtaataaccaccaactaatcctagtaatattcttcttcaaaacttctttattcaaagccaatagggcattactaaatttttggcctgcaagtaataacaattaacaatataatttctctttcaagtaactataggaaacattttatgaaatactttgctaccacataaatgaagaacrtaatttttccagcctcctgaaacatttattttgcttcctgcccctccattccagagccaatctcatacattttaggttttttgtttgtttgttatggtaacattttacttctgatactactgtctgtattagtcaagtgttcctgcaataaggtcacataacaaacaatccccaaatgtcaatggcatataacataaagtattattagtctgctcagtgaagctgatcttgagggagataaggaagtatggaatgactcaaggttaaagaggtaaataaaaggtagatcattagatctctggtatgccaatctaagcaatttgggctttattctgcagccagtgttgatccaatgagggcttataaatagaagaatatgaattaatcaaggtaggctgtggtcataaattaaccctaaaattgcagtgatttaccattacwtttctcacttacattaagtctggtataactctctagagcagctattcatttcttccatcttattactctgtcctttcaaaatgtgatctccatggttgcctccttgargacagaggaggaatacaaagtgaggccggtaactcttgattcccttggactaaaagtaatgcatcatttctgttggtcctcccattcaccagatatggtcacattccctcagcccataataagtgaggcagaacaatctgagggaccacagagatatctgtgagcattaagaatctctgtaagagagaaaagaaggtaggatgtatagtctaagaagaaatcatggtggcaaaattgaaccatggaggtcagggtgttaccatctctcacctgaactaatgtaacagccccctcaccaaactgaggaagtgcaaagaaaggagaaaagagtctgaatacaaaattatgtctgcartaggatagtatttgtttgctgggtgtaatgatgagagaggagttaaagataaagtaaacaggattggaaagatggcagtggtggatgacagtaccgtgggcttgcctcttacactgtctcagtttgctctgaaataagctcagtcaacagtttatcaacacacattgcttgaacatctgctgtggggaacaaaaagacctggttgctgcctgcatagttggaggtgtgtgctatttgtatgtgtttttgttgctgtatctattttgaatgtctggttaaccagcttctagttggcaggggccatgttgaatttttctgtgtttatactgccacacacacaatcaaatttaatagtaaacatcctacaagtagttaataaatattcacatttggctaagtgatgctcattttattctcttctttggctgttcttgtcatatattccttgggaaatttcttatgcattaaatatagaatattgcagttcagagctagaattagtactttatttctaatttattttttaattagagaaaccaagtagtaaattgaatatgcattatccagatgtgaaaacctttgaacaaacagagatgaaattgactccccaatgtcctcatgtttgcctgccggtttggaagtttaaaatagttaagtttaatttgcacctctatcgctcattccccaagtgaccttggggcacgaccctttgtcccatttttccccatcagtggaatatggataatcatattaatctgcctcaccaggcgatgtgaggactaattaaaaatgagattagattcaactgaagtctttctaatgtgaaaaatattaaacttggtgatgcatgtctgaaatgctgttagggtctgggaatggtctctggctttagaactgcttgtgaccctgatgrcactacagctaagactggagtgcctgcaggctgcccatcttgctcattggccagattgcctctgacctggttccatgtcctgtgggcccagcctgagcgccaaccctgtgtggaattgactggtaactggtaagctaatgatctgttcacttcttagtgcttcctcggagacttacttcctgcctttcctcctcttacctccttttcctgacaggatctctggaaattctttggattgatccatcactaaaatagttaaattgataaatttaccaaataacttacgtgttttgctcatacttacttcacccaggcagacaatgccctgatgcacagagccggcttttccrattgtgttttataggtacctacctctactaggtaattttaggggtgttatgcatggtctcatttatcccccgagtagttgtcttccaaatgtggttcataaagtagcaaacttcttgtaattaatttcatatcttgccttattcttttatcttttatttaattgcagatacatattagtccttgaccctctagtatgtcagcggctttccagaggaataggaaaatatgcagatactgtggcagggatggagacattggttatgggggtcgttagaaggtgcaaagagttcagcatgaaggtggggacgatgagaaaagaaaggagagactaggagactcaagacaaacttagatagagcattgctgctatacctcagctatcaatagaatctaaggtaattaggtactgcagataactttgattattgtatattttgtttgctttgaaaccatgttacgtattatatccccatagttgagcaaggtaaatggtaagatccctgagattagagaacaccgttaagaaagaggaaaaatgtcaaagtcactaagtagccactttggcagggctgcgctccaccctcacagacagagaaccattgatacgaagagtatccaggcacatttagctcaggaaacaaacaaacaaaaaagacaactggggattgttcagtatattgaataacattattgagtgtttttagcattccacgtcacrctatgaggaattattaccattgctaccatccttgttttactgatgaggaaactgaggggctgagaatttaattaacttcccaaatctcctgagctagtaaatatgggaccagttaatgaacctcggtagtgtgattctagagtccatgttcttagactggtaggaagattaaaagcaaaggaacaaataaatgatgtataaactagaaatgacttttagaaaatacaactgagagatgaagatggagtgctgacaacctgttaggaaccctttctgggcttgcaagatttaaaccagaataaatggaaaaggagatatgccaatgaactctgcttagcaaggatcagagaccaagaaaatgagagcagagaacatgttgtgaaacagatgcagtcaatcagtgatgagtggattagatacacagacaagcatcctggagataaagggaatgtaaacaagacactcgcacagagaataggttccatatgggtgaaagtgagactggatggaccaaccagttgggggagaaaggaacagctggtccaacaaatcaggatgtgtggcaggttgaggatcagaagcacaatgatcagccacacaaactgaactgtccatagacatgggaactaaatattagactgaagctaaaagaaacaagactattggcaagaaaacattctggaataaacatgatacctccctcttgccatttttcaggtcaactggacctggatattactggggatgataaaatagttatgtctaaattgtggaaaaagtctgcagaaattgggcagaatagaaaatgtgcggggcccctctagacctgtgtttacatatacaggaaaaaggaaaatttgtagagcttctcactgtgagctgggacaggtcttgctacttaatcaagatctatgtcccatgactcagacctttgattgtggtaaggataccttctagatagattttcagtgatcaaattattttagaaaagtgcatcatgatttgaacagtcaatgtcatagataagccttcatctccactggtcttctgcccatatatgacctttcaagtggtcctgatgactttccttcacaaaacccctcctatctgcctttttctattccatattatggacagccagttctgttcttcttcgttcatattgcttgaactcaactcctacttggtcctggcccttccagttgtcttctgaacgttccctgtattatctccagatctaaccttcaaaacacagcttttatcatttcttcttctggaaaaaaaacactttagcttttccctattgtcttcagaatacagattaaattcttctggatggagattttgagttagttccaaacttgcatcattaatatttgaaagagaaaaccacagatatatcttttcttttaccatctgaaatgtcagcttatatttggccttcctgctggggttattctccccatttctctgccaaaatcctatccattcttcaaagattaggtttaatcccatgtaccccataaagcctttctaaaatgctccaggcaggtcctctttctgcactgctatcattcttattagtggtaccattaattactctgggaactgaccttccatttacctatgatttctttcctatggtcttaggtgcagttcagattctgtattatgcagcactcatgccacaatgacttctttgaggcaaatactttgtcacccaggaaccttctgtggtgccttgtgcatagcagacacactaaacacgtattgatcaaatatcccaggattctagcaactaaccctatgcctggcttatagtaaaatagatgttaatttactgtatagagtaattttggcaaaatgtaaaggattttttctggataattataaaagaaagttttctatttttcctttaaaaaatactatataatacatttctcatggctatctgtgacattgacttttccttaggcagaaggtggctgcctcattctcatagtttcagtgagaggttagaccaggtgtacagtaccaagcagtagagtgaggcatatcattaatacatgataacaatgctggaggcagcatgagcatatcaggatggtcagggcacaggcctgaacaccagacaatggctctatcgtcagacacattccctatcatcgtgatcagacacattatcatcagacatattccttaacagcgccagtttttattttttttcacctgtaaaatggtcataataatgggcccaataacagagctattgcaagggttcataaaaccacatgtacaaaccttgtagtacacaccacacacctatataaaacaaaaatagcattttgcttctatataatggtttgtagtttgtaaaaacagttttacgtttaggtttgttccttataccggaaggtttcagataatttgtgtgcatctatacgtgcgtataaaataaaaatatactttatgttacagatctataatatagattatatattattaattattatacacatagtataatacatatgagaaagggagaagcatatatatgtatcatatatatttaccacatctatgcatatgtgtatataagtacatacaaatatatacatacggatatatgtatacaattgcatatacatacatatgcacatgcattgcatagatatgaaagagaataaaagagagaaaacaagtgctatgaacactaacaaaaggccgggcgtggtggctcatgcccgtaatcccagcactttaggaggctgaggtgggtgaatcacgaggtcaggagttcgagaccagcctggccaacatggtgaaaccccgtctctactaaaaatacaaaaaattagctgggcgtggtggtgggcagctgtattcccaactacttgggaggctgaggcaggagaatcttttgaacccaggagatggaggttgcagtgagccgagatcatgccactgcactccagtctgggcaacaacgcaagactccatctcaaaaaaataaataaataaataaataaaggaaagaaaaagaacactaacaaaaactcaaagaaacgtagattaaagtttaccccaaagtgaaacactttcatctttgtaaagagctggatgtggtatcagaatgggaaaaggcttgtcaactgctgtgctttctttaaacagttctcaccttagcagtctctgcttaatcctcaaaattcctctcaatgtacttgattgctgagaaagagagggaaggatggaagggggaaggagggagagaatgagagagaatggggaaaaaaaaaaagatgctcagcaaacagcaggagggccaagaaaaatatttaatccaaacaaggcatacggtcgtttcctcccacagtctgcattcccagtcaccttccacaggcgggctcagggagccaagaaatgctggcctgcctggcatgtgcctgcatgcggtgaacaggcagggatgagcacgcatgctggggctgtggtggaacattctggtcaccagctcaggcctgcctcagcctcccatgaactgaatgctggccgaggaaccaggagacagagacgaagggaagttaaggatcaaagtccaaacaggacctaacagtctgtcccgggccttcttgtggggtcacatgcttttcctttcttccctcagctgcatgtaatctgtctctgacttgtacctgtctcctcatcctttcatctcccacagctatgtaagctccatccagacagagcatgtaccgcctcatgtttcaattatgtgggatgtggccttgtgcagcagctggccaagggcccagagaggaggggcacagtgagtggccacctagagaggtgaccagagaaaggcactggaaggtcccaccttactgggcaggatgcctgcagtggtctgaaattctgctctcaatttcattcatctgtagtcttaagtttgatgtctggaagagtctactgtgaatgagcctatgactggaaggccacaccaagctgttttcaggtgatattttggggtgagtaattgatagtgaaaacaaatacctgggaggcaaagggacaagataggggaaataattgggcatggtggtttatacctgtagtcccagctacttgggagactgaggcaggaggattgcttgagcccaagggtttgagaccagcctggacaacatagccagaccccatctcttaaaaaataaatttttaaaaacagacaaacaaatagatgacagggggaatgtttaccttatcttggaggaaaggtaagaggagtgaaatacaagaactgttttgaatttttagttttatagagttaattctggagagaattcactagtttaatccatcaaatattcattaagcacatattgtaatgtattggatactgcgctgatgcacagggtttattgctgatggaggaaaagggaacagaaaagagacaaaaatggaagtgttcctgcccccacagtccttgcagagttgcggacctcttttgttcaaggtttctatgtctgaccttaatacacagttggttggctccaattagctgaaaagggaagcaggatattccctaaacaaatgattgttaatccattgattgtttaaagaagagagccaaatgtcatgcagtaagactgtatctgaagaccttgcagaccatctacaccactcccaacatgaaagcaagaaaaaggaaattacaagaactcatgggcctatcagccctgcaatggggacagtgaggtctgatggtatgtcattattaattcttgtaggagcccacggcacagactttgctgtgtcacaaacattggtactatggaagcctggcaatgagtccacctgatggactgctgctgttcctgggcagcattttaagaagcattgctgtgtacttagaagaggaggaaggatgacagtgtcatgaaaacagtttttgacagcaaaggattgggaatcactggaataaaatcttgacaaatgaattgtacaggatcagcttcactggagaaaagggggtcacatggaggacagcaaacactgatggaggggtagacaaaagttttttcggtttttgtttgtttgttttaggacatggagttgggtttggtgcagaagggtcaaggagtgattcagtgcagaaggaataaaggtggttggggaagtggagcactgggtgccttcacagccttcaaagtgtatcttgtgtagttttggtaacaggtgagggaagagatagggcaaaaggtacccaacaccttaccatcagcaaggcctctgagtcagaggagggccaggacacattcccgtcaggaatggctcaggctgcagctctcaacaggagggccaataaaaacttcacagaagtgctgttgttttcagtagggccctgtgcagggatgttctgtccttaaggagccaggcttcaacttcgagttggtgtttttcttgcacaaatgtgcatggatatcacctgaacactgtctttcccattttcaccctttgggactataactccatccaccagcactgccctcctcctggccttgaggtgggcaagaccactcatatagaactgtctctcccagaggagagactgcatggggaagcaggtcagtgtgtgcttgcagtgaggtagagagtttgtgtgactttgagtctttatttgcaactatttgaaaagggccgtgaggttagttttggctgaaaagtaagtcccagagagtctcctcaccttcctgttttcctgcagcacatatcagagaagaaatatctgtgtgatggtttggggtttttttcagaggctaagacacccaagtcaccattatggtttttgaagagagccctggtttccaggagccaattagaccatttcttttctgtttttataagtttcaaaactgtttcccttgtcacctgactctgtctttcatgactcaggtacatgcattggtggtaaaagtgaatggggaaggaggctctcagggatggagcatgcctggttttgactaaagtgttggtggcagaatcttgaagttttctgaccagagtctctagggagacaattcaggcaccaacctgcaatggtaaaagcaatggtagttttcttgctgctttcataaaattatgaattattgaatgcttgctataggtcaggcattgtgctatgtgttttacctccatttgctcatttattccttgcagcaattctgtgaggtaggtgctatttttctcattcactaacaagaacactgctgctcattgttaagaaattttctcagattctgattgttggtaaggagcagagctgggatctgagcataggtttatgtaaaaccatacgctgtgctcttcttttttttgagacagagtctcactctcacccaggaggagtgcagtggcgcgatctcggctcactgcaatctcttcccaggctcaagcgattctcctgcctcagcctcccaagtagatgggattacaggcgtgtgccactgcacctggctaatttttgtatttttagtagagacagggtttcttcatgttggctaggctggtctcaaactcctggcctcaggtgatccacccacctcggcctcccaaagtgctgggattacaggcgtgagtcactgcacccggccatattctgtgcttttaatcaccatactctatagccttgatagtttctggggcaggaactattacgccctgggtaccttggagtaagtgaagtcaatacagatgaaagatgtcttttttatcttaacgtttgcttgcttttcttttctcatctaatttttctcaactatttctctcagaggagattgatttttgtcctatttgattatttctaagactttgctttggtcttggtgtcaaatgtagataagctgattataatcagccttctctttcaggctctgcagaggtacacatttgcctttttagagggtctgctgggttacacaggcygtggtttgaggtcctacacagaagatgtactaccacacatggaccagtgatgcatgagaggccacacaagtagacgcgcagtcggcattcctctgatcatccagcaggatgtgtatcttcattgtctttctttcaattacatcttctcatctcttgtttgtagattccacccttgcccttccaggagatactctgtacaacttcaactgttagccgaaaacacagaagatccttaacgtcttactgttagtgacttagccaagggctggatttgaatcatgtagacttcagagctggtaggcaggagcaaatctcttggctcccaagtgagccaagctacctgcggagcatcataatgtgattgtgtcattctgtatcagtcctcataaacattgtctttttattaaagttctaacaggattacataaaaactccctaccttacaaagggccaagacctaggcccttattccagatcacctgttaaaacccaaccacttgatcacagatatttgcaaacattcctaggacagccatggtttactgctttctttctgctctggtttacagtttctttgtttttggcctttgggaaatgttctttttcttcttatgatgccagatgtgaaactgagagaatattgttakgttttatctaacattttagatggtttatagaggggtaattcttacatagtatattctactgccttgtcctactttctggctgaaacgtaagtatgatacacctccaaatgtatggatgtgtaccatgttcttcacttagaagatgatctacatatatattatatacatacacatgacctacatatatatgtgtatatatatgtgtatrtgtgtctgtgtgtgtatatatatatatatatgatttatttcaactccagtgtctacagtatatgcatttatagtaagaaatagagtagatgcccataaaatctggacctgtgtctaagttatgtgattctcataaggtaacatacctagcaaattttctagcagtacaggaataatgaaaaggaaggatctggtcataaagtatgctaaggaaatgtagtttgcctcccacttcaaaataggacaatcatatttatttatttgttgacaacctacatcagtcactaaactagtagctgagactacaaagttgattagatcccaagcctttgaaaatacattccagaggttaagctctataataaatatgtggatcaaatataccataactcagagaagggacagctttctgagtccaggaagccagatgaaattttccagagaagattgttcctaagaaactattcctgcataagccatcttgatatctatctatttgaattttacatattccaagaagacttgcagacccacaaatgtgtcatcattgggaccctccatcccgaggaatgaasagtggaagagttgaacaacgacatttccttttttccgcacatgacagcaatgagcagcaaaacgtctggttttagcattctgagtcttggaaataagtgtttctgggctgtaggcatmtgttgatgtgattggagcatagtgttgcttcctcctggggatatcagcctccaggggaatacaccaagccccaagtctccgaaggagcaacagtgccaggcagcctatttgggataaaccttgacccacagctgagaaaaacaggagtgaagttgtgggctgggtgtggtggctcacgcctgtaatcccagmactttgggaggctgagacgggtggaacacctgaggtcaggagttcgagaccagcctgaccaacatggtgaaaccccgtctctactagaaatacaaaaaattagccagttgtggtggctcaatgttgtaatcccagctgctcgggaggttgaagcaggagaatcgcttgaacctaagagacggaggttgcagtgagcygagatcatgccactgcactccagcctgggccacaaaagtgaaaattcatctcaaaaacaaaaaaagtgaagctatgggggtccagaggaattgagattatgcatgaccatttctttgtctctgtgttagattgctaggtttacttaatacacccgtaccaagccccttctgtaaaggtgccaaaagaacttaagttacccttctttctcagtaaattaaaagactaatgaaatcatcaaatagtggtggtgtggcatcgtagaaagaacagaagacccaatatctagagatttggaatctgttcccaggattgctactaactatccttgaaaacaagacagttcacctttttaaggcttcatttcatcatttgtaaaataagaagtttctactaaataatcttcaaggtgtcatctagccttagcatttcatatatctatggtgttcaaaaaaatctcttcaacatactgatttgatttcctttggatatatacccagtggtgggattgctggatcacataatttacattcccaacaacagtgtgaaagggttccctttcctccacattctcacaagcacttgcctttcatcttttgttgttgttgttgttgtttttgagacggagtttcactcttgtcacccagactggagtgcaatggcacaatcctgactcactgcaacctctgcctcccgggttcaagcgattctcctgcctcagcctcccaagtagctgggattacaggcaggcaccaccacgcccggctagttttgtatttttagtagagagggatttctccatgtttgtcaggttggtctcgaattcctgacttcaggtgatccacccgcctcggcctcccaaagtgctgagattacaggtgtgagccactgtgcctggcagtctttcatctttttgataagcaactagtggtctcattatcagaggtccctgaggggccctacaggcccccccaggttctgcccccaagattctaagagagaccttgtgctagggctctagtcttgatgttctttgcattgtttggatatgaagcccaggatatgtgggcacaataaggtaaatcatgagatgtgaaggagaatgaagatcaggccagaggtcaccattcattgaagagccagagaaaaagaaaattagtgcacagatttgtgtagatttacagagaacttctatttgctgcaagaacttcatcaggcgctgcaccatgcctgatttggaaaggagcttctttggggcctgatagaactgaattaatatgaagaaattgaagtggctctgatttgtcattcacataacgagaagttttttttatgaaaacgatgtggaaaacagaaaatagtgcttggcctcaagcaaaaatttgattagcatcttctcttggtctgaaacactcatcaagataataaaataggattcagtcccatgccttacctttagagatacagtcccttttggctaagattccaacctgtaggttagtaatgcagaagttctaaagtccaaactaacctttctaaaacatcagcatggtcttgagttctgttgcaagctgtagaagaacagtgttcttaatctggttcaagaaagagagatcttatcagccaatcagtcaatgtttatggaactactcccgagcctgggctctgtaataggcagcctgagaccactcacccttctatttcttcttcttcttagacacatctttcagattcctcagaaccatccagtcctaagctcttctccatggggcctagatgttgtggagccagctcctaaaagcagatttccctcacccccaaaatctggattaggtatttaactcctgttcacatcttgatgctacactgaactatcacatgagctaaaaaaaataaaaataaaaaataaatgaaaaaaaaattgcttatgatgggcctccccaagggctggaactatgtttcatttatctttgtgaccccataacaatgcctggcacatataggtgtggaataaagcatatggagtgattgaatgactgactatacccatagacagcagacagggccacactatctctatggctaactccccacagcaacttcaaaatgggaaacatcgccagattatataacaggcagaagaaattacgtttacttttgagaagtttccgaagcggtattcgtagggcagactgacagtctttccttttcgtattccaccacttgcacacagtcattatttgtccatttcatctgcctggaacccagctagaaaagccgtggcaagaaaaggcttcctataacaatgaaaataggtatcattaggctcatacgtcataagaagagtagtccaagcgctctctcagatttaagtattcactgtaggtataacgctaagggcttgactttctggctcaaacataaatcatctctgaggggtgtgtgtgtgcgtgtgtgtgttttaaaggaggcacatttagcaaaggggagagttttcctatacagtgaaaataacatacagctatgttaatgactttgggttctatatgttgttaaaaggcaaaaaaaaaaaaaaaaaaacgggtgttttataaagatatttttgttttaccaagatggttaaaataaaaatttaaaaagtgacccttaccaggataagcttcagatatttgaaaagtgcacttatgtgaaacgctttattttctgatgttacagaataagcaaggtatacatatgggtggtgacgttcacctatgtacacattgtgcagagaaaccaagcccagtaccttttcttggaaaagatgcctgtgggttagagtgatatcctaagactgacatctttcagttattgaaattaaaattttctagtctatatccagtcttcagatatttttaaatttgggatcaattagtcatttttcctttcctattttttcattgtaaccttggactcaaactgtcgagcttcccaggcacaggttgccataggagactctgtttgttgagggtggagtggttgattttggcaggttgagggaggagcaattaattctaataggtatatagtaaattaaacacttgggtctttccagccttttttctgtatttcttctcttttctataaacttcgttctctttccagatgactctttaagagcagaaaagaaggagcttttagaaataattcccaggctatagcaaaggaagtccagtgggrcctggaggtcacttagatcattattgctcttttcaacatatgttctctaatgttcttgagattagaagcgacccttgttgaagactttagaaagaaaaattccttgggatcctttactaacccattcaaatatttagattgttcttatgaaaagaaagatatctttagatatacctttaatttccattatgaagaccagacttatacatgtaagaaaagtattttgggtgctccttcgatttttatagacaattacatggaaaaaaaagaaggaacttactaggttttgccaatgagtcagtcagggttggagcaaaagtaacagatgtagtgctagatgaataagatacactccaaacacttgaaagagaaaaatgaaactctggggaaactccgtagatgtatccagtcatcctgcaagaacccaagagcatctataggtgttaaggatgcactagttatctttgactttgattatttggctgcagttcgggacctgagtcttgattctacagttattccaagttctctagagccagaataactggttccagcattaaagacaaatgctcattacagaatctttgtcttttatcccagtgaggcctgtgctgaaagcagaattcattttcacttcttgctcacaactgacattgctatgcagctgtgtggcagctgttgagttccaccccacaagtagcagcttctcagccgttggcaaactggtatacatctggaatgatgttcaaatgacatcaggatcccatagaataaatcaaaacatggaagtaataacttggataaactcgttctgatgtaactcaattgctgagaattatttaatggccatttttgagttgagtgatctatctcatcaaaacatggtaaaatacaaaactgtccttctatttgacatttaaggagggtcgggggaagagaaagtgatttgaacacataaactggaaggtggcttcagaactcaagagttctgtggcccaaagaatttgaccacaagatgtttcctacgactttatggttgggcatctctcaggatgaggagcagccaggttattgagtaggtgggctggctgatttaccctccaggatacagcaggacaacatttccctccagaggtagttttctggagaaataatgcattgggctgctgagctattttttaacaacttgttgctgttcttattgtacattctcttttggggtgaaacactccattaactctggtttggcctggacgcctttcccattttagttcgtgctgatttactgcagtagcagtggtggatggaaacagtacagctttctctgctctaaccctgtatctagtttctgtgcatgagttggctgtacctgtgggaatatttgtgttacagcactggtgtcctcaacccgagcaycactgcgggctggacagacaccatctgagtcttcatagcacccaaggactactcaggtctctaagtgtcagtcttcagtgcaccaggagaggggtggaggttaatatgtgagaagcagtacaaaaccaagttacatgacatctaatactaagctttatctgacacttgctatgtgacctgggcaattcttatcatctctatgcatcctcatttccaaaaaagtgggacttttgaggccaatcctgcctactgcacaggctttctcccatgctcaacagagttaaaaatatgttgaactgttttgtaacctatataatataaagacctcttgttacaagaaggcaaaaaagttgatcaaagagtttaaatgacgtatctcagaccttagagtaggccaggagcagtgctgccagtgaaatgtgacaattccttggacctagtggtcttgagattttttcaacttcttgcaaatattaggtcaatttgtgtcctgcaccttgggtgcttttctgtaatatctctggagctgtatggattacgctgggatgggaggagtggcagagtcaaacaagacataataaggctatactgagatgttgccttctaacctccctacagcccttccaagcagatggttggtgtgacactatcaacaaccgagcctactgccactatgaygggggagactgctgctcttccacactctcctccaagaaggtgagtgagagaacctggggatgggggaggcagtggcttcaggaataaaggcagggtcttcagctagctctcattcatggtgtgtaataatgggtttgtattcaacaattaggagggaattataatgaacaaacattggagcttctaaagtgacagggttaagggtagcataggttcttagacaacactagttctttgtcagttcagtgattctttcagaaaagccatggtttttgctacagaaagactcatacctgcttatcattgtccaagaaacatctctgtaggcagggaaagtaattgtccttacccctgggggaggtgggattatcaacaaactgctattcagttactaaccatctccataattacattaataattttatatagtgtgttacaagcatctcgcaggcacatgttaaatggctgccaccagccacctgagcactctctggattgtctcgtgagcaattatcctttctaatgccctttatccctgttattcttggctctgttaaattagcagataggctcaagctaagccttataaaatagaataagctgaaactttgcaataatatgggtaaaaatctaagtgctccaaagatacttgaagctagttgggtcaatatgataaatctgaaataagcaagagatgttatttccttccttgtatatgtctccacaataaaaccatacctaccatgataacctacatgcaggcttgaatactacatctctcactcgctaatgtttaatccttactcaatatgtggcagacactgttctcaccacttatgtgaattaacttatttaatgcagagtgctcaggggctcatcatatcactatttaatttggctgtcttttgctctaaaaaccaataaatcctaaactaagaaacagatcaagagcttggaccaaaggtcagaaatcaggccagctatctctgtgtaggaagacaagataacttaggaaaaaataaagcagttctctccccatctcacactctgaaaatctagtaatcgtctgtaataaatttcagtgcctgtggccagcatacacaggaattaggatcgaaaaggcacttcacccctctgttgactcctaaatcacattttagagtaatgtgcaaatatgctggaaaatttccccacacaaccccacccattctcctacccacttgcccaatcaccaagcccatctctttagtgtacttggactagtattgtgtgtgatatgcctatttatttttatctcattagattattaatgccccaaaaggaaaaatcattgccacttttatatcacctctcccaaatacctgattttttctgatgctagttatggatgtagcatttatctgtttgtagcagtgcaagcagaagtgagtaactttttccggactatctctggcatgaggaagagatagttacatagaaggaaggcaatacagccacaaacaatgggtgggtagatgcattattccaccaagtcaaagtatatcctgggctcaagaagagcaaaatctcatgctttatgaggatggcaaagatgttcctattgttccaagagcactgaggagttggagtcagagtgctagtctgtagctagtctcggcttcccatatagtagtctcattaccttgaattaagtcaccccacatctcttgcccttccctgtaaagagaaaatgctaatgctaccattcatctttcctactttacagggaaagtgacagtaacagtaagagcagtatttttagatatgagtggtaatattagaactgatagaatagtagttatagatgcttggcaatatataagaactttatactcattatttaaatcacacaaacaccctctggggtagtttctgttgtcctccctagtttatatatgaggaaagtgaagcaaggaacaattaccttgcctaaggctacatggtgacatgatgtgtgagtgggaaaactgcgtgttaatttccagtttgtgatattggcacataattctacagttcctctgggaccaagtgaggaaagtgaaagctcrtttaaaagtgtgaagctatcacagaaatgagctatttctacttccctttcattcccctaggtcattccatttgctgctgactgtgacctggatgagtgcacctgccgggaccccaaggcagaagaaaatcagtaactgtgggaacaagcccctccctccactgcctcagaggcagtaagaaagagaggccgacccaggaggaaacaaagggtgaatgaagaagaacaatcatgaaatggaagaaggaggaagagcatgaaggatcttataagaaatgcaagaggatattgataggtgtgaactagtycatcaagtagcccaagtaggagagaatcataggcaaaagtttctttaaagtggcagttgattaacatggaaggggaaatatgatagatatataaggaccctcctccctcayttatattctattaaatcctatcctcaactcttgccctgctctccgctccaccccctgccaactactcagtcccacccaacttgtaaaccaataccaaaatactagaggagaagttggcagggatactgttaatacccattttgaatggattgccatctttcagagcttgtctgctctcaactggctctttttctttttgtgtagtttcccttaaataatgaagttagttattaattctttataagtatttaaacataattatataaatatattatatatattatattttttgctgtttactaagctaaaaattattcattgttccacacatgctgctgtgaagttcacattcaagatgaatgttgagactttgaggacagaaaggcaacttattttcccatctttctatggatgcggattggcaggttgaatgggaagtacagaaggagagagagtaattagatggaattctggatgctagcatgtaaagctaatcatctttttttttatgacctgggagctgggcccattttatgaccaaggagatggggagttggaatggtggtactaagaggcataggaagttgagtgtgaataccattggtgatgggtccaggagaactagactatggttcttgaatatctgtccacaaagaatatactaacttttgtcaacttctcagaactcccaactggagtcggtgagacctaggattttctgcacttccacacatgcctgttccaagtgtggctgtcagccagtcaacaagtttgtactatggcccattctctgatcaccaggattacaggaactcacacactcctcatacttggcctgtagtcctacttcttgttagaagtctccaagtctggccagtcacatgaccaagtgttgatttttctggaggaaaaattttatggaaatgatataggggaaaggtgggaggagatgaaagaacaggcaagagctgtcagggttaaatccaggcccgggcatgagaatggaagtgatcagggagacttggtccttgttccaagtctccaaagaagaccaaagtgggtcccttgagcaatgaagaatctgagataaattctcttcaagtatcatgtacaaaatctgtgagccagagattttgacttgagcaagccatggaaatgcatggagcaagggtgacactctgtggggagacagaagaatttcaactatttaatgtccattttgttgtttttaccctttcttatccaatagatggaatgcacatgaaatgaccatattaagcctctctctatttacatcccaggctcactgggatgtggtctactgcagttacattttcttgtaacggtttctggattagaccctagggaaagtgagtaaggagccagtttctgtttaacattctagttttactcattttaggaaggctgtgaggcttgtctcctttaaagtttcttctccaatggaaaccaagaacagacaaaatttagagctcagctgtggtctcttctcatcttctgctcttttgctttgaccacagtttttctactcttcccatcaacactagagcaatggctgtgcaaataggaataggaaatactaccacaatgatagaaatattatccacactatcacgtagggaagaacaatatcctgaaagagaataaaacacgaataaggtgatgtacccacattaatctgtgggtttgtggaatgagggttgcaaagttattgggaaaaggaaagagcagagttcacccattcaaaaaaaaccttttgtctactaatctctagtgtaaagaaaatgtagttcagataccattcattgtcttgggtcatgcttagtgcccccaagaagacaaacatatttattcttgggattctgataggcttcaatatgcaaaggacaatggaaaagtttagacactctattttcaaaattttataaacttgttttattggggaaaatgtccaaattgctagacacattctaagttctgccttggagaatcctactttgtctgagattgaggcagaggaattgttatcctgggcattactcagctcaggaacatggagcctgtggttcatgccagtgtgtgtcttcatgcagtctctccacaagagcaacagtaagaacatttctgttttaaatttcattttaaaatattttattatctgcaattcaccactgctctgggaaagcaaaaggaaagttcctgttgtgtgtgaagagcctcttaggctataaggcttcccagccatagtcagctatagctattcagagacagcaggttcttccagtctttgttcctgggacctgatgttttgagcaactcaggtcactgataaagtggaaggactaagacactgtggtcacagatcccagcaacatcaactcacactcaatccatgtggtggtccacattctgctactcttatccacccatgtggtcattgagagcctttctcagagactcttctgtgtgtttgattgtgcccaggtggcccagggctagctggctctaacaactagcatgacagcctccaatcagaaaggcaggtaaggggacagggtgaggagaatgggcagatactgacagaaattaaagtaaagggattgtgaaagtaaagagctcttcctgattctcatcttctcttttttctattacaaggcattgaacttggcacttcctgtattctttgtgatcactattgagtgcattagttaacacccaaggggatggcttgattgggaatgtagtgaaaggagctgatctactgtattgtaatgtaaaacagctacagccagttattttgtaagattataagttgttcattaaaaaatcagcacacaaaatatgaagtgtctttggtgtttgactctttgtttaaatcatttcatcactttctaatcactttccattgtcttgtgccaggtccaggcaacagtcattatttatttgattgattggtcatttcttttagccacttaaaaaccatttgttaagtaaataggatgtgtaaggaagatgaatatgaaagttcataagaagacatggcatatatgaaagtagaatgtgaggtaggaatgtcaaatatctcatgagtttttaaataaagtgtaagaattacttacagttcagaggaagtagggtttattcctggatgccaaaggtaggcagcatttggaaaatggttgggaaggatgcatatgatctgacaggcagaaatgggggttgggataggagagtccaggcaaggtaaacaacatagttgaagctgtggaagtaggaatgggataggctgtgcattatggatcagtgaggcatccagcttagctggaagatagaactaagctagcatgtaccatacatttggtaaatacagaatcttacttaattcttacaacagatctgcaaatagcatattctcacttcacaaataagaacgctaagccacagtctggtaaagaaagttcttcaaggtcatatgaagggagttaacctggttctgtgggacaccaagatgttagaaggaaaagaaaaatggtgattaataggatggagagaggtgaaaagaaatgtcaaggatgatgcctctgcattaaatacacaatctgaaagcttatcagccctaacagaagagggaagctggcaggagcaggcttttaaagaaagagtattcatttgctctttcaataaacttgggttgagggccagataggaaatgccatctaaagcagtgttcagaaccctagaggaggcttctgcagttggggccggtttgcagagttttctggccacaccagtcaccacctggctactggaagggctgggcagatatctcagcacacctatgagccatttggaaagaactgtggaatggacagttggaaatgtgagcttggacttgggagacaggtttgtggttagaaataaacatttgagagagaaaaaaagcattttctttatggtttacaaagtgctttcatatgatttatggctacccacaggttaggcagagcaaggacagttttgttttgtttcttttcattttacagatgaagaaactgagtgtctgtgaggttataggaaaatttaagttcacatatctaagtgcaggttggggtgggaatccaagatctctgtcctcaaatgtaatcttttctactgcacagtgttcagcctgctaggcccaagagtgaacccagatccatttgcagtgggaaagtttaatgtctttttaccggtttatgtttcaaggtgctcattgctttccttatggctttcttagtagctaagcctattttctctcctgcctgttgtacatagcaaatggtaggaaaactgagggcaaaccttcttgagcacccttccagggccctctcctcatgccaggccctgagtataagcagatgcccttgcacataccagttaggccagctggacagaaatgtctggcaaggcagctttttccttaatagcttccctggggagagtcctggacagagactttggagctctggttcccattgactgacaaacttaaatgacacgatgagtcatctgtcagctgggagactctctacgcttagattcaggccatccagatgatgaagggcttagggtagggttgggtgaggtaatgagaagggctccagggcatctctgaagctgactttgggtcatttctttctatgtcactccagaaggaccactgaaatacttttaatatttcaagtttcccagtggttagctcagaagaaaagggtggtggtggtgagaatctcgtatcccataacggtccatgcccataaaagcttctacatgtgcctgggatatttggcctggcaaaatacaagactagtttagaaaatagatggttattctcaagtctcccatagtgtgagcctacctgagactgagtacatcttttctagtcagaatttagtctggtagttaatgcactatggtgtgtgatttgccacatttggctccttgctgaagacggttggtttttcattaatctggtcctgccactcaatctttaggttacattgctatgagttagcaatgatgaagtacattcttgaaagaaatctacaagtcaaatttatattccaagtgagtataataaaaacatctctaacccctgaaagatagttccgagtaataacaatagttcacattaattgcaatttgctaatgttctacaaattcaatgttcttctaaggataatttaatagggacaagcttcctttcctttgtctttgtctacacaaaagtcaaatattcaaatgtaaagaaaaaataagttaaaaaagggacagtgttgactttttaatgattaccaattatgttgcgtcaatgtgaccttctgaaggcaattgccagtttaaaaatgtttatacacataaaaggctgttaaagttagagaatttccccataccacaatttaatacgtgcaactcaaaatgcttcctgaatagttaggcaagttatcttagggtacaaaggacttccaagtaatgactttgtaggtagcgaatcaataactattagaataatctgtaagaaaatttctatagctttttagaatatccaagtggtcttcacaatggggaaatattacttattaactcaacattgttcatgctttctctaccttgataggtgacctggcacagggaggctgggggcagggatgactgagcctggacctagaaagtcagtatgtaagatgtattggtgacttgtgatccatgggcagcaacataatgatctgcaaggatgacaactacaaaatttcaaggctgacaaatctgagtttgaattctgggtccattactcactagataagtcatctagttactgaatctctctgggcctcagtttcctaaatatctacttttgcagccccatacccagcatagtgtttaagaagtgccagacagaaaggggttaaagagtgattgatggagattatatgtatagattattctctcaaaaagtttgcagttgggtgtggtggctcacacctgtaacctcagcattttgggaggctgaggtgggcggatcacttgaggtcagaagttcgagaccagtctggccaacatggtgaaacctcctctacactaaaaatacaaaaactgagccaggcacgatggcacacacttgtaatcccagctactcaggaggctgaaacaggagaatcgctttaacttgggaggcagaggttgtggtgaactaagattgcaccacttcattccagcctgggtgacagaacaagactccatcttaaaaaaacaaaacaaaacaaaacaaaacaaaagtttgatggtgaagaaaaggaagtcaggggggtgggggagtggaattgcccttttgtggcttcgaattctcaaacaccatgcttctctgacattagagagactaagatgtgtgccatcattagttacgttctccaggacagttagaacagatggagactcccaagtggtttggct

SEQ ID NO: 96702 - DNA, 139245 bp, Homo sapiens
ttcacaccattctcctgcctcagcctcccgagtagctgggactacaggcgcccgccaccacgcccggctaatttttttgtatttttagtagagacgggatttcaccgtgttagccaggatggtctcatctcctgacctcgtattatcacattctttaggcagggtataatgcatttgattatgacatttattttacaattaagagagtacattagatttcaactgtgaaccaggtgcagtgggtcacgcctgtaattccaacactttgggaggccaaggtgggcagatcacctgaggccgggagtttgagaccagcctggccaacacagcaaaacccgtctctactaaaaatacaaaaattagctgggtatagccgggcgcggtggctcatgcctgcaatcccagcactttgggaggtcgaggcaggtggatcatgaggtcagcagatcgagaccatcctggctaacacagtgaaaccctgtctctactaaaaatacaaaaaattagccgggcatcgtggcggggccctgtagtcccagctacttgggaggctgaggcaggagaatggcatgaatccaggaggtggagcttgcagtgagccgagattgcgccactgcactccagcctgggctacagagcgagactcagtctcaaaaaaaaaaaaattagctgggtatggtggtgcctgcctgtagttccagctacttgggaggctgaggcatgggaatcggttgaacccaggaggtgaaggttgcagtgagttgagatcgcccgctgcactccagcctgggcgacagagtgagacccggtatcaaaaaaagaaaaaaaaaaagatttcaactgtgattagctttatctagtttgtgaaaattctgctttggagttttttattaagaaaataaatatatgtatatataaatagagatggagtcttgctatattgcccaggctggtcttgaactcctggcctcaagtgagcctcccatctcggcctcctagagtgataggattacaggcgtgaggcaccacacctgttctgctttggagtttatatgccttgattgtatcctcctaaatctcagccacctattactattactggttgtttctgaagacgggcctcatctaagaattactgattccagatcccggtgcagtggcacactgcctgtagtctcagctagtctggaggctgaggtgggaagactgcctgagttcaggagctaaaggctatagtacactataattacacctgtgaataggtactgcactctggcctgggcaacatagcaagaccctgtctaagaaaaaaaagaatgatttcacacacctatctatcatattgccacccatttgtacagacttcagaacccaggtttctgataaattctccagtgtatcttccatgacattatgtgctcactttagtccagcaagaagactgaagcaaacaaaaactggtaaaaaagatggggatggccaggtgcagtggctcatgcctgtaatcgcagcactttgggaggccaaggcagtcggatcacgaggtcaggatatcgagaccatcctggctaacacggtgaaaccccgtccctactaaaaaatattaaaacaattagccgagcatggtggcgggagcctgtagtcccagctacttgggaggcggaggcaggagaaaggcgtgaatccgggaggcggagcttgccgcgagccgagatcgcgccactgcactccagcatgggcgacagagtgagactctgtctcaaaaaaaaaaaaaaaaaaaaagatggggatgtcctttgcagtcacaggatgtgaaattagttttagtttcagagtcaatgtctcagagtcaagctgggtggataaggtgaatgatatcctttgtgtgagggacggggagggaaaggctagttctgttgcatccaggtcccaataacagtaatcagtgaggttttagggctttgatgttcttattttctctgatcctaggttcttggtaggacttcttgcttaataaatgataatgtaataaaagtaaccagcacagtgtccctgacacagaaaaggcagatgtttttgaaaatgaatttaacaagaaattgaggcctggagaagtgacacagcttgtacagggtcacagagctaacacgtggtctctggtcttccttttcataaagctaatctttttttttccttttttttgagacagaattttgctcttgttgctcaggctggagtgcaatggtacgatctcagctcactgcaacctccgcctcccaggttcaagcaattctcctgcctcagcctcccgagtagctaggattacaggcatacactaccatgccaggctaattttgggtttttagtagagacaggccttctccatgttggtcaggctggtcttgaactcccgacttcaagtgatccacctgcctcggcctcacaaagtgctgggattacggatgtgagccactgcgcccgacctcataaagttaatcttctttttttttttttgagaggaatcttgctctgttgccaggctggagtgcactggctcgatcttggctcactgcaacctccgactcccgggttcaggtgattcccctgcctcagcctctggagtagctgggactacaggtgcgcaccacaggtgcaccaccacacctagctagtttttgtatttttagtagagacggggtttcaccatgttggccaggatggtctcaatctcttgaccttgtgatccgcctaccttggcctcccaaagtgcttggccaccgcgctgggccaagttaatcttataattacgtaagttatataccagtgccttctccaagtaaaaagcgaaaacgttagactgcagtccctttgggccagcaaccccaatcacaaacctctttcccacccctcagagccagccactgttatcaagtttgtatattcctttcagaatccttttctcctgatctgtcatttttttctttttgaggcggacttttgcgcttgtcacccaggctggagggcaatggcatgatctcagcttactgcaacctccgccttccaggttcaagtgattctcctgcctcagcctcccgggtagctgggatgacaggcacccgccaccatgcctggctaatttttgtatttttagtagagacggggtttcaccatgttggccaggctggtcttgaactctggacctcaggtgatccgcccgccttggcctcccaaagtgttgggattacaggcatgagccaccatgcctggcctgatctgtccattaagtctttgactctcaagggtggtttttatctctgatgctcccacacatttctataaagcagcagggcaaacaggaggaagacgaacagacaagacacaatcctagctcattgtcaaaagaggtgagataagatacacctacacatgaatggtgatgatgataagttctgtttttttttttttgagatggagtctcactctgcctcccaggctggagtgcagtggcacaattttggatcacgacaacctctgcctcctgggttcaagtgattctcctgcctcagcttcccaagtagctgggattacaggcgcccgccaccacgcccggctaattttttgtatttttttagtaaagacagggtttcaccatgttggccaggctggtcacaaactcctgacctcaggtgatccacccaccttggcctcccaaagtgctgggattacatgcgtgagccatcacgcccggcccagttctgtttgttaaaggcacagtctaagcattctttgtttttttttttgtttgagacagagtcttgctctgtcgaacagcctggagtgcagtggtgctatcttggctcactgcaacctccacctcctgtgttcaagtgattctcctacctcagcctcctgagtagctgggattacaggcgtgtgccaccacgccaggctattttttttttttttttgagacggagtcttgctctgtcgctcaggctggagtgcagtggcgcgatctcgacccactgcaaactccgcacgccattctcctgcctcagcctcccgagtagctgggactacaggcgcccgccaccacgcccggctaatttttttgtatttttagtagagactgggtttcaccgtgttagccaggatggtctcgatctcctgacctcgtgatcggcccgccttggcctcccaaagtgttgggattacaggcgtgagccaccgcgcccggacatttttttgtatttttaacagagacggggtttcaccgtgttggtcaggctggtctcaaactccgtatcttgtgatccgccctcctccggctcccaaagtgctgagattacaggtgtgagccaccacgcccggcagcattctttaattcagatgaataacaaaggctttatttgaactagatagggctgtttaagatgtcaattgttttacttaataactagcaaattagtaattagcatagtgccctgtacaaagttcagtataagctaatttcccctttctaccttacttagaccttttgggcccgatgggtagagtgtgaaaatgattactgatacttactgagggtttattatgtgtcaagcaggcattttacataatctcatttaattttcacaagccggtgaagtgttattacagaggaaagctccaattgagataaggcatgccgggactgcaaagtccttgtatgtaactagcttgggataaaacaggccagtaagtagaccttgagagcttgtttagaggaccttgagagcttgttaacacgggcgtgcagctactcctatatccttgacttgtcctcttctatgggggatgctcctccttttcgaccgaatatgcagcttcgggagggacgcacatggagaggtgcgggaggaaggggccacccgcctagacagccagatcagccgaatcagccctggcgatctatggggtgacaagatagccagaacgccctcacatccaaacaggccagtaaatggaaaatactttaaaacaccatgctacaattataaaccatcatcttatttattcgtaattcttggagttgacaacaggtcagatcctattgagaggaggtcattaattttctaaagacagaaaacctgggtctcttcggtcaacaaacaactctaaggttcttttttttaatccttaaatagggaaaatcctggactcaaggagttgattatatgatataacagaaataaacggctgacttggagtaggcgttcagtagattctagtcttttcacccagaaggggcttgggagggcaaaagtaaaaccgcactgaaaaagactaaaagtgggcgcaccttccgccttgccgaggctctcgctgctagccgttggcgttttcccgcgcagggggcagggcgcagagcgagcccaggaacgtgggagcggaaccccaccccccgccaggactacacctcccagcaggcaccacgctccgccacatggcgggcggcatccaatggtattagtccttcaagccagcttagtccgctttccgtcccggccttccctcggctctaaggtctctagggggttcgtctagaagcccgctggagaaaggctgcggtaggggtcgccttggctgtgcagcatgttgggagtcgtggtcccctcgtgcaacatttgggaggccaggcttgccctgagtggttggaccacatcacgtgatgagcacagggcggccacaggggagtaacctgtggtgctttgtgaggtcatcacggcgcgacgacgagctgcagttgtgggcaccttgtatgcggtgggtaatactctcctgatgactccgagtacaatacatattatcaagtctcccttatttgttcctttctgtggtccccacctccacgcggttggcttcgcggggttggggtggaggtggtggctggaagaggccgcgcgccgcctaggctgactctgaagccgcgcacgagcgacgtgttgtggctcctccttcgcccgtgacgcgaggtcacgtgacgggttgggcagcctgtgccgccgccgccgctttgtaagaggcacattggcaggtaacgagcggcggcggcggcagcgggtcttgggtcctccgagagcagcagcggtaattgccatcctctccctctccttccctcttccagggccctgagcgctgcagcgtgtgctttctaattctgggttcagctcgtctgaaaccccaccgcctgcagactgccccggcgcccacccgtgaggaccgggccgagcttcactcgccaggtccacggtccctctacgtccaggcccgggctccctccttcctcttcccctcacgttgccctgtgcttcttcctactttcccccgtccaggtcggctgggccccacccagccccaggggtgcctcccctcccccctttcgggtttctgccctggagggtgtggttttctctcccacctcggtgcctgccagtagactggagcttccccgccacgctgtcggtcccatctcatcacctttccgctttcacgcccgtagctagtcttgggactggccctgttatagccccaacttatgcgctctctaacctttcctggcttacccggagtcacagttcagttctacttcttttcaattctgtagggcattggtctcaattgggactcagttttcctccacacccgccgttcctgtagtctggttatatcacagttcattatttaatgtaggtttttgagcgctttgtaaacggcaaagctctctctgttaataatacatactcaaaatgttattctttcattggtgcattacaactcagttgtttgcctctgaatcactttcccactcggcttttccacattttcccctgagtttttagtctaattagttgcccacgcatctcaactgtcaccactctggtctctaatgcttgctcgctttaggggttgatcccatcattattactgttatttcctgtttgatgtaatccagtcatttactaccacttctattggatattgtttttacctcacattcaaggaaggtatatggtttgccagtatttaggcttattgtctttctacagcaccagtgtatcctaacagttgagagattttaaaaaattactattaattttagagatatggtctccatatgttgcccaggctggcctccagctcctgggtttaagcgattctttcacctcagcctcctgagtatctgggattacagtgtgcaccacggtgctcagctagttgagggttttttcaggtctccataaggtatccaaagattatcttttatttgaagggcatataatttcttgggtgaacccagttcttatattcctcttccgttgtgacagcacttttttcaacaaggggtatgcgactagttattgcattcctcacttttcactgtgaattgtgtatccgttttagtgccagtttgtgaaaggtggaaggaagttgaacatgatacctaagctctcccgtatcctacattggtgtgttccccttttacctcaggaaagggaatgtattccactccctggagatgatagtttcyttcaatacactcacctgtggagccccttcgctagggttgtccttccattgctttgaaggcttctcttatcattaggcagaagtgattagtttcccaaactgcccttttgcttgctgccagcatactcctgattttcctacttatggctagttgatacgtgtgacgagagattttcccacagcgctgatttcccccatttgcttccctgttgcctctcaccctcaataattatgaaacctttcagagaaggaaggtttttgttgtgattgaaatatgcccgaaagtggtggcatgggagagaatgaggccatgggaaagggttgtggtaattgcctctcttgcctgtttcctgctgctctggtttcctctgtcctccctttaaatgtgggctggatcagcagtagtcacatggagttgcctttagaactatattggaacaacaataacacctctgcttccctttcctggttactagtgcagtctatgtagtgatcaccaggagtgtctctcttagtattagcctgagtgacttttattgtatggggagaaatggtgtgatggtgtgagaacatgkagactaataggtttatttcaatatgtacttgtattgtgatgggaactggtcccggtatctaccctcttaagtataaaatatgtgtagaaagtacaaacctttcttgaaggtttggagtggtctgaagtgaagccttctttttttttttttttttttttttttgagatggagtcttgttctgtcgcccaggctggagtgcagtggcctgatctcggctcactgcaagctccgcctcccgggttcacgccattctcctggctcagcctcccgagtagctggcactacaggcacccaccaccacgcccggctaattttttgtatttttcagtagagatggggtttcactgtgttagccgggatggtcttgatctcctgaccccgtgatccgcctgcctcccaaagtgctgggattrcaggcgtgagccaccccgcccggcatgaagcctttacttctaaaatgttagctttgaattgttgatttcccagtcctcttttttttttttttaaatgatgatttattgttaagatttcctttgttaataagacactttgtggggttggggggtgggggtggttaagtatattagcaagggttaatgcctgctctaaagaagcagtctgcaggcatttayagattgtaaagttctctgcccttaagcacatctgtctttatttttccttgtgagaaacctgtatgtcagcaaatacccgttcattcttagttgttattttgagtaaatggagctcttagttgttattttgagtaaatggagcgttcttaaaagctaagtgttatggtacccatggtgttgactggtaagttagtagatctctgatagattttagaagcagccgttttttccaaagagtggagatataacctgaaggaaggcaaagagagggaggacatgtagggaatatcaccatgtaatctttgtggtagattttgaagtaattttgccccaactatcaagtatttaggaataggatcctttttttactaactcaaagaatcaaatttatcagattagtttttacaattttaatgtaaaccacttatgctgatatttcctgctgagtttacttgacattttttaagtttctcaaagatgctccttaaaaattttcttttgtgactgggcactgtggctcatgtctgtaatcccagcactttgggaggcggaggcgggcgggtcacgaggtcgggagttcgagactaacctaaccaacatggtgaaaccccgtctctactaaaaatacaaaaatgagcctggtgtggtggcgcgtgcctgtagtcccagctgctccagaggctgaggcggtagaattgcttgaaccygggaggtggaggttgctgtgagccatgtgccattggacttcatccagcctggatggagcaagactccgtctcaaaaaaaaattttttttttaatttttatttttttctacccttttttttttttgaagacagtctcactgttgcccaaattggagtgcagtggtgcaatctcggctcacttcaagctccgccttctgggttcatgccattttcctgcctcagcctcccgagtacctgggactactggcgcctgccgccacgcccggctaattttttgtatttttattagagacggggtttcacagtgttagccagatggtcttgatctcctaacctcgtgatccgcccgcctcggcctcccaaagtgctgggattacaggggtgagccacggcgcccagcctttttttacccgtttgtaaacaatgtttgataagtttccattttttgatmactaattttcatgctggacwgcataattgaattggaatccagttaactatttggatttgaagtatgaaatagggctcacattaaggagtagagtaggtgttttatttaagactaggtaatactcttcatttatttatttatttatttacagatggagtctcgctctgtcacccaggttggagtgcagtggtacgatcttcgcccactgcaacctctgcccaccgggttcaagtgatgctcctgcctcagcctcctgagtagctggggttacaggcgcctgccaacacacttggctaatttttgtaattttagtagagatgggatttcaccatgttggccatattggtcttggaactcctgacctcaggtgatccacctgccttggcctcccaaagtgctgggattacttgcgtgagccaccacacctggcttcttcttttatttttattttcttgagacagtctttctctgtcgcccaggctggagtgctgtggtgccttggctcactgtaacctctgcctccctggcttaagtgattcttgtgcctcaacttcccaagcagctgggactacaggcatgcatcaccacgcccagctaattttttttttttttcgagacggagtcttgctctcttgcccaggctggagtgcagtggcgctatctcggctcactgcaaactccgcctcccaggttcacgccattctcctgcctcagcctcccgagtagctgggactacaggcgtgtgctgtcaagcctggctaattttttgtatttttagtagagacaaggtttcaccgtgttagccaggatggtcttgatctcctgacctcgtgtgtgatctgcccgcctcggcctcccaaagtgctgggattacaggcgtgagtcaccgcgcccggctaatttttttttttttttttttttttgaggtggagtttcattctgtcacccaggccagagtgcagtggtgtgatctctgttcactgcaatctccgcctactgggttcaagcgattagcctgccaccgtgctctgataattttcgtattttttgtagagacaggattttgtcattttggccatgctggttttgaactcctgacctcaggtgatccacctgcttcggcctcccaaagtgctgagattacagttgtggaccactgtgcctggcctttttttttccccctgaaacatggagtatatgtttaaaaaaaaaaaaagttggagcctggctccatggctcctgcgtgtaattccaacgctttgggaggctgaggtggaaggatttcttgagcaggagttcgagaccagcgtgggcaatatagtgagaccctgtctctataaaaaaaatgtaaaaattaactgggcatgattgcatgtacccagagtcccatctacttgtgaggctgaggtgggaggattgcttgagtccaggaggttgaggccacagtgagctatgattgtgccattgcactccagcttgggtgacagagtgagaccctatctccataaataataggatcatactttgcatacttrctgatttttattgaaaaatacagcatagtttgggtgtggtggctcatgcctgtaatcccagcactttgggaggccgaggcaggtgaatcacttgagcccaggagttggagagcagcttagacaacgtggcaaaaccctgtctttactaaaaatacaaaaattagctgggcatggtgtgcttgtagtcccagctactcaggaggctgaggttggaggattgcttaagcctgggtggttgagactgcagtgggctgtgattgtgccactgcacttcagcctgggtgacagaccctgtctcagaagaaaaacccaaaaaacagcatacataccgtagatgatatatgaggcataaaaacatgtagagttgtcattgtataacgtagaaggtggttgggggtaaacacatatgtagagttgttttttttggagacagggtcttgctttgtcgcccaggatggagtgtcttggcatgatcatggctcactgcagcctctatctcccaggattaaggcatcctcccacctcagcctcctgagtagcttggaccacagggatgcatcaccatgctcagctaatttttctttttgtagagaggagtcttgctatgttgcccaggctggtctcttaggctaaagtgatcctcctgccttggcctactaaagtgctgagattacaggtgtgagcttaatgcctggccccatatgtaaaattaaaaaaaaaaagtaaaatgaacaaccaagaaataggacattactgctacctggaagtctcctgtgtatgccagctcccaaggcatttcttttcgctttccttgaggtaaccattaccctacattataggtttactattcctttgtgttgttgttttaaaatagagacaaggtctagctatgttgcccagggtggtcttgaactcctggactcaagtgatcctcctgcttggcctcccagagtcctgggattataggtatgagtcactctgcaggttctactgttccttttttttttttttttttgagacggagtcttgcactatcgcctgggctgaagtgtagtggcccgatctcagctcactgcaacctccacctcccaagttcaagcgaatctccagcctccatctyccgagtagctcggattataggtgcccgccaccacgcctggctaattttttgtatttttggtagagatggggtttcactgtgttggccaggctggtctcaaaytcctgacctcatgatccgcccacctgagctcccaaagtgctgggattacaggcatgagccaccaccccagcctactgttacttttttacaataattttaccttatatgtatatccgtaagcaacatatggtttaatagtgcccattttcagtcttattctcaatgtaagaattgtatgattcttctgatgcttgattctttcactcttacatgcttgagatttatccatgttgatttcttttttttgagatagggtctcagtctgttgctcaggctggagtgcagtggctcgatcctggctcactgcaacattcacctcccgggttcaagcgattctccttcctcagcctcccaaatagctgggactacaggtgcccgccaccatgcctggctaatttttgtattttttggtagagacggggtttccttgtgttagccaggctggtctcgaactcctgacctcaggtgatctgcctgcttcggcctcccaaagttctggtattacaggcatgagccactgcacccagcccccatgtagatttcttttttctttgttttgttttataagacggagtcttgctcttttgcccaggctggaatgccagtggcacgatctcggcttctcagctcactgcagcctctgcctccttggttcaagcaattctcctgcctcggcctcccgagtagctgggattacagacacctgccaccatgctcagctaatttttgtattcttagtagagacggggtttcaccatgttggccaggctggtcatggactcttgtttgtttttttttttttttttgagatggagtttgctcttgttgcccaggctagagtgcaatggtgcgatcttggctcactgcaacctctgcctcctgggttcaagcaattctcctgcctcagcctcccaagtagctgggattacaggcaggcaccaccatgcctggctaatttttttttttttttttgcatttttagtagagctgtgggttcactatgttgggcaggctggtctcgaactcctgacctccagcgatctgcccacctcggcctcccaaagtgccgggattacaggtgttagccatcgtgcccggcccgttgatttcttatagtagtatgaggttacattgtaaggatgtgccatatgttgtctatttcattgttgatggatatttgtctcatttccagttttttgagattaccaattttacttgtcctcatgtggacatttgccaccctgcccacaacaaacaaagtccattttctcaagactacataactgagagtggaatttttggtttgtatgtagggtatgtgtaacttttactaagtaatgctaaagtgttttccacatgttgcacagttgttctcaggcttgtcagctgaaccacagaacacagaaagttgagttactattttctcaaatctgtcaaggatggtacataatgaatttcattctaggtgtctkgaaaaagttcagcttatacacasagtggatgccctaagaattgggaattcattctcaaagactgagtggtttaagagttctacatccttgccaacattttatgttgcctttttagttttagccaattgtagtgggatgttctagatatatctttcatgaacgccacatagctggattttgctttgttaagttagcaacttgctaacttctttttaattaattagagtgtatygctatgttggctgggctggtcgtgaactcctgggctcaagtgatcttcccacctcacccgcacaaagtgctgggattgtaggagtgagccatcagctaacctctttaactagagcatggagaccattcatatctgttgtaattacagatattttggatatatgtctgccattatatttagtcttctagttggctggcctgtgtgtttgttttctgtcccttttttttttttttttttttttttgagacagagtctcattctgtcacccaggctggagtgcaatggcgtgggctcggctcactgcaacctccgcctcccgagtttaagggattcttctgccccagcctccctagtagctgggactacaggcacgtgccaccacacctggctaatttttttttttttttgagacggagtctagcccttgtcgcccaggctagtgtgcaatggcgtgatcttggctcaacgcaacctccgcctcctgggttcaagtgattctcctgcctcagcctcccaagtagctgggattacaggcatgtgccaccatgcccccggctaattttgtacttttagtagagtcggggtttctccatgttcatcaggctggtcttgaactcccgacctcaggtgatcgcccgcctcggcctcccaaagtgctgggattacaracgtgagccaccgtgtgcggcttgtatttttttttttttttttttagtatttattgatcattcttgggtgtttctcgcagagggggatttggcagggtcataggacaatagtggagggaaggtcagcagataaacaagtgaacaagggtctctggttttcctaggcagaggtccctgcggccttcygcagtgtttgtgtccctgggtacttgagattagggagtggtgatgactcttaactgccttcaagcatctgtttaacaaagcacatcttgcaccgccctttatccatttaaccctgagtggacacagcacatgtttcagagagcacggggttgggggtaaggttatagattaacagcatcccaaggcagaagaatttttcttagtacagaacaaaatggagtctcctatgtctacttctttctacacaaacacagcaacaatctgatttctctatcttttccccacatttcccccttttctattcgacaaaaccgccatcgtcwtcatggcccgttctcaatgagcagttgggtacacctcccagatgaggtggcggccgggcagaggggctcctcacttcccagaaggggtggccgggcagaggcgccccccccacctctcggacggggcggcggccaggcggaggcgccccccaactccccaacggggcggctggccgggcgggggctgccccccacctccctcccggaaggggcggctggctgggcggaggctgccccccacctcccagacgggccggctgccgggcggagacgctcctcacttcccagacggggtggctgccgggcggaggggctcctcacttcccagacggggcggctgctgggcggaggggctcctcacttctcagacgggtcggccgggcagagacgctcctcaactcccagacggggtcgcggtcgggcagaggcgctcctcacatcccagatggggtggcggggcagaggcgctccccacatcccagacggggtggcggggcagaggcgctccccacatctcagacgatgggcggccgggcagagacgctcctcacttcctagacgggatggcggccaggaagaggcgctcctcacttcccagtctgggcagcagggcagaggggctcctcacatcccagacgatgggcggccaggcagagatgctmctcacttcccagacggggtggcggccgggcagaggctacaatctcggcactttgggaggccaaggcaggcggctgggaggtggaggttgtagtgagccgagatcacgccactgcactccagcctgggcaacattgagcactgagttaatgagacactgtctgcaatcccggcacctcaggaggcctaggctggcagatcactcgcggttagcagctggagaccagcccggccaacacagcgaaaccccgtctccaccaaaaaaatacgaaaaccagtcaggtgtggcggcgcgcgcctgcaatcgcaggcacttggcaggccgaggcaggagaatcaggcagggaggttgcagtgagccgagatggcggyagtacagtccagctttggcttggcatcagagggagaccgtggggagaggggaggcttgtatttttaatagagacagagtttcactgtgttggccaggctggtcttgaactcctgacctcatgatcttcccacctcagcctctcaaagtgctgggattacaggcaggagccacygcgcccgacctttttttttttttttycccaggctggagtgcagtggtgcaatcctagctcattgcagccttgaactccccgtgctcagatgatccaccttagcctcttgggtacctgggactacagatttgtgccaccgtgcctagctaattttttttttttttttttttgtagagacagggtttcatcatattgcacaggctggtcttcaacttctgggttcaagtgctcacctcagcctcccaaagtgttgggattataggcgtgagcagctgctgtaggcccacaaaatgtatttttatagcctctttcccatccagtcggggtttctgtatttacatattgtcactgaagtatttttatagcctcttttcccatccagtcagggtttgtgtatttacatattgtgactgaagtacactactgartgataatccttttctcagatgattattttctcaattatttatcagatataattgccagtcaggtcatctgataagcaagaaataactactgctgttacttagttcaggtaattttcatcaatgctaagtaaattgctaatttattgtaggataaaatgtaactttttggggcttttggaaagtctaaaaatatgtattccatgactgctatgccaaccctaagttttgaaacactgatgaaagtttcctttgatttgtgggagtgaggcaacaattacattagtaaaaacttaaggtagtatatgggctgggcgcagtggctctctcctgtaatcccagctctttgggagaccaaggcaagtggatcacttgaggtcaggtgtttgagaccagcctggccaacatggtgaaaccctacctctaccaaaaaatacaaaaattagctgtgtgtgggctgggcgcggtggctcacgcctgtaatcccagcactttggggggccgaggcgggcggatcacgaggtcaggagatcgagaccatcctggctaaaacggtgaaaccccgtctctattaaaaatacaaaaaattagccaggcatggtggcacgcctctgtaatctcagctaatccggaggccgaggcaggagaatcgcttgatcccagaagtcggaggttgcagcgagccgagattgtgccactgcactccagcccgggtgatagagcgagactctctcaaaaaaaaaaaaaaaaaaaaaaaatagctgggtgtggtggcacatgcctatagtcccacctacttgggaggctgaggcgggagaattgctggaaccctggaggggaggcagaggtcagtgaggtacctgagatcgcaccactgtgctccagcctgggcagacagaatgagaccttgtctcaaaaaaaaaaaaaaaaaaaagagaaaaacttaaggtagtatattctctgttatttctgtgaatgctaartttacattactgcagattaggcctgaatgatggttctccctgcgcaaatggtatatgctactctataggtgttcacttgaacgaatatttattgctgccagttgtcaacaatgttagatgctagaatacagatgaataatgtaggttcctgatcttcagttgcttacatgttggtgagcagacacacacagtttaaatgtgtgtataggattccagggtactgctgsctgtgacagagaaaagcattgttgaattgagcttgagtatttggcaaggattccttgagctggggaggctgagccttagttttcttagattcttcctatagaatcaagtatcaaggctgggcacggtggctcacgcctgtaatcccagcactttgggaggccgagacgggcagatcacctgaggtcgggagtttgagaccatcctgaccaacatggagaaaccccatctctattaaattataaaaaattatccgggcatggcggtgggtgcctgtaaccccagctacttgggaggctgaggaggaggagaatcgtttgaacctgggaggcggaggttgcagtgagccaagatcatgccattgtactccagcctgggcaacaagagtgaaactccgtctcaaaaaaaaaaaaagaaaaaagtatcaaattcctgaagttacaattaaattgttaaaacactttaaatgttgtattcagagtttagttttattagaatttgctgttattttgctttgttctattttgtttgagacagggtcttactctgtcactcaggaatgcagtgatgcgatcaggctcactgcagccttaacctacctgggctcaagcgatttcccccactcaaaaaaaaaagagagaatgtgcagtatgtccttgagtaaacatgcctgtggaacgtgaaggcaaaaaggcagggacgatttaggagaataccaaggctggtttgaccaagtgtagggattggaaggaataaacagtttgcattttattgaggagttgatggtttgtgaacagaagttgacagtttttgttgatagtgtttgtttgtttctttctttatttttgagatggagtctcgctttatatcccaggttggagtacagtagcacgatctcgactcactgcaacttctgcctcccaggttcaagtgattcttgtgcctcagcctcctctgagtagttggaattacaggcacgtgccaccacaaacctggctaatctttatatatatatatttttttttttttttagatggagtctcgctctgtcacccagactggagtgcagtggcgcgatctcggctcactgcaacctccacctcccaggttcaagctgttctcccacctcagcctcccaagtagctgggattacaggcacccgccatcatgcccggctaatttttgtacttttgtagagatggggttccaccatgttggccaggctggtcttgaactcctgacctcaggtgatccgcccgcctcggcctcccaaagtgctgggattacaggcgtgagccaccgcgcctagccgtatgaaatgttttgaatgacagagacagatgaaagaatgagaacagaagaaagatttgacaattaggagaccagtggtgacctagggagtagcatttttcctactgttagagtgatagggtgatggaaaccagaatacagaaggttaaggagatrtttagtgaggaaatggaggcagtgaatgtattcattttgtgaaatacagtttatgtagttgttgcttacaagatagaacatgaagtttcaggagtgcttggaaggtaatttttctgagcctttgtttttgagagtaawccggatgtagagaacagttgagcgattcgtttttttttgtttgtttgtttkttttgagattgagtctcgctgtttcccaggctggagtgcagtggcgtgatcttgactcactgcaacctccgcctcccaggttgaagcaattctcctccctcagcctctccagtagctgggactataggctcatgccactacacctggctaatttttgtatttttagtagaaacagggtttcaccatgttagccaggatggtcttgatctcctgacctcctgatccgcccgcctstgcctcccaaagtgctgggattacaggcgtgagccactgtgcccagccagttgagtggttctttagacatataaggatgtggggtatttctcattagtgtagtgttttctttattaaggaattttgtatttggattaaaactggaccagatacttatgtggcaggtgtgttaatgtttaaatggatggcatgactttgttttgatagatacattctttaggtaacagacatttttaagaaagttgcttttggcatgagtgattaagtaataaggatgtcagtaaaataaaagcaatatacttttactaaaaaaagaaaaaccaggacttgatatcctggattcatgaggaaagttgaagaactataatgaaaaacttctgaagtattaaatcagtatttatattttaggcttgtaataaaacctagagatgatgtaactgtctcaaaatgacttaataggtatgttgaacttttataaatcacttgtgaaataaattgtgaatttgtgacatttgagtgccaaatgttgaaatggttcctgcagagatgtgaataatgagaactattattttaggtcatctggtcttcattaagaattgatttgaagccgggcgtggtgggtcatgcctttaatcctaggactttgggaggctgaggcaggtggatcacctgaggtcaggagttcaagaacagcttggccaacatgacgaaaccccgtctctactaaaaatgcaaaaattagccaggcatggtggcgggtgcctgtaatcccagctacttgggaggctgagacaggagaattgcttgaacctgggaggcagaggttgcagtgagctgagatcatgccattgcactccagcctgggcaacagagtgaaactctgtttaaaaaaaaaaaaaaagaattgatttgatgcttgactgtagtcgcagctgcttgggaggttgaggtgggagaatctcttgagcgcaggaggcagaggttgcagggaaccgagattgcaccactgcgcttcagcctgggcgaaagagtcagaccctgtctcaggagaaaaaaaaaaagtatacaattaagttattgactatagttaccctattgtgctatcaaatagtgggtcttattatttttgtactcaataaccatccctacctcccccaagtcccccactacccttcctagcctctgatactccatccttctactgtctgtgattatgagttcaattgttttgatttttagttcccacaactaagtgagaacatgtgatgtttgtctttctgtttctgggttatttcacttaacataatgatctccggttctatccacgttgtttcaaatgacaggatctcattcttttttwtggctaagtagtactctgttgtgtataagtaccatgttttatctattcacctrttgatagacacttaggttacttccaaatcttagctattgtaaacagtgctgcaacaaacaggaatgcagatatttcttcaatatactgatttcccttattttgggtatatacccagcagtgagattgctggatcatatggtagctcaatttttagttttttccagaacctccaaattgttttccatagtagttgtactgtgtgttgagtactgtcatggtttttctgttcttgaaaataagaagcaagagttaaacattgtggcttagagtatcaagaagcaaagatgttgatttttttttttttttttttgaagacagggtcttgctctgttgcccaggccagagtacagtggcggctcactgcaacctctgcctcctaggttcaagtgattctcgtgccccagcctctggactagctgagattacaggtgcgtgcaaccacgcccagctaatttttgtattgtttgtaaagatagggttttgacatgttggccaggctgatctcaaactccggacctcaagtgatccgcctgcctcggcctcccaaagtgctggaattacaggcatgagccaccacacccagcctaagaaacaaagattcttaatctctgtgactggttgtggtcatcatgactgtagtagaagaaaaattgttttattgaacttgtatccctaagaaagctgaggtaggttagcctatattttgatatcttccttccttctgactggccaaagggggaaggtggttttcctcctttatcccctttcctgtgaagccttgggacagagtaactagtgggaagttaatcttactttggtggatgcagagctggagactcagggcagagggagtgtgagtgtataaagacagaaatatgcctgagtctttatcacagaccaaggttattgtgctgttggtattaaatctatgagttaatttgttcttactttcatcctttcaagagaggatagatggggattcctgcagctgaacatggttggcgagagagccgtgtttagctacgtttagggatagaatttgacatggatgaggatgttaagttggcaacttattagcactttttaaattttttggtgctatagggtcatgctatgttgcccaggctgatcatagctcactgtagcctcgaaatcctgggatcaagcaatcctcccgcctcagcctcccaaggaggtgggaccacaggcatgcgccaccatacctggctaatttttaaatgtattttttagtagagatgaggaggtcttgctatgttacccaggctggtctcaaactcctgggctcaagaagtcctccctccttggcttcccaaggtgttgagattacgggcatgaaccaccacacctggcctattagcactttttgttaatacataggaaatagatcctctttttttctttcttttttttttttttggtttgggacagggtcttgctgtgttgcccaggccagagtgcagtggtgtgatctcagctcagtgaagcctcagcctcatacattcaaaaattagccgggcatggtggtacatacctgtgatcccagctactgggaggctcaggcaggataatcgcttgaatttacttaggaaagcaagttaaggccgggcgtggtggctcatgcctgtaatcccagcactttgggaggccgaggcgggtggatcacctgaggtcaggagtttgagaccagcctggccaacatgtcgaaacctgtctctactaaaaatacaaaaattagccaggtgtggtggtgggcatctgtaatcccagctactcaggaggccaaggcaggagaatagcttgaacctgggagtagaggttgcagtaagccaagattacagacacatgccaccacgcctggctaaatttgtattttcagtagagacggggttttgccatgttggccaagctggccttttttttttttttttgagactgagttttgctcttgtagcacaggctggagtgcagtagtgcgatctcaactcactgcaacctccgcttcctgggttcaagcgattcctctgcctcagcctcccgagtagtaggattacaggtccgtgccaccatgcccggctaagttttgtatgtttagtagagagagggttttaccatttggccaggctggtctcaaactcctgactcccaccttgccaggctagtcttgaaaccctgacctcaggtgatccgcctgccttggcctcccaaaatgctgggattataggcaggagctacagtgcctagcccttattttatttttatttttagtttaatttttttgagatgagtcttgctctgtcgcccaggttggagtgcagtggtgcgatcttggctcactgcaagctccgcctcctgggttcatgccattctcctgcctcagccttctgggttgttgggactacaggcgcctgccactatgcccagctaattttttaaaaatacttttagtagagacggggtttcaccatgttagtcaggatggtctcgatcacctgaccttgtgatccatgcgcccgggcctcccaaagtgctgggattacaggcgtgagccaccgtgcctggccccttattttatttttgaaacagggtctcactcatctcttgggcactgtactaggagtgcactggcgtgatcacggcatactgcagccttgacctcccaggctcaagtgatcctcccatttcagccttctgagtagctgggaccacaggtgtgctctgtcataccgggccagtttttttgtttgtttgtttgtttttgagatggaatctggctctgtcgcccaggctggagtgcagtggcgcgatctcggctcactgcaacctccgccttccgggttcacgccattctcctgcctcagcctcccaagtagctgggactacaggtgcccgccaccacgcctggctaattttgtttttgtatttttagtagagatggggtatcaccgtgttagccagggtggtctygatctcctgaccccgtgatctgcccgcctcagcctcccaaagtgctgggattacaggcgtgagccaccgcgcccggctcacctggctgatttttaaacttttttatagagacgggttctctctatgttgcccaggctggtcttgaactcctggccccacactgctctcctgccacagcctctcaaagtgttgggattacaggcgtgagccaccgtgcctggcctatgtatgtatttctttctttttttttttttcgagatggagtcttgctctgtcacccaggctggagtgcagtggcgcaatctcagctcactgcaacctctgcctctcgggttcaagcagttctcttgcctcagcctcccgagtagctgggattacaggtgcccccaccacrgcggcctaatttttgtatttttagtagagatgggttttcaccatgttggccaggctgatctcgaactcctgatctcatgatccacctgccttggcctcccaaagtgctgggtttacaggtgtgagccaccgtgcctggccgcatttcttccttcttcttctttttatttttttaaatagagacaaggtcttgctatgctgcccaggctggtctcgaactcctgagctcaagtggtcctcccaccatggcctcccaaagtattgggattacaggtgtgaaccactgggcctggcctatgtatacattttcttttttttttttgagaagttttgctcttgttgtccaggctggagtgccgtggcataatcttggctcattgcaacctccgcctcctgggttcaagcaattctcctgcctcagcctcccgagtagctgggattataggtacccgccaccacatccagctaattttttatatttttagtagagacaaggtttcaccatgttggccaggctggtctcaaactcttgaccttctggtgatccaccctcctcagcctcccaaagtgctgggattacaggtctgagccactacgcctggccctatgtacacatttttaggtgaacgtgttttcagttctcttgggtgcatacccaggagtaggattgcttggtctttatcataactgtttaatttctttaggaactgttaagagttttttttattttttaggagatgtggtcttactctattgcccagtctggagtgcggtgacatgatcatagcacactgcagccttgatctcctaagctcaaggattcctaccacctcaacctcctgaatgggtgggattccaggtgtgcgccaccaagcgtggctaattaaaaaaaaatttattgtatagacgaggacttgccacgccgcccaggtttgctcacctcctgctgtgcggcccagttcctaattaccccagtctgcagcctgggagttggggattggggatccctgctttatagtataggcttttttgcttttttttttcctttttgtaggagagagagaactgttataagtagtggtgaagactggttatgaataattacatgcttttcaagagattccagggtgaagagtcctggttacctgctgggcaaaagacaaggtttaaggctggtcgcagtggctcgtgtctgtaatcccagcactttaagagcctgaggtaggcggatcacttaaggtcaggagtttgagaccagcctggccaacatggtgaaccccatctctaccaaaaatacaaaaaattagccgggcgtggtggcgggtgcctgtaatcccagctacttgggaggctgaggcaggctaatcgcttgaacccaagaggcagaggttgcagtgagccagtgttgcgccactgcactccagcctgggtgacaacagtgaaactccatctcaaaataaataaataaataaataaataaataaataaatagggtttacagctgaattagcaggataggaataggacagatgtgtgcaaacagctatgggcaattaattccyttcgtggccttaggtaacctgaaagagaattgtgacgatatcaaataaattttgatgtcctatagtgtttgagttcaccagcactcatcctttccatgggcaggttatatccatggaacagcagataactttgtgattcttctgtcagcgaagtgtgggtgtaggggagttcaaccttgtccatcagctgctagaggcctgaccctgcccttaacagctgcagagaataaaagtatcagcttgttcagctcctggcatgcagggtacaagcagttgagctgcatggaattggatctcatagttgagtttcttggcaccctagataccttgttctctcctcgattacgggtgtagactttgtsttggtggctgttctgggcctcctaatttagttgagattcttttcttttctttttttttttttgagatggagtctcgctctgtcgcccagcctggagtgcagtggtgcaatctcggctcactgcaagctcttgcctcccaggttcacaccattctcctgcctcagtctcctgagtagctggggctacaggtacccgccaccacccccggctaatttttttttttgtatttttagtagagatggggtttcaccgtgttagccaggatggtctcgatctcttgacctcatgactcgcctgccttggcctcccagagtgctgggattacaggcgtgagccaccgtgcctggcctatttttttcttttttaaataatagaaatggggtctcactgtgttgcccaggctggttttaaactcctgggctcaggcgatcctccccctcttggcctcccagactgttggagttacaggcatgagccactatgccaggccagattcttttgtttattttttaataaataaattcaagtggattctcctgcctcagcctcccgatttgctgggattacaggcatgcgccaccacacctggcttattttttgtatttttagtagggtagggtttcactatgttggccaggctcatctcaaactcctgacctcaagtaatcctcccgcctcagcctcccaaagtgccgggattacaggtgtgagccaccgtacctggccttggcctcagattcttaatctgagctaattttgtcttctgcaggtatgaataaatgaatttcctctgcagagaaggttgagaatattgactgttttcttagtagaaaatgygggaacacagattagaaattaaacaaaaataatagtagtggtcacagaaatataccagtatagaacatatgggtatctgaaaggctgagaagctaggtgagatctgrtctagaccagatctttgtcatcaggcacaagctttgcaggtgatgccaacaatagttatgctgttgtatagaagaagaagctgaattgggaactattatttatctgtgactgaacagttagccttacaacatagcataatagttaagtgcacacactgtagagccaaatgtcctgggtttgaatactgccttcaccacttactagctgtgattctctgtgtatcttagtttcctctctgtaaaatgggagtaaagtaatgtgtactctagagtgttggaaagattagtgacttaatactgtacatataaagtgcttagaatggtgtctggcacatagtgaatggtatgtgctttctgctagtattgtcattaccattggttttagattttgggaatgagtggacatatatagatgaaggacctgagacccatccttgccagtttragatagaccctgcaccactggtctcatgactcagtgaacagcatctctggacattcttgatgaagacttgcttctttaacataaattgtgtatcctgtttttagtagttgaacccttagcccattatgtaattcatgtcatctgaattatatttggtttgaaaaaaacattagtttttctgttcctgaaacgtaaatttatttgatgtagtagctgagatactttgcacaagtgtgtcaacatcctggttttagaactatcttccaatcaatgctttgtgatgctgtcttaaatacatgcagtgtamgtatgtagtttgggatttaattaactgttcaaacttttattaaatgtctgttgaaatcttccctcttctcagtatgttgtcagcaagtgttctgtaacttttcagaatgataaaatgtgtccttgcttttcgtttagggtatatacatggtttttagaaaagtttttacccgaccgtgttttttgtatgccttaaagttagatgaatttgtgcttatgtaagctttaacagaaatgttggtggttgttaagtcaaccattttcagttaagtctaaactgasatcacttgaaaatgcggctgtttcactgaggtatcttatcttcagaaaggtccttgaaaaaaacagcagttaarccgggcatggtagctcaggcctgtaatcctagttctttgggaggccaaggtgggaggatcacctgagcccaggagtttgagaccagcctaggcaaatatgggaagatcgtatgtctatgaaaaagaaaacaaaaacggaaacaaaactttttaggcagttaaaacttttttccaaaactattcctttcatagagaatatctttgtagttttatcaggttggtttattcggccggasactttctttcctcattacatttagacaattttttcactttaatcgttaataggaagctttatattatattttgctgattttgtttctaaagaagttaaaaatgtagcagcagttctttacctgtgttaaaatctatcacatctttaattcactttgaggtgagataaatacgggtttcaaaatttggttggatagattgaagtaarcctggtgcttcctgcccctcaagaacttgagataggtatgtttgagtttctactggattatttttagaatcttttgctcttgtctgtttctattctgagaattctcttggaacctgttccagtgtagtagaactcttgggagtggaaagtgatagatgatggaacacaagtgtacactgaattcctatggtctggcaactgggtacttgttgtagaagcattcctatttactacacacagctccatttcccagaaaaggaggacatagaagttcctcctaacagtatgttagttgaaggtgttgatttttacggtctagtttccatgtctcagtcatttttacagttcagtggtggtaacaatttttaagggtcttgaagaatattttggtaacttacgcttttaccttgatttaatggattcacaattatcagaagttttttttttttggggagacagagtcttgttctgtcgcccmgattggagtgtagtggcatgatctyggttcactgcaacctccgcctctcgggttcaagtgattctcctgccttagcctcccaaatagctgggattacaggctcacgccaccacacccagctaatttttgtagttttagtagagacagsgtttcgccatgtttgccaggctggtctggaactcctgaccgcaagtgatccacccgcctcagcctcccaaagtgctgagatgacaggcattagccaccgcgcctggctttatcagaagttttatgtaaaattaatacgggaaaatttgtctgttgaatcatgcatcctgttaaagttattttctgacccgtttttccagaagatttcagtcacatcccccatcccctgtgattgttgtgcgaaacctgtttcatctctggaaatttttttgctggacatctttaatattaagactttttatgaatagggaattaggtattataacatttcagtgatagtgtggagaggcacaactgacagaagacaagttaatctgaatttatttaagcatgcattcttggatgtcctgaggcccttacaattatttttatttttcaaagaatgtatttgctatttttttttttttgagacagagttttgctgttgtttcccaggctggagtgcaatggcgcaattttggctcaccgcaacctcttcctcccgggttcaagcgattctcctgcctcagcctcctgagtagctgggattatgggcatgtgcccccacgcccggctaattttgtatttttagtagagatggtcgggctggtcttgaactcccgacctcaggtgatccagccggctcggcctcccaaaatgctgggattacaggcgtgtgccaccgcgcccatccttgtatttgctatttttatttttatttttttttgagacagagtcttgctctgtcacccggactggagtgcaatggcgccatctcggctccctgcagactccgcctcccaggttcaagcgattctcctgcgtcagcctcctgggtagctgggactacaggtgcgtgccaccatgcccggctaattttttgtatttttagtagagatggggtttcaccttattagccaggatggcctcgatctcctgacctcgtgatccgcctgccttggcctccaaagtgctgggattacaggcgtgagcyactgcacccggcctgtatttgctatttttaagctagaagtctttgtagtaacaatttatgaatatataacccagagcagtaaaccttaattaagagaaaaactttttccaaacaataaagtaagccatgtagtttttatgtttcacaaagcaactattctggtttagccatgcaaccgggtcattatttataggctaattacrtattcattgtggaatattaagaattgatgattggaaggagatatagtcttaatgttgatactgtgaacatggaccagtaaaattttaatagtttgcgttataacaaagagttatggttttcttccttgacaagtgaggattcatgtacattatatcaaaatgtttggttatagtagtgaggctataaagattaagtcatttttctgtaaatcaaaaaattaatgtacattgaatatgggttaagtatatttcttctgtacatgcagatttttmtcaccagatggcactcctgtatggagaaagtctcattttgttatttcacctagattattttctttctttttttttttttttgagacagtcttgctctgtttccctggagtggagtggtgcgatctcagctcactgcaacctctgcctcctgggttcaagcgattcttctgcctcagcctcccgagtagctgggactacaggcgcgtgccaccatgcctggctaattttttgtatttttggtagagacagggtttcactgtattagccaggatggtcaccatctcctgacctcgtgatccgcctgcctcggcctcccaaagtgctgggattacaggcgtgagccactgcacccagccgattattttcataaatggggtcactgagaataaacagtgagaaaaagatcagataatccaatcaacagaactggaaatctatgagtaaactactcacttcttaaaaaggttttrtggtaggaatactactcaacaagttagcttttgattagatgcttaattctgttttattcttttcttaaaatgtatttatttaaggagataggtggctgggcatgatggctcacacctgtaatcccagcactttggaggctgaggctggtggatcacttgaggtcaggagttcaagaccagcctggccaacatggtgaaaccccatctctactaaaaatacaaaaaaaatcggctgggcacggtggcacatacctatagtcccagctacttgggaggctgaggtgggagaatcacttgaacctggaaggcagaagttgctgggccgagatcgtgccactgcactccagcctgggcaacaaagccagactgtgtcttaaaaaaaaaaaaaaaaaaaaaaggggtcttgctgtgttgcctagcctggatttgaactgtgggttaagtgatcttcctgcctcagcctcctgaatagctgggacttacaggtgcatgccaccttgcccagcttggatgcttcactttagatacttaagatggaattgcagagtattagtgctgaaggtgatttttttatttttatttttttagatggtgtctcgctcttgttgcccaggttggagtgcagtggtgcaatctcagctcactgcaacctcctcctcctggcttcaagcgattctcctgcctcagcctcctaagtagttgggattacagaggtgcgccaccatgcccggctaatttttgaatttttaatacaggtagggtttcaccacgttggccaggctggtcttgaactcctgtcatcaggtgatctgtctgccttggcttcccaaagtgttgggattacaggtgtgagccacggtgcctggcctgaaggtgattttaaaaataatccaatggggccgggcacagtggctcatgtctgtaattgcagcactttgggaggttgaggcggttggatcacccgaggtctggagttcgaaaccagcctgaccaacaagttgagaccccatctctactaaaaatacaaaaattagtcgggcgtggtggcaggcgtctgtagtcccagctgcttgggaggctgagacaggagaatcgcctgaacccgggagacggaggttgcagtgagctgagatcacatcactgcactccagcctgggtgatggagcgagccyccgtctcaaaaaaaaaaaaaaaaawtcaaatggattctttctcaaatacagatatgccttacatttgtttaaatgcatcacagttttaaaacagtgtgttcgtatgcatttattcatatctgagagaatgctttaaaaataaatggaatcatggcaaaacaattaaccttgttctctataatacaaccaaaatgataaacccaaaccaacaaaattataaagttgttaaactgaaaaaggatgcaaaatgtgtattcatactgactggagaggcagattcaaatgcagtaaaaagttttaaaccagtgtattgaggctgtgagaaattctagataattggttgttactataatgtaaaaggcagtacaataatatgtctgtggcctttagcaagccagttaatgaagctgttgaaaaaataagttaatattagtgcagctaacacagaaaaatgcttgtcagaccttttctggctaaaataggtttcagggacacaattttctttggtacctgaattagtatgatgaattatggttagtctcctctattttattttatgatacacagatcaaaaatatgtagaaatgttgtaatgtcattttattaatctgaaatgtataagatttacaaatagtggaatatctttccacatcatgggaatgcttgcttttgggtgtctaaaactgaccgttctagaaaacagaattccggccgggtcctgtaatcccaccactttgggaggccgaggcgggtggatcacgaggtcaggagatcgcgaccatcctggctaacacggtgaaaccccgtctctactaaaaaaatacaaaaaaattagctgggcttggtggcgggtgcctgtagtcccagctactcaggaggctgaggcaggagaatggcgtgaacccaggaagcagagcttgcggtgagcagagatcaagccactgcactccagcttgggtgactgagccagactctgtctcaaaaaaaaaaaaggaaacagagttccatgtattgttaaaatcgttggctctgggccggctcagtggcacacgcctgtaatctcagcactttgggaggccaaggctggtggatcacctgaggccacgagtttgagaccagcctgaccaacatggccaaaccccatctctactaaaaataccaaaaattagccgggcatggtggcgcgtgcctctggtcccagttattcgggaggctgagacaggaggattgcttgaacccagaaggtggaggttgcagtgagccgagatcgcactattcgttgcactccagcctgggtgatggagtgagactctgtcttaaaaaaaaaaaaatcattggctctgcattgttatcattggagatgatagctctatgtgttattgcgctgaagaccttccagtgggacagatgtggagatggaagacggtagtattgatgatcctgaccctgtgtaggcctagactaatgtgtgtgtttatctcttagtttttttttttttttttttttaataatggagtctccctctgtcacccaagctggagtgcagtgggctcactgcaacctccgcctcccaggttcaagcaattatcctgcttcagcctccctagtagctgggattacaggcgtctgccaccatgcctggctaatttttgtatttttagtagagatggggtttcaccatgttggtcaggctggtctcgaactcctgacctcgtgatctgcctgcctcagcctcccaaagtgttaggattacagatatgagccaccgcgaccggctgcacatttgtttttgttttgtttgttctaggagcttcgtaagagtggaattgtttgcataaacagtttgtttctgattgatgggtatatttcctctgtggagaattccattttggaaatttaacttttaaggcattgctacatgtttttctgtgcgtgtgtgtgtgtgtgtgtgtgtgtgtgtgtgtgtgtagtaaaatgtacataacataaagtttattgtaaccattgttacatatacagttctctgacattaagtacatttacattgtcgtgcaaccaccactgccgtccatcttccgaacctttgtatcctcccctacagaaactccatacctgtgatacagtaactccccattcttcccctacccccagcctctggtaactaccattctacttgtttctatgaatttgacttttctaagtaacttgtataagtagagtcatgtagtatttgtccgtttttttttaccccttgccccgagagttttgctctgtcgcccaggctggagtgcagtggcactaccttggctcactgcaacctccgcctcttgggttcaagcaattctcctgcttcagcttcctgagttgctgggattacaggtgtgtgccaccatgcctggctaatttttgtatttttagtagagacggggtttcaccatgttggccaggctggtcttgaactcctgaccttgtaatcaatctacctgcctcctcttcccaaagtactgggattacaggtgtgagccactgcaccctagccttatttgtccttttttgactggcttatttcacttagcataatgtctttgaggtgcatccatgtggtagcatgtgttagaatatcttcccttcttaaggctgaataattttccattgtgtatatatgtcacattttgcttatccattcatctattgatggacacttgggtatcttccactttttggctattatgaataatggtgctttttaattaattaatttattttttatttttaaattttatttatttatttattttgagacggagtcttgctctgttgcccaggctggagcgcagtggcacgatctcagctcactgcaagctccacctcccgggttcacgccattctcytgcctcagcctcctgagtagctgggactacagtcgcccgccactacgcctggctaattttttgtatttttagtagagacggggtttcaccgtgttagccaggatggtctcgatctcctgaccttgtggtcctcccgccttggcctcccaaagtgctgggattacaggcgtgagtgaccgtgcccggccaataatggcactcttaacatggaagtacaagcatctctttgagactctgctttgagatttgtttttggtgcctacccagaattggaattgctggatcatatggtaatttagtttttgattttttttttttaaggaaccaccattcttttaatgatggttgtaccactttaaattcccatcagcagtgcacaagggttctagtttttgtacatcctcaccgatgctttctgtgtttttaaaattaaacaaaaaaacaattatagtgttacagctcttttagaatttgtctagcaggttttctggtctttatcggaaaattcccggctcttctgtctaaaaaaaaaaaaaaaaattgtaatcgctatccctaaagggtaggaagtaggaatcttatggttataatttttttttttttttaaattgaggtggagttgttcttacagtgttgtctaggctggtctcaaactcttgggctcaagcagtcttcccatcttagcctcaaaatagctgggattgcaggtgcatgccaccgtgcccagcttagaatcatgttttgatgacatacttaattatgtgcttgacacttagtagctagtcaataaatgtttgttcaacaaatcaaagaaaattatatgcacaatttttttttttttttgagacggagtctcgctctgtcgccaaggctggagtacagtgacgcgatctcggctgactgcaacctctgcctcccgggttcacgccattctcctgccttggcctcctaagtagctgggactacagatgcctgccaccatgcccggctaacttttttgtatttttagtagagacggggtttcattgtgttagccagcatggtctcgatctcctgacctcatgatctgcctgcctcggcctcgtgaattgctgggattacaggcgtgagccaccgcacccggccacacaattgtttctttaagatttattatttacagctgacttttgcttttaggcatagcctgtttcttgacacattttaaattgggctattggcaggtaaaatcttggctgggtgcaatgttgttttggggttcaaatagcaactgcaagtagtaagaggcagatagcacttcatgtacagtgactacatgtagtgataaaatggttgctggttaaaattggtggtacttgagatttttgtttagaattgctaagctcgtaaaccatagacttagattgcagtagtcgaattggtttaacagataccagcaaaatgtaaaatcctcaagggctacttcttgagaatttgtattccagagagcttttatcttttattgtaagtgtccttgttttctctgaagtacatgcttatcttttactatgattgttttgcttaccatccctactttcttgcagattttctattttgtacatacattattttgtatatactgtatatgatgacttcagtgagcagtgaccattgtcgaggtgctcrggaaaaaccacagatttcagcagcacaatcaacgcaaccacagaaacaagtggtacaggtaagtttttgtggaactctttttttttttttccttttttttcttttattattatacttgaagttttagggtatgtggaactcttgtttgccttgtttagaattaaggaaattaagggagagcatatgatttaatgttttcctttgtaggaaactttaggattttggaccctttgtttaaacagtaggtgatggccgggtgcggtggctcacgcctgtaatcccagcactttgggaggccgaggtgggtggatcacttgaggtcaggagtttgagactagcctggccaacattgtgaaaccctgcctctattaagaaaatacaaaaattagctgggcgtggtggtgtgcgcctgtaatcctagcttctygggaggctaaggcaggagaatcgcttgaactcaggaggcagaggttgcagtgagcccagatcacgccactgccctccagcctgggtgacaaagcgagactccttcctaaaaaaaaaaataaaataaataaaaaataaaaagtaggtaatgaagaatagtaagraaagaggtattgtacttgattcaggtacaattggatgttgttccatgagaactctttaatgctaaccttttccaggtacctcttagctattaggctgccactgccaccaccaccaccaccaccaccaccaccaccaccaccaccaccgccgctgccgccgctgctgcctcctcctcttcctcctcctcctcttcctccttctcttcctcctcttcctcctcttcctcctcctcctcttcctccttctcttcctcctcttcctcctcctcctcttcctccccttcctcttcctcctcctcttcctcctattcctcctcttccttctattcctcctcttcctcctcctcctcctcctctcccctttcaccttgctctgcttcccttcctcctccttccctgctgcttcatcatcatctcctctcccttttctcccttctattaatttaagtgtgtccttggaatgaaatatgaaaatccaaggtagatggagaactaatagtctgaagtagtaaaatacctgaattacaatagactttaaaaagctgcctttgctgggcatagtggctcatgtctgtaatctcaacactttgggaggctgaggcaaaagggttgcttgagcccaggaattaagagcaggctgggcaacatagtraggaccttgtctctacaaaaagtttaaaaagtagctgggcatgatggcttccatttgtagtcccaggtacttgggcggctgaggtgggaggatcacttatgatgatgctactgcactccagcctgggtgacagagtgagaccttggctcaacaaaaaagcaaaaacctgccttttcttcaaagcacaaggaagagtgcttgaatcttagaatggcttttaatgatcaagatccacttgaggccgggcgcagtggctcatgcctgtaattccagcactttgggaggccgaggtggacagatcacctgagatcaggagttcgagaccaggctggccaacatggtgaaaccctgtctctactaaaaaaaaaaatacgaaaattagccaggcatggtagtgggtgcctgtaatggcagttagtcgggaggctgaggcagggagaattgcttgaacccgggaggcagaggttgcagtgagccaagatcacaccactgcattcaagcctgggcaacagagcgagactctgtctcaataaaacaaagacccatttgaataaaatttttaatgttaaatactccctcctcctcaatttggttatattattattttaagtgaagtgagataagtgctaagcacagtacctggtgcaaaattaagcattatatacatgttattgactagattggcaaaccctttttcataggcaatatgcaagtaagtaaactatatccagtttgtcttacttgcagattgatttgactatactttgatagttaattaaaagtgcttcttaaaatcactcatttatacccaagtgccctgttgatgttaggggacatagtgaggagatttaagtgttgcgttacatttttcagtataaagttagtgtagtattctgctggtattaacagacagatatctctgctactcagtgcttgatcctaaatacacttactctgataggaatttattcacaaactgatctagtccagtgatggaaaaatttggaggttttaggctaggtcctccttttatagttgaatttacttaggaaaaagtttgcttaatgaatggtcttttttttttttttttttgagacggagtctgtcgcagtggccagtctcggctcactccaacctccacttcccgggttcaagtgattctcttgcctcagccttccaagtagctgggactacaggcaggcaacatcatgcctgcctaatttttttttgtttcttcgagatggagtctccttctgtcgcccaggctggagtgcaatggtgccatctcagttcacagcaacctccgcctcctgggttcaagcgattctcctgcctcagcctctcaagtagctgggattacaggtgcctgcctccacctccagttaatttttgtatttttagtagagacagggtttcaccatgttgcccagcctggtctccaacacctgagcccaagtgactgcccccttagccttcaaaggtgctgtgattataggcgtgagccaccgcacctgaccytttttttttttttttttttttttgagacagtctcgctctgtagcccagtctagagtgcagttactctatcttggctcattgtaacctccgcctctggggttcaggcgattctcctgtcttatcctccccagcagctgggattacaggcgtgagccaccatgcccggctaacttttttgcatttttagtagagatgaagtttcaccatgttggccaggctggtctcaaactcctgacctcaagtgayctgtcccccccttgatctcccaaggtgttgggattacaggtgtgagccactgcacctggcccttttaaatttttttcttttaaacactagtatgcattaggaaaattattgatgtttatttattcattaatcctattctgggaagtatttgctaagaaagtaatcttaaattggtgtcataaaaagtggctttatttggcaatttttttctttctttttttttttgagatggagcctcgctctgtcgcccaggctggagtgcagtggcgcgttctcagctcattgcaacctctgcctcctgggtccaagcgattctcctgcctcagcctctggagtagctgggattgcaggcatgtatcaccatgcctggctaatttttgtatttttggtagagacggggtttcgccgtgttggccaggctggtttcaaacttctgacctcaggtgatccgcccaccttggcctcccaragtgctgggattaaaggcatgagttaccacgccctgccggtaagatgttaattactcaattttaaatgtccagtgttatgttagaggtgttctgagataacctattcaggttgcatgatgaaagagagttttttattttttgagacggagttttgctcttgttgtccaggctggagtgcaatggtgcgatgtcagctcactgcaacctctgcctccacctcgcctggctaattttttgtatgtttggtagagacggggtttcaccatgttggtcaggctggtcttgaattcctgacttcaggtgatccacccagctccgcctcccaaagtgctgggattacaggcgtgagccactgcagcaggtggtgagagttcttttgaatccgtataaaccaggatttttgtcctgggtctagcacttagtaattagatgagttacttaaatctcctttaacytcttttttttytttttttttttttgagctagagtctcactctgttgcccaggctgcagtgcagtggcttgatctcggctaacggcaactgtgcctcctgggttcaagtgattctcctgcctcagcctccagagtagctgggactacacttgtacatcaccacacccggctaattttagtagttttagtagagaggggtttcaccatgttggccaggttagtcagttttgaattcctgacctcaggtgatctgcccacctcagcttcccaaactgcccggattataggtgtgagcccctgggcctgaccgtgaacctcaatttaaaaaaaaaaaaaatacattgtgagatttacggaaaagttgcaatgggaatatkaataattactgaatacccttttttcagattccccagattttaacatttctgtcacatctactttatcctgttctcttcctttccctacagtttattcccagaaacgtttgacaagtagttgtgaataaggttcttcttcacttaatacctcagtgttttttaaaaaacaaggatctttttacataattacagtacaattataaaaaatcagaacatctacagaccatacttatattttttcaatggtcctcataatgccttttttttttttttgagayagttttactttgatgcccaggctgtagtgcagtggtgcgatctcagctcactgcaacctccgcctcctgggttcaagtgattctcctgcctcagcctcccgagtagctgggattataggcatgcgccaccatgcctggcaaatttttatattttcagtagaaacgaggtttcgccatgttggccaggctgctctcgaactcctgaccttaggtgatccgcctgccttgacctcccaaagtgctgggattacaagcatgagccactgggcccagctgtaatgtcctttttagctaattagattgtggaatatacattgtattcagatgtcaactctcttgtgaatttatgtgaaaattccacaaaattatgtgaacattccacaattatgaagtgattataagaatatttgaaaattatgatataaaatgtcttagaaaaggtatacttcctgatcaactgaaaaaaatatgtaaagttaatgcaaaactgttgaacattaatgagtacaggcttagtagactgttaataatgtttatctttggtggtgggcataaataatcctactttattattatttccaatttttttctgggtgacagctctaattaaaaaaaatttggattcatttgaaaaatttcacattttccactgtgaaagcagcttagttcgtaataagccatatgaatggataagagatccagaggaagagctgtagtgatgstacttttcttggcaagatatttttcaacttgagatgtgacctagtgtatgtcactaatgtttattgcaggggagggtgcactgaccttgtttaacttaagaattaccagttgatcctgatttttcctcttttttcccaagctgtaccgacctcttgacacttcctagagctcagcctggtaacttccctattatactcttatgtttggtgctttgtttatcaaatatttattgaattgtttatcaaagaaaattatttttttcttgactcagggtattttataaagttaaaaaaaatacttaaagttctcattaaaatttattttcataaatatgctagcactagtgttactatattgttattgttaaatgactattatgtgtattggctatgctttcagaagtagtctgtytatcccttttatgaataaaaaagatattactgaagagaaatacagtatttgtgtcatataatacttaagctgaaaaagctaagtctgaataaatcagtcattggcatttaccttacatatggcaatgaatagtgactttatagttagaaatgtatgggtgaaacagtatcagaatgataatgtagaaacatatataagccccagactgccccctacagcaaaatgcgattattaataactattctgcttgaaatatttggtgagattctttcacccatcaagtgcttgtttgttaatattttaatcgggtcggtgtttctttggttttgtaaattgtgcacgtttacaaagcactggctgttctcaggcagttttcaagtttaaatattcttgcctttagggtcattatttgttcctggttcccccactctgccattactttttcatactttttccacaaagatttcagccatactccctgactttggtttatcttctactctgacatatctgcatgaagtagtttctgtctgaaatgtcttgaaaccagggatgttcttataataatacttactgtgcagtgagtggatagccacaagtaatccataattttactttttaaaaaaaaatgtttgttgtagctcctgtttaacacatctaccaccccaagccgccgcctgtactccttttctgtctgccaaaatccctccccacaatgctttattatgaaaatggtcacagatgaagaaaagttgagagttgtacagtcaatatccatatgttctattacctttttgctctatttgttttatcacatctgtttagccagccattattttatctaagtttttaatgcttttcaaagtgaattaaatgattaatggtactcttaatcacttcagaatggatgtcattgactagggtgtattatttgtttattgtcttttttttttttttttttttttatgaggcagagtttctgcccttgttgcctaggctggagtgcagtggcgcgatctgggctcactgcaacctccatctcccaggttcaagtgattttcccacctcagcctcctgagtagctgggattacaggcacctgccatcatgactggctaatttttctatttttagttgagacggggtttcaccatgttggccaggatggtctcaaactcctgacctcaggtgatctgcccgccttgacctcccaaagtgctgggattacaggtgtgagccactgtgcctggctgttttttttttttttttttaatagacaggacctcgggctgggcgtggtggctcatgcctgtaatcccagcactttgggaggccaaggcaggtagatcacctgaggtcaggagtttgagaccagcctgaccaagatggagaaactccgtctctactaaacatacagaattagccaagcatggtggcacatgcctgtaatcccagctacttgggaggctgaagcaggagaatctcttgaacccaggaggcggaagttgcgatgagcagagatcccaccattgtactccagcctgcacaacaagagcgaaactctgtctcaaaaaaaaaaaaaaaaaaggaaatataagtcatttatttttcatttgttacatggaatatttacatagattgtttcctgctgggcatggtggcttactccagtagtcccagcagaggtgggaggattgcttgagtccaggagttcgagaccagcctgagtaacgtagtgagacctgtctctacaaaaattacaaacttcttatactgtatggtaggataagtgcttgaatctattggcttaccaattaataaaaaaacattttgaaccgggacatggtggctaacacctgtaatctcaacactttgggaggctgaggtgggaggattgtttgagctctggagttcaagaccatcctgggccaagtagcgagaccctgtctccataaaaaatattttttaaaaaatttataagaaaaaaacctttttggccaggtgtggtggcttgcgtctgtaatcccagcactttgggaggctgagacgggtggatcacctgaggccaggggttcgagaccagcctggccaacattacaaaaccccatctctactaaaaatagaaaaattagctggccgtggtggtgtgcacctgtaatcccagctacttgaagggtgaggcacaagaatcacttgaacccaggaggcagaggttgcagtgagccgagactgtgccactgtgctccagtgtgggcgacagagcaagattctgtctcaaaaaaaaaacaaaacaaaacaccaaatttttagggaaaaattattttggaataattttaagagttgtaaaaaagttgcaaagaacgatagagatagagatatattcaccccgctatcctaaatgttaacttttttttttttttttttttttttttgagacagtctcgctgtgtcgccaggctggagtgcagtggcgtgaccttggctcactgcaacctctgccttgtgggttcaagccattctcctgcctcagcctccaaagtagttgggactacaggcgcacaccactgtgctcagctaatttttgttttttcagtagagacggggtttcaccatgttggccaggatggtctcgatttcttgaccttgtgatccgcctgcctcagcctaccaaagtgctgggattacaggcaggagccactgtgcctggtcagctttttacataaaggattgcctaaccttttctgtaaagtgttagtatatatcttacgctttgcagtccagacacaatctctgttgcattttgattttattacatttttgagacggggtctcatgttggccaggctggtctggaactcctgacctcaggtgatccgtctgcctcagcctcccaaagtgctgagattacaggcctgagctactgcacccagctgatgacagagtttttgacttcttttgtgttatgtcttattgcttccacacaccatcctggttcaaagggaaccagaaggtggtagaattagattatcccaaaattactcattttctgtgtcccacttttttttttttttttttgagacggagtttcgctcttgttgcccacgctgcagtgcaatggcgcgatcttagctcaccgcaaccttcgcctcttgggttcaagcagttttcctgtctcagcctcccaagtaactgggattacaggcatgcgccaccatgcccggcccggctaattttgtatttgtatgtgtatttttgttttttgagacgagtctcactctgtcgccatgctggagtgcagtggcgcgatctcggctcactacaaccttcgcytcccaggttcaagcgattctcctgcctcagcctctggccctcttttaaaataattggtcactaggacggttcagcatatgcaactcaatgaacaggatacatctcattaagaaaaacaaggacaggccagtgcggtggcttatgcctgtaattgcagcactttgggaggccgaggcgggcagatcatgaggtcaggagatagagaccatcttggctaacaaggtgaaaccccgactctattataaatggaaaaaaaaattagccgggagtggtggcgggtgcctgtagtcccagctactcgggaggctgaggcaggagaatggcgtgaatcggggaggcagagcttgcagtgagccgagatcactccactgcactccagcctgggcaacagagcgagactcagtctcaaaaaaaataaaaataaaacatacaaggacaaaaaacatatgatcatttcaataaacgctgaaaaatgtatgtgaaaaaattcaacatccctttgtggtaaagattatcaacaacctgagtgtggaaggaacatacctcaaaataataaaggctatttttttttttttttgagacagggtcacccaggctggaatataatgatgcgaacatggctcacggtagccttgacccccctaggctcaagagatccttctgcctcagcctctcgggtagctgggactaatggtgtgcacttccatacttggctaatgttttattttttgaagagacagcgtctcaccaagttacccacagggctggtttcaaactcttaggctcaagggatccaccttcctcagcctcccaaagtgttgggattacaggcgtgagtcactgcacctggcctcacttgagtactagaacttctagccagagcaaataggcaagagaaggaaataaaggggtctagattgcaaaggaagaagtcacattatattcttatttatagatgacatgttgtatttagaaaaacctaaaaactccatcaaacatctgttagaactgagaaatgaattcagtgaagttgcaggatacaaaatcaacaacaaaaattagcctttatatatatcaacagcaaaacagttgtactctgtctacattgttcaggtactcattatatagtatatgcttctcctttggccatttagtaaataatatgttcagtagtcactgtcaatacttaagtcagtttctctagtcgttttgattgtctgaacccattgcttttgttgattcctctgaaaggaattatgagaacaatattccttgtgtttggtggtgttcacaatttataccttttatacttgagtagaacatcagttttgttggctctaagtgctaggcccacattttctttacgttatctttttttttttgagacaaggtctcactttgtcacccagactggagtgcagtggcacggtcatgctcactgctcccttctcccttgacctcctggactcagataatcctcctacctcagcctcttgagtagctgggagcacaggtgcatgccaccacactggttaatttttgtatttttttgtaaagggttttgttgtgttgcacaggctggtctcaaacgcctgagctcgagcaatctgcctgcctcagccttctgaactgctggaattacaggtgtgaactgctgtacctgactatcttaaatattaattttttcttgcgcaaagcattgctcttgacaagtttgttgatattctaatttcattctcttctgtgtctcttgacatttctgcctagttgtccagtggatgtttgttcttttrgagtccagttcttcttctttttttttttttttctttttgagatgagtctcaccctgtctcccaggctggagtgcaatggtgcgatctcggctcactgcaacctctggcctcccgggttcaagcgattctcctgcttcggctttccaagtagctgggattacaggtgcacgccaccatgcccggctaatttttttgtatttttagtagagatggggtttcactgtggtggccaggctggtcttgaactcctgacctcaagtgatctgcccgcctcagcctcccaaagtgctgggattataggcatgagccaccacgcctggccagagtccagttcttaaactaaagaataagaatgtcttagtgtggactgattatttagggattgatattctcaaggacggtgtattttcattgacatatttatgcattttttggtttgttttccagacatttttcttaaattttasttttaaggatctatactgtatttttattctttggaggcttattgtccatagctttaagttgggttgtcttttgcctatcttcagtgtttgacactttgctttcttttctcccattcctatttatctcttcatttctctttccttttatttcctttttacaggaaaaaaatttccccagttttattctctgttattcttgagacattaattgttaagttttatattccttgtagtttagactccattttcatatgtgataggactttctttaaattattatttcttgaattctgtaatttaaagaagaaatagaaaaacttagagatatgttattcttttatcagattttttttttttttttttttttttgagacagggtcttgccctggcttccaggctggagtgcaatggcatgatctaggctcactgcaccctctgcctcccaggttcaagcgattctcacacctcagccttccaggtagctgagactacaggtatgcgccaccatgcctggctaattttttttttttttttttttcttgagacacagtttcactctgctgcccaggctggagtacagtggtgagatctcagctcactgcaacctccgcctctcgggttcaaatgattcttgtgcctcaacctcctgagtagttgggatttcaggctcgtgccaccacgcactgctaatttttgtatttttagtgtagacggggtttcaccatgttggccaggctggtcttgaactcctgacctcaagtgatccgcctgcctcagcctcccaaagtgctgggattacaggcctgagctaccatgcccgactgttgttttcaatgggatttaagaaaaaggtgatgcaagaagtgtctgatttttaaatgttttacagagatgggggtctcactatgttgcccaggctggtctcctcctgactcagcctcccaaagtgctgggattataggcgtgagtcaccgtgcccagccttaaaatttactttttttttycctatttttttttttggagacagaatctcgctcttttgcccaggctggagtgcagtggcgctatctcggctcactgcaagctccgcctgccaggttcacgccattgtcctgcctcagcctcccgagtagctgggactacaggtgcccgccaccacgctcggctaattttttgtatttttttagtagagacggggtttcaccgtgttagccaggatggtctcgatctcctgacctcgtgatccacccgccttgrcctcccaaagtgctgggattataggcgtgagccactgcgcccagcctttttttttcctttttttgtgaccaggttgttctgtcacacaggctggagtgcagtggcgccatcttggctcactgcaaccttgacctcctcgggctaaggtgatcctcccaccttagcctctggggtagctgggactacagcacttaccaccacacttggctagtttttctgtttttttgtagaaatgaggttttgcagtcttaatagtgagctaagaaataaaaattacaccaaatatagaccattttaagtaattaaaaagttttaaaagcttttttaaaaagttcattatgcccgttttgggaaaggttttgaggaggcaggttctcttatttactgctcgttgagtatatatctttatagcctttgtgcagagcatttttgtggagatggttttaaactccttttaacactggtagacatttctttgaccctatagttttacttctttgtattcattgttagaaagctatatttggggctgggcgtggtggctcatacctgtaatcccagcactttgggaggccgaggtgggcggatcacctgaggtcaggagtttgagaccagcctgatcaacatgatgaaaccctgtctctactaaaaatacaaaaattagccgggcactgtggcatgtgcctgtaatcccagctactcaagaggctgagacactagaattgcttcaacctgggaagtggaggttgcagtagccaagatcgcaccactgcactccagcctgggcaacaagagtgaaactctgyctcaaaaaaaaacaaaagaaagaaatctttctttggccgtgtgtggtggctcacgcctgtaatcccagcactttgggagggcaaggcaggagggtcatttaaggtcaggagttcaagaccagcctgaataacatggtgaaaccgcatctgtactaaaaatagtaaaaattagctgggtgtggtggcgaacacctgtaatctcagctactggggaggctgaggccggagaatcgcttgaacctgggaagcggaggttgcagagaatcccttgaacctgggaggcggaggttgcagtgagtcgcgatcacgccactgcactccagcctgagcagcagagcatgactgtctcaaaaaaaaaaaaaaaagccatctttgatgtatgtacagatttgggtataagaatggacctcagcctgccacagtggtgcatacctgtaatcccagcactttgggtggccaaggtgggcagatcactcgaggtcagacgttcaagaccagcctgaccaacatggtgaaaccccgtctctaccaaaaccaaaaattagcagggcgtggtggcatgcctgtagtcccaagcatgagaattgtttgaacctaagaggcggaggttgcagcgagccgagagcacactactgcaaggcaacagagggagacttcgtctcaaaaaaagaaaaaaaaaaacaacgaaagaaaagaatggatctctggcagtgttttagtagtaataaaaatttgcagagtaagaaagatataggccgggcactgtggtttatgcctgtaatcctagcgctttgggaggctgagcagaggaattgcttaagctcggggggttcaatattaatctgggcaacatggcggaaccttgtttgtactaaaaacaaaacattaaccaggtgtcgtgttgtgcgcctgtattcccagctattgggggaaattatggggggtggagtgcgtgaggtgggaggattgcttgagcctgggaggcagctgtagtgagcactgattgtgccattgcactccagcctagccgacacaatgaaaccctagcttaaaaaaaakatgttaaggytgggcgggtggctcacacctgtaatcccagcactttgggaggccgaggtgggcggatcatgaggtcaggagttcgagaccagcctgaccaacattgtgaaacccgttctctactaaaaatacaaaaattagccaggcgtggtggcatgcacctgtaatcctagctattcaggaggctgaggcaagagaatcgcttgaacctgggagatggaggttgcagtgagccgatatcgcgccatgcactccagcctgggcgacagagcgagactctgtctcaaaaaaaaaaaaaaaaaagcacctatgcagtggattgtcatgtagcattaaacgtgatatagatattcataataaattgtgtctgtgagtgattccacatggtagtatgttaagtattctgtttttgataaaagaggaaaatagccaagtgtggtggctcatgcctataattccagctctttgggaggcagaagtaggaggattgcttgagttcaggagtttgagaccagcatgggcaacacagtgagaccttgtctttatgaaaataacaacaacaaattagccaggcatggtggctgccatggttgctactcaggaggctgaggtcagaggagtgcttgagcctgggaggtcgaggccatggtgagctgtgattgtgccactgcattccaacacagagtgaaaccctgtttttttgttttttttttttaatgaaaaaatataaataccaaatacataaatagttttggtgttagatggtcactttatggatttttcaatttttcttgtgtttgacttgtaaagcttataatttaagaaactgtaatgatgggaagggatgagcatcagtggtgcttggattggaacaaggctacctgaatctgctggtatggtacattttttaggtttgaaacacagggagcagaaaataatagtgttagggaaaacaggcaaactcttcatacaggcttcttgcaacagggacactaacagtctactttcattttgtgaaaattgattatatgaattggagttatcttgtcatacccaactaaatttagagtcagtggaccaagggttacggtaaaaaagtgcttggggcacaaaccgcttgcccagggattatattgcaggccagctgccacaatgacatgctgtaaccttaaatccagttttacctactagctgttgagatgaactcttgtgactctaagtctrgttttaccaaccgtgttcactcaccaatcagagcttaccagctcccaaaagctttagtagttccagtgagttttctttcaaaacaataggtcacatttctttttctaataaaactcccaaccttctttgtgttctttggacacactaggaggctaccctagtatgtgtatgtatgtatgtcctggattgcaatcctacttatatattctttctaaataaaaccttttttacttagagatttgtttctctctatatttttgactttaacagttcataacaagttgtcattactccaaacccaaatgtataatgtggaaatgccatcttttaaaaacccatctctccctttkcttttcccttttacttcatctagttgtcacgacagtggtgctcttggctgtggcrctgggacttattggttggttatgattcaggaaaatgattgtctgatttagggatagtgagagtatatgtaaggtccttacatttacagggaacaattgaggtaagattttcagtaagggtagacactgaatttctgtaccaatgtctttttgggtataatgtagcagtattgcagcagttaaactgaggtctcagcaggcataggttgggatgaacaggccaaagcacctggagtttgtataatcacccacccacatggcctggaaaggccttttgaaaagtgctttaaaatgcaaaaaatgtcaacaactcccacttatcccacttyagtcaagattatttgaaatgagtgtatataaaaaactcagaataaaagctgtttattagttccttatggcttttcttcctctaagatctttttgtaaactgttaagctttttaaatatttgtgttgggagttagtatagacttggttagcgaggcaacttaaactattttggagtaattttakatttaatagaccgttgtacagagatgatacagattgttcctgtatattcctcacctaatttccctgttgtaataattacggtaccttcgttaaaactaagaaaccagactggcacattacaaagtcacgccacagaagaataactttctttagaacttttctgattttttgttggtaaaaacatcagaaaacgaaacttcagtcagtaatgtgattgaaaaaatattttgagtgacaaaagtaaatagtttttctgcaaatagccagatgtggtggtgcgcacctgtagtccaagctacatgggaggctgaggcggcaggatctcttgaactcaggagttggaggctgcagtgagctatgatggcatcactacaccgcagtctgaggggacagaatgagaccctacctttaaaaaattaaataaatacggctgggtgcagtgacaggcgcctgtaatcccagcaactcaggaggctgaggcagaagaattgcttgaacctgggcggcagaggttgcagtgagccaagatcgtgccagtgcactccagcctgggcgacagagtgagactccatctcaaaataaataaataaatactccagcctgggcgacagagtgtgactccatctcaaaatmacatacatacatacatacatacatacatacatacatacatacatacatacatacgtagtaatcccagctactctggaggctgaggcaggagcattggttaagcctgggaggcggaggttgcacagtcaagatcacggcactgcactccagctagggtaacagcatgaggctccatctcaaaaaaagaaaaaatcgtgaagagggtaatttttgccagatgcagtggctcaggcctgtaatcccagcactttgggaggctgaggtgggaggatcacttgagcccaggagttcaagaccagcctgggcaacatagtgaaaccctgtctcttagaaaaacaaaattattgtgtataaaaaagataatgtaactttaaaaatatttttaatttagctaaatacagctttttttcttcagaactgaccagcatacctttttagacctgacaacagagcttttttgacacaaagttctaagcctgtgtctgggcagttgtttgcattaccttttattttttcttttattattttttgcytaccaactacctctaaagatttcattactttttaagccttttttttttttaatctttttaaaaattaaatagagacagggtctctctatgttgcccaggctaatttcgaactcctgggctcaagcagtgcttctaccttggcttcccaaaggcatgagccaccatgccccgccaagattttattattttttgttcttctgctttctcttgagctgatttcccccactctaccaagggaaagaarattcaagtaagtcattggccagttaagatgaacaatagctttaggtcgtttggtcaaaggaatgggtcctttatgttacttaatttgatgcttatttttcctatgggaacaggttatatatggttgagaggcctaaattcactgtcttttatttgttgttacttagtatttctagtgcttgagagccttatctgtttgacccagattttggaatctaacttatgcttttggtgttcaaatccttaacaattgtatgtactttccaggcaacagctgaacagatgcgtctcgctcaagtgatctttgataagaatgattcagattttgaagctaaagttaagcaggtatgtttctggcaaaggatatcatcatttttataatctattttgattgtgcttaaaaagataatttcagtaaagatttttgttttaaagtattacttctagcttctagtctcacctgaaatctgtatattggattttggacttgtgattaaaaatacctttattggtgggcaagtgaaggaattgaatacgttcacctgccttacaatataatctttctgagttactagtgtttacatgtgaacattgaaccagacatttctgtaagcacactgaggttttccgatacctgtgcatagaaagtatatctaacatttggcacagtctctgggaattgtgtttaatgttagagatgaactgaattacctttaaaaaatttttttttcatagagacgtggtctcactctgttgcccaggctggagtgcagtggtgctgtcatagttcactgcagcctcaaactcctaggctcacgctatcctgctgcctcggtctcctgagtagctatgacgacagatgttcatcaccatgcccagctaatttttaaaatatttgtagagacagagtcctgcagtgttgcctaggctagtcttgaattcctgggctcaagcaatctgccttggcctcccagagtgctgggattacaggattactggcctgaattgccatttcaaacatggttgtgatttcatactcttgttggaaaagtataaaattaaattttaaggcaatgtcttcattttgaactttaataagaggtatttttgataacttagtcttaatttctaactcttctttgctgaccctttctcatcaagatcctagaaaccaagctgtaaccgctacctcagtgccagatattccaactcttggtagatgtcgtctaataattgttctttggagtaaaggtctcacaatgaaatcttgttttgtctcacaagaaatcatagatttctttctctggaatgagatcttcatacagtttgagatatacttctgtatattacattgccttttatctgaatagtatagatagaacactggcccaggagttcagagatttaagttctaattttagttctgtctgtcaataatctgatcactggggaaattttgatgttgactgtgtgtcttaaaaattgtatgttgcaggcattcacttagtacagatcattgataaaaatgagacatttattagtagctatccaaagactgaagcatcagaaagctatagagtatgcagaacttttgctgcttgataaaatgaaaagatgaaagcagggaggccaaatggtatagtgcagagagctgtgattatgagatcaggaggcctgggttctagatgggctttgctattaattacctttgtgaccatagacaaatcacttgatatgttgggatcaagctgttttgaacttcagctagtacatgttaaaatagttaaatgtagttaaaatgcaatagatattaaatcatagatttattcactgatacttgagaaacctgcattttgcctagtctgtgatcgttctagtgatgaaaatgctaagtaacaagtatctcttgctaatgagaataaactgaagagtttctttcatcattacttcaagcatagcaccatgttgaagatccttgagaaaatatgtctaggagtgtgttttgtgatagtagcagaattccacttgtaagacttyagggtgtcatataacttagtatgtacatggaatgatgttttttcttcttttttttgaggggggagacagggtctcgctctgtctcctgtgctagagtgcagtggcacaatcatggcttattgcaaccttcacctccagggctgaagcaatcctcctaccactacgctcggttaattttttgtaaagatgaggtctcactatattgtccagtctcgaactcctgggctcaagcaatcctctcgtctctgcctcccaaagtgttgattatagttgtgagccactgcggctggcctttgaagtgttctaatccaaatggtgaaagccagcatatggaatattgtccctgacaaaaaatttgtattggattttccatgaatgatgaccgtgtactcatatagttccacctcatatttaagtttaggaatcctgtgtgcttgaattaaatttgattattcagatacttgatcttgggtattctgagaatgttggtacgtatgtgtgtgctgctgattaatgatctgctccttggtcaacttggaggaagattgatttgtagttagattctaccagtgttagtgaaaagacgtgcatggaatggccacaaaaaaataagtaaacatgtcctcattgtaaactcaagagtctagaagaggccatcttcatgtagaaggattatgtaattctgtatttgtatagaagaatcttaatatcaagtgccagttttttgtttgcctctaaccattttctgatatgttcactagcttatggaagtgacagggaaaaatcaggatgaatgcatagtggccctacatgattgtaatggagatgtgaacaaagctatcaatatattgctggaagggaattcagacacagtaagtattattaattgatttgcattgtttacatttgtctccaattccgtagcacattttcaacttcaccttgtttgggggtagggatggaatggattatggtgccattccatatttgttttaagttccagaaagaacgattacctgaaaagactgtttttgttatgtatggtttcttcatgaagtcgtagaatctgatgacttgaaagagaacttggtgatctactccagccttacagtttccaaaaatctctgtgcctgtgtatattttcaccacccccacctgaaaagcatctcttggctctgttgcttatgtttcttcatctcagtcctcacctctgattacttcttacatctctattataacagaaaaccaggatttgctggtatatgtatttgcttatgtggaatattaagttttcttttttttttttaatattgggttaagtttggtgagcttgcaggctcatgagctcaggccttggattttaagaaggatacagctaaagctacaccaggcacttgtcagccctaaaattttgctgtgtgtatatatttatatttatatattatagtttttatacatatgtatatatttatttataaatatatatttaataattttaaattttaaataatttaattttaaattaaattaaattatttaataatatatttaataatataaatatatttatatatttaataatataaatatatatatttaataatataaatatatttatatatttaatatatattatatataatatttataatatttgtttaataatatataaatatatatactttatatatatatttatatttaatatatatatttatatatttatttatttttttgagacagagcctcactctgccacccaggctggagtgcagtagtgtgatcttgactcactgcaacctccgtctcctgggttcaagtgattcttttgcctcagcctcccaagtagctagtactacaggcatgcgccaccacgaccagctaatttttgtatttttagtagaggtggggtttcgccatgttggccagactggtctcaaactcctgacctcaggtgatccacccgtcttggcctcccaaagtgttgggattacaagtgtcagccaccacacctgacctgtgtttatgtttcttaaattgaggaaactattttagagtagattaaaaaaaaatgactcacctaaaagaggatacaaagatgaacacatcaataactacctttccttggaaaatttaaaacaaacaaactgaccgtgtcagtgttcagatttaattgaagtctcattttagggtcatgctgcattaggtacaagaaatacaaaaatgaactctgagaaactgaaagctaaaatgactgtgtttttagttgatgtgaaacaaagagaatgaattcttttaaagtaaaaattaactaatgtggaaaagatttcactgtttgagtgtagcagtaattgttggtaaaattccatgtaagagaacactggtacacaagacaaaccatcaaatttgtgattttttttttttgggaaaaccatattatatgataaattaaaattttgaatagtttttgtttactgacctgggactaagtatcctgggttttgcaaaatatggaggatctgtttaccttatcgctaatgggtacagcagagagtggctttcagttattttcaaagtgaactgaagagcctaactgccctctttgtttagggaaaaaaaaaaaaagaaaaaatctttgggaataaacaaaataacccaaattgttcactggagaggatctttttggatctttttatggtagagataagtccagacactattttttgttgcctttcctttagctccagcagatttaattccttttctctggtagtttggtgaatttttaagttttaaatgtccagttttctctttctgttttgagttttaacaccccctcctcctttgggaccgaacctgaaggagctggttctgggctatgtattagaaagtaagactgactgggcactgcggctcatgcctgtaatcccagcactttggaaggcctaggtgggcagatcacgaggtcaggagtttgagaccagcctggtcaacatggcgaaaccccatgtctactaaaaatacaaaaaattagccaggtgtggtggtgggcgcctgcaatcccagctactcaggcggctgaggcaggagaatcgcttgaacccgggaagcagaggttgtagtgagccgagatcgcggcattgcactccagcccaggcgacagtgcgagactcggtctcaaaaaaaaaaaaaaaagaaagcaaagctgaacttttcatgaagaacacctctttggttacctcttgaacgattttatagtgtgggctatatctgacttcttgttttcttcaaagataagaaaatagcaaatgaagttctgaatatagttgtgaaagaatacacttgttcagggctgagtgggctgtgggggacagaagtagaggtaaagtctttgttttagttgtttggtgttttgggttttttattaagacagggtctcactccgttgcccaggctagagtgcagtggtgccatcacggtttactacagcctcgacctcccgggcttatgccatcctccagcctgccgagtagccgggaccacaggcgcatgccactacgcttggctaatcatttttatattttgtagagttagggggtctctgtgtttctatgttgctcaggctggagtctttgaaaccctggtttgttgaggaccactctctggtacatcttgtctctsatactgtttgcctcatctcttacctagttgccatctgcagcacctatggctaaacagctttgattatcttcccttgactgagatagagttaattggagtagggttgacagaatataaacactgtgatgttgctaggagcaagagcatgaaggcaaacgattcttttcctattatctaaccttcctctgtgctgaaacaaaattattacttggaaaaggtgttaagtggaatcgtccatgatgtttttaaggataaatttattttttcttatgtaagtatatctgtcacaaaggaagatattgaacataagtactgaactttttgtttcatcataatgtttggttgatgtgacaaaattgttttgaagtatcggtctcttgaattaatgtacttaactctttttagtaagttgtttgtgttggtagtttttggcaaaggcaaagtggtgggagagtaatttttgaactagctggcttcgaagactgctgttctgattattatgtggtggctgggaggacctctcctcttagagtttcttcagacctgttctgcaactagcaaaataccgataacagaggttgccagaaattctcttggaaatcctccataattacttggttaactttttaaagtatgcatgtgtgtatactttgcagacttcagcaaaatacacagtaatctttttagcagttactatggtattgtaaagattgcttcttaaaggttcttttccctatttgtgccccccccctccgcccgataagttgtctttgtagagctcataaaccaagactttgcttgaggggcagtaggatggggagggtatcttttttttatttttatttttttgagatgggagtcttgcgctgtcacccaggctggagtgcaatggcatgatctcagctcactgcaacctctgcctcccaggttcaagcagttctcctgcctcagccttctgagtagctgggattacagacatgtgccaccacgcctggctaatttttttttttttttttttttttgagatggagttttgctcttgttgaccaggctggagagtaatggcgtgatctcggctcaccacaacctcctgcctcccgggttcaagcgattcttccgcctcagcctcccgagtagctgggattacaggaatgcgccaccacgcccggctaattttgtatttttagtagagatggggtttctccatgttggtcaggctggtcttgaactcccaacctcaggtgatccacccgctcagcctcccaaagtgctgggattacaggcatgagccactgcacccggctgctaatttttgtatgtttagtagagatggggtttcaccatgttggccagggtggtctggaactcctgacctcatgatctgcccaccttgggctcccaaagtgctgggattacaggtgtgagccaccgtgcctggccagggtatcatttgctatatgaaatggggtaaagtgtttctcagatgttttacaaagacagctggccccttgataaagatagagtacctttcggcgaggctgtgtaaagatgtacattgtgtatacatacactttatgccaactcttctgggatgatttttccaggacctctggaatttactttttgtattctaacctaagaggactggattctgttttacacagttgtctagtattttcatattagcaaacataataaattgagtttgttcagtgtgggcattattttctctggcatagataagctttattgtttaattagaaaagaaatgcagaaaaatattaaagattaaatcaaattaaacatcctcacttaaataatgacttatacctcttccttcagtaagtacataggctcctatttgaactaaaaaatgtaattctatatgctgtttgctgatagcttgctttttctatcaaggacctctttctatatgtacctatgtaactggtaaaatggctacatactgctccatttatggatacactagactacttagtctcctgaatttgatattttgggaatccgcctcccctccttttatgctgttgatcattttgtctgcacataaatgtttgaacaattcttacgttattattattattatttttgatacagagtctcgctctgtcacccaggctggagtgcagtggtgtgatcttggctcactgcaacctccacctcccaggttcaagccttctaggttcaattgattctcctgcctcagcctcctgagtagctgggattacaggtgcctgccaccactctcagctaatttttgtatttttagtagagataagagtttcacaatgttggccaggatagtctccaactcctggcctcaagtgatcttcctgctttggcctcccaatgtgctgggattacaggcgtgagccagtgtgctcggccacgttgttttatttgaataagggcctagaagtagaattgctgggttgaaagagtatgcaccaaataggccaggcgcagtggcttatgcctgtaataccagtactttgggaggccgaggtaggtggatcacctgaggtcaggagttcgagagcaccctggccaacatggtgaaaccccgtctctactaaaattacaaaaattcactgggtgtggtggtgtacgcctataaccccagctactcgggaggctgagacaggagttatcacttgaacccaggagatgcaggttgcagtgagccgagactgtgccattgcactccactctgggtgacagagtgagactctgtctcaaaaaaaaaaaaaaaattggggggtactatttctaagtaaccttctagaaaggttacaatagatgcatgctcaccagaactgtatgataatacctcattgtttcaccttaactatcaggtgatagtatattcagtcttcattattaaagcttagaggtggaacataatttatatctttttcatatccattttatatctaattaaatatgtgagttcatcacagctttgcagaagaccagatattccatttcaaaaaaagagtttggaagttggcttccactgttatggaaataattcaacttatcacccaaattttagtttattaatttccagtgctaatgtttactttggatatataatgtcaaattttgtttttctgtaagatttttaaaaagcataaaacagttactcttaattttggatggagtcatttccagtcccttctgaaataaggcagattatgaataagtaaatggaaactattgggccaattttaggatttctctgtaactaccctgcttgataatttttatatccacttatagtcaagaatgtagtwtctttttctttctcagccatttatatatatatatatggtagattagatttggtatcaccattaggggagaggtggagaagggaggttatataaattatttgacttctcactagaagaattctttggaggttaaaaatttaggtgctttataaattttttaaaaacccaccaaaaccaagctaaaattttacttatctgccattaaattgttttagataattagtttgaataatggaacaggcaaggttgtattcctggagcttttggggcatcattctaagtaattttgtggtctttgaattaataagtagatttaaggcctaatagagaggtaagtgaggtggtgtagaataggagcttggggaaatgacttttactgtattcctaaatttgcataggaaagggctttatgttgggaaaatgtacagtattttgtcaggtcagctaatagctgtaattatttagcaacaggagcttagcaagaggattgttaccttcatcatcaataaagtagaactatagggaaagaatttaaatgataagcaggtgagctgcaagctgtgggtagttaggtttgaaagatacgtgcatgtgccgggcgcggtggctcacgcctgtaatcccagcactttgggaggccaaggcgggcagatcacgaggtcaggagatcgagaccatcatggctaacacgatgaaaccccatctccactaaaaatacaaaaaattagttgggcgtggtggcaggcgcctgtagtcccagctactcaggagactgaggcaggagaatgttgtgaacctgggaggcggagcttgcagtgagctgagagggcgccatgcactccagcctgggcgacagagcgagactccgtctcaaaaaaaaaaaaaaaaagaaagatacatgcatgtgcctttgataattgtacacactttgaatgataaatgattaacagccgttctctctgatagacttcatgggagactgtagggtgtaagaaaaagaattttgcaaaagaaaattcagaaaacaaagagaatagagagaagaaaagcgagaaagaatcgagtcgtggacgtggaaacaacaaccggaaaggaagaggcggcaatcgtggcagagaatgtaagtacagactttctcctcagttttttctcttctttcatctcaagtgaccctcccgcctcagcctcccaaagttttgggattacaggcatgagtcactgcgctcagctttctcaaattttttcttagtttccatacattctgaacgactgaaagattagtccatagtatgctcataaattcgtttcctcaatgcagaatttgttctaatagttaacactagaaatgagtggcacctgagtagtttcataagcgcctcccatgtggtttcgtatcagcattgacctgggctgtaggcaggtggttgtgtagtgtgatgactcccttctgttatgagtcagacacatttgttaattttagaatggtgtgtgtgtggcaaagaaggggccaggggccatttagttacaggtagataaagctgttttatattctccatttatagacactcatggtatagacaagggttagattaagaggaaagttgctgaataggcaggatttctcataggcaggtctcatttccattagacctaggttttctaggttttgtcactgtttatgcaaaacaaccttgtctgctctggcagtgtgtcagtgtagctaagttatgaaagaataaaatgtaaatatttaacatatcaccctgagactcttgctgtctcatatattccactgatatttattgagtatctactatgtagtggatacttttataggcatacagcaatgaataaartaagtaaaatctttgcctttctaaaacttttaatgaaggtcaaatgggatgtaacaataaagaaaataaaatattttatattaatatattttaatgatgttatgtagaaattatgttatagggaaaaacagagatgcaaattatgggaagaggtctggcaaatttaagtgggttgccaaggaaagcctcactggaattcatgtgagtcagcctctgaaagaggtgaggggagcaagccatgccaatatccttcataaaatttctgtattatgtagagctattaatgccaatatagggatgagaaaaagaaaagactgcgtgttggcatcttcctgttagtatcctagaaaaacccaactccaacactttagtttttctaagaactcagggtttccttggtattgctattttgctattctgtgcctttccaggctttgaacctaattaatgagcaaattctgtgatacattaacgtagttgcataatggaagtagtttttttgaagcaaaaacttcacagcaagtccacaaagaagaaagaaaaatcagtatgttaatttattttcagaattttcatgtgaattaaggaagatgtgatttcatatatatatatttttttcactttttttgagacaaggtctcactctttcacccaggctgaagtgcagtggcatgatcacagctcactgcagccttgacctccctgggctcaggtgatcctcccacctcagcctcctgagtagctgggactactagctgcacgctgtcacaaccatacctggataatttttgtatttttttgtattttgtatgttgtattttttctgagacagagtcttgctcactttcccaggctggagtgcagtgaggagatctcggctcactgcaacctccgcctgttgggtccaagcaattctcctgccttagcctctcgagtagctgggactataggtgcgcgccaccacacttggctaatttttatattttttggtagagacagggtttccgtgtgttagccaggctggtcttgaactcctggcctcaagtgatccacccgcctcagcctcccaaagtgctggaattataggtgtgagccactgtgcctggccaatttttgtatttttttgtatgttgcccaggctggtctcaagctcttgggctcaagagatctgcccccctcagctggaaattacaagtgctggaattacaagtgtaagccactgtgcctgacctcattcagtttttaagtcacttttgtttttgtttttcctgtttttgaacccgttgtttaaattgtagcctgtttgtcattccttctttgcctttaataggtgcttgataaggttatgtacaagaggtttggaaatggaaatttgatttttctgctcttttccccctagttagaggtgaagaaaatggaattgattgcaatcaagtggacaaaccttcagatcgtggcaagcgagcccggggtagaggtaagctagagtaagagggaagaaaatgctttcaattagggggaagaagcaggcagttgcgttgctggactgtgactagggatggcagtgtgttctgaaagaatagcaggtcatctaaaatctgatcatttgtttactgatgcctgtaaatgaactattttgggttatgtagttttgaagaaaccaaagggttgtttttggatgagctgagaaagccctatgaataatttaaaacttaaagctctaaccaaaagcattgacaaattataattgtattacgtttggaatacaatgcaatagggttttttaaaccttattttaaaaatactttattgctaaaaaaggctatgatcatttgagctttcagtgagttgtagtctttttgctctagtcctcacttctagctattttgaagtgtataatacgtaattgttaagtagtcatcttactctactgttgaacattagaacttattccctttttttgagaccctgcctggctaacacaaggaaaccctgtctctaccaaaaaatataaaaaatagctaagtgtggtggcacgcacctgtagtcccagctactygagaggctaaggcaggagaattgcttggacccaagaggtggaggttgcagtgagccgagatctcctcactgcactccagcctgggcaagtgagcaagactctgtctcagaaaaaatacaaaatacaaaaaaatacaaaaattatccaggcataattaaatgcagggtcttactttgtcacccaggctggagtgcagtggcatcatctcagctaactgcaacctccacctcctgggctcaaacaatcctcctacttaccctcctgagtagctgggactacaggtgcacgccaccatgcccagctaatttttgtatttttgctagacatggggttttaccatgttggccaggctggtctcaaactcctggcctcaagtgatccacctgcctaatcctcccaaagcggtaggattacaggcatgagccaccgagcccggcctagaatttattccttctctctgtgttttaacctatccaccaatctctctttattccccaccctctatacccatcaccttctctgcctctggtaactatcattccactctctacctgcatgagataacctttttagctcccacatgagtgagtacgtgtgatatttatctttctgtgtctggtttattttatttaacacaatgtcttccaagtccattcatgttgctccaaaggacgtgatttcattcttttatggctgagtagtattccaacstgtaaatatatcactttttaaaatccattcatctgttgatgaacacttaggttgattctctatatttgtgaatattgtgaatagtgcttcacttcaaaatagctagaagtgaggacttgaaaagttcccaacacatagaaatgataaatgctcatggtaacggatatcctaaatacctcaacttgataattatatattctctgcatgtaacaaagtaccacatgtaccccataaatttgtttaaatattatgtatctgtaaaaagttaaaaattaaaaaaaaatagaaattgccacagccaccacaacctggcaaacatgaagcactattggtttccttttctttgtataaatatctgctaatgggattgctggatcatacggtaattcaattttttgtttttgataaatctccatactgttttccaaartggctgtaccagtttatattcccaccaatagtgtatgagagttcccttttccctgtatcttcaccagcatctgtttaatttgcttaattagttaaatgcagtgtcatgatcataactcattgcagtcttgaactcctgggttcaggcaatcttcctgtttcagccacctcagtagttgggattacaggctattttttgtctttttgataatagccgttctaactggggtaagatgatatctcattgtggttttcatttgtattttattgatgtttagtgatgagcattttttgtgtaccttttggccatttgtatattgtctttttagatcctttgtctactgtttttttttctcttaagagacagtgtctcactctgttgcccaggctggagtgcagtggcatgatcataacttactgcaaccttgaaatcctgggctcaagtgatacttccacctcagcctcctgagcagctgggactataggcatgagccccaccatgcctggctaatttaaagaaaaaaaaaaawwtttttttttaagagatggggtcttgcaatgttgcccaggttggtctggaactcctggcctcaagctgtcctcctacctcagtgtcccaaatctcagggattacaggtgtgagctactatgcccagctgtttgcatactttttaatgggattatttatattttggctgttgagttgtttagattccttgtattgtctgaatattagtcccttttcagatgaatatcatcctgcaaatttcttagatgatacttccttaatgctgaggctaaattggagaccatatttttaaatcccagggattcaggccgggtgtggtggctcatacctgtaatcccagcactttgggaggccaaggtgggcagatcacttgacattagtagttcgagaccaccctggccaacatggtaaaactccatctctaataaaaatacaaaaattagctgggcatggtggtgtgtgcctgtagttccagctactcgggacgctgaggcacgagaactgggggaagtggaggctgcagtgagccgagattgtaccattgcactctagcctgtgtgacagagtgatgctctgyctcaaataaaaaaatcccagggattcagtattattctaggtaaagtttcttgtcatatgccacatagtaaattggtaaaaaccaagtataattctgtcttccacaagctgaaactgcttagtattttttatatttaggaccaggtttctgtaaagtaagtttcaaacttactattgtcaaagatagaaagatggcaacgaagartgttggcacgtacacctctgctaatttattaggtcctaaaccctgaagtacacaccttgggaagaaaaagaaaatagaaggtaacaaaaagaaagaataaaatgactttattgacccctaaattttactgtgtctcaccagggagggcggtcacagtataagaccaacgttatgtgtgtgattagtccttaccaccctgttctggttaaaatatcattgttctgatattcctttgttcttaaggttttaggaatacatagtaacccagcttcttcccctcttaccagggagagggttttctttcctagggtatttgatctctcacatgcttctgctggcattagtgggcgtcttagagaaatcgtcaaatcttcatgactgaaatcccactactgactacactgttgaatcctttacttttaccctttgacagtaggaatctagtcacagtatgtatttggattggttgtttagagacatgtttaaggattacaagctgatccatgtcataaatcagacagatttattgttataaaaacacattataggggggccgggcaccgtggctcacatctgtaatcccagcacttttggaggccgaggcgagcagatcacgaggtcaggagttcgagaccagcctggccatcatagtgaaaccctgtctctactcaaaatacaaaaaaattagctgggtatggtggcatgtgcctgtagtcccagctacttggaggccggggcagagaattgcttgaacctgggaggcggaggttgctgtgagccgagatcatgccatggcactccggcctgggtgacagtgagactctgtctcaaaaacaaaaaaaaaamamcaaaaaaaaacaccacacattataggggataaccagtgaattggagattgagtatctgttaggatgggtactgttattactttgaggaaaaagttgatatgtttaccttggttctatttagactaataaaccccaaataaataaaagttaacagaccatgtaaaatcaccatagtttttcttaatcgcaagtatgctagataaattctgcagggggtatggtgttttatttgacctgttcttcctattcttactgggactgtatggtggctgttcatataattttctcatcrgtatatataccggtgaataggaacagaatgcaaacaatcaaaaacatagtccatttaaactatctgggcgacaaaatgggcacttaattttactgtcaaaatctattacgttcgctttatataaaagcagctatgtaggcaaactacctacctattttttatttgttttggtttttgttcttagcttgatcagttggccttgctggatagtaagttgtcgtaagtgtggagcagagtttgcattcaagctggagccacttgaaaaatcattcctatagagtatatctttcataagcttttttgctagtggagtgtaattgaggatttttgcaaaggatttgggttgaagcggaattattagaatgtcaggtaagtatgtttaccagcaggccctttgacagcttgggtgaaagaggggctgctggctgctggcagttctgctgagattttttttaggactttcctgaagcttagcttcagagttgtaaaaagcaactgcaaggagtggggcctgtcttgggatctgccagatatgtgatgatcataggggaaggagcaactgtcttatatcttaacaattctgttcttctcaccagtatcctgaagagaggaaagagaaaagcagagagaagttttccatttcatagagataatgtgaaaattactatgattctgacattattttttgtagtgtacctcttctctccccttccttccttccttccttccttccctccctccctttccccccttccctccttccccgcttccccccttccacccttccttccttccttccttccttcctaccttcctacctacctacctaccttccatccttccatccctccttgcaggagtctgtgttgccttggctagtatcaaactcatgaactcaagcagttctatatcaatgtatttaaaaaataatttcaggccaagtacagtggcttatgcctgtaattctagcactttgggaggctgaggtgagaggatcacttgagctcaggagttcaagatcagagtggacaatgtagcaggctttttttgtttaaaaaaaaaaaaattagccgggcatgatgatgtgcatctgtagtcccagaaactcaggaggctgaggtggtaggatggcttgagtctgggaagttgaggctgctgtgagctgtgattgtgccactacactccagccttcagatattttaagcttttcagacagtaggcctttatttactatcgtatctttccccgtcttttatttatttgtatttctagatatatatatatatccagaatatatatatatatccagaatatatatatatatccagaatatatatatatatccagaatatatatatatatccagaatatatatatatatatccagaatatatatatatatatccagaatatatatatatatatccagaatatatatatatatatccagaatatatatatatatatatatatatatatatatatccagaatatatatatatatatatatatatatatatatatgaagtaaataagcccatattatttttttggtcttgacataatttaggagttccaaagcaatataaaatttygtgtggctcaccgtttttatttactgtatttttatttatttatttttgagacaggttcttgcattgtcacccaggctggtgtgcagtggtgtgatcttggctcagtgcactctccacctcccaggctcaagccatcttcccacctcagcgtccctagtagctgggactacaggtgcacgctactatgcccagctaatttttgtagagagagggttttgccatgttgcccaggctggtctcaaactcttgagctcaaacaacccgcccacctcaaactcccaaagtgcttgcattacaggcatgagccacagcgtctggcctgctatttcatttaactttgttttgaatgtgctttatgcagaaaaagatatcaatatacttaatgtacttgacatagatccattttttgtactttgctgtagttgagtgtgtttatgtattagaaatgacgctcgccgggtgcggtggctcacgcctgtaatcccagcactttgggaggccaaggcgggcagatcacgaggtcaggagatygagaccaccctggctaacacggtgaaaccctgtctctactaaaaaaaaaaaatacaaaaaaagattagctggtgtggtggcgggcgcctgtagtcccagctactcaggaggctgaggcaggagaatggcgtgaacctgggagacggagctcgtagtgacccgagatcacgccactgcactccagcctggacaacagagcaagactccgtctcaaaaaaaaaaaaaaaaaaaaaaaaaaaaaagaaatgacactcaggatttggattaaagcagaattattagaatgtcaggatttggattaaagcggaattattagaatgtcagctaagtatgtgtttgccagctttgcttgaagatttgattccatgatacagttttttgttgttgaaactgggtctgtctctgtcgcccaggctggagtgagtgcagtggcgtgatctcggctcactgcaacctccacctcccaggttcaagcaattctcctgccttagcctcccgagtagctgggactacaggagtgtgccaccatgcccggctaattttttgtatttttagtagagatggggtttcaccggttacacttatttatttatttagagacagagtctcactctgtctccaggctggagtgcagtggtgcaatctcggctcactgcaacctcygcctccggggttcaagcaattctcctgcctcagcctcccatgtagctgggactacaggctcagctacttcttgtattttttagtagagacggggtttcaccatgttggccaggatggtctcaatctcttgacctcatgatctgcccgcctcggcctcccaaagtgctgggattacaggcatgagccaccgcacctggccagttattttttatttttattttttgagacgggaatttctctcttgttgccctggctggagtgcgatggtgggatcttggctcaccgcaacctccgcctcccgggttcaagcaattctcctgcctcagcctcctgagtacctgggataacaggcatgcgccaccacacccagctaattttgtattttcagtagagacgggatttctctatgtaggtcaggcttaaatgtgtatttaaattactcttcttttgtatgtttctttatcttgtgtattcataaatggtttatcagcttatatgtattattttggtcttttggtgagattgagtcaagtaaggtagtgaactatagtttctttttttagagacagggtctcactctgttacccatcctggagtacagtggcatgatcatagctcactgcaacctccaactcttacgttcaagcaatactcctgctgccttagcttcctgagtagataggactgcaggtgcacatcacaatgcccagctaattttcaaaagcattgtaggcaggtctctgtgtgttgcccaggctggtcttgaactcctggctccaagcagtcctcctcccttggcctcctaaagcagagggattacaggcacaagccactgctttggctggtaatgaattacacttgaagttacaggggttggtttccttctggatggaagaaaaataatgcaaaaaaggcaacaatagtttactccctaacctttctcactgctttaccttactgttttgtatttagtgactcagattagttcctctactttttctttctttctttcttttttttgagacgtagtcttgctctgttacctaggctggagtgcagtggcacaatctcggctcattgcamgctccccctcctgggttcacgccattctcctgcctcagcctcccgaatagttgggactataggcacccgccagcacatckggctaattttttgtatttttagtagagatggggtttcacygtgttagccaggatggtcttgatctcctgatctcctgatctcgtgatccgcctgccttggcctcgtaaagtgctaggattacaggtgtgagccactgcacccggcctagttcctctacttttaaaactaattattgcatgaatacggtctatatagtacaagtgcaaagtaattttgagcacctactatgttttaacattctacttaaaaattttttttttaaggtagagaaggggctcttgctctgttgcccagggtgatctcaaactactgtggctcaagtgatcctcccaycttgacctaccaagrtgctgggattacagacatgagccaccagacccagcttacgtttaaatttcgaatcctctgtagtaccttctttgggagtcttgctgagtccttgttccacatagcatttaataaaatgctgattctcaaatcagttactgaacagataggttatttcctgtaattatataatgccattattgtgcctctatacatgagagtttaatccatgaaagactccatatttatgaagttgggattacagatcagtcttttttttttttttttttttaaaagacagagtctcgctctgtcgcccaggctggagtgcagtggtgcgatcttggctcactgcaacctctgcctcccgggttcaagggattctcctgcctcagcctcccgagaagctgggactacagagattgagaccatcctggctaacacagtgaaaccctgtctctactaaaaatacaaaaaaattatccaggcatggtgatgcacacctgtaatcccagctgctcgggagactgaggcacaagaatcattcgaacctgggaggctgaggttgtggtgagccaagattacgccactgcactccagcctgggtgacagagcaaaactctgtctcaaaaaataaaaaaaccttgaacaatcattcaacagagatgtartagagtcccagggcttgaggaggaaaggtacagcatttaccctaatatggtttattcgctttgataatctttggaaacgttggacttggtttttgtgattaaaagactctggatctttattctgagctgctagattaatctgttcattccagataacaatgcagggaaatggtatatacacagaaaccaatgttactagtagcgttactaccaggtgagtaggaaacaataattctattatcttgctagaatttatggggacgatggattagattttttaattttttaaaattttttgtttggctgggcgcggtggttcacgcctgtaatcccagcactttgggaggctaaggcgggcggatcacgaggtcaggagtttgagaccagcctggccaaaatggtgaaaccccgtctctaataaaaatacaaaaatcagccaggcgtggtggcaggcacctgtaatcccagctactcaggaggctgaggcgggagaattgcctgaacctgggaggtggaggttgcagtgagccgaggtggcgccactgcactccagcctgggctacagggtgagactctgtctcaaaaaaaaaaaaaataaataaaaaacaactgtttttgttttttccaagaccgagtcttactttgtcacccaggctggagtgcagtggcgccatctcggctcactgcgactgctgcctcccaggttcaagcaattctcctgcctcagcctccctaatagctggcattacaggcatgcgccaccatgtctggctaatttttgwatatatatatacattttttttagtagagatgggatttcaccatgttggccaggctggtcttgaactgatgacctcaagtaatccacctgcctcagcctcccaaagtgctaggattacagccacgagccactgctcccarcctaagaaagaaaatattctttacaaaatttacataccatacatttcatccatttagtgtacaattgaatggtttttagtatattcaccaagttgtgcaatcatcaccacaatcaattttagaacattttccacacckcagaagtataccttaccctttatcatttcaccaattctttcattcttccacctcaaccctgagcaccagtaatcgcctttctgtttctgtaggtttttgtgttctggacatttcctgtaaatggaattgtataatatgtggtcttttgtaactgcttctttctcttagataatgttttgggttccccatcgcctttaccctgaagggattaacttaatgttttaaacattcatccatgttgtagtatgtatcagtacttcattcctttttatggcaatataatataatgttgtatgaatatactgcatttttttttcagttcaaggttttaagtcctgagaatagtttccttgttttgtagcttgtttaattttggcctgtattcttgccaaaagctatagactgaaagttttcttcttagagctaattagctgaatttcttaacattcttgtaagtcacagtaatacctctgtgtgaagtcttacttttgccttcttaaaaaaacatttattaaaaaaatttattgtagaggtggcatctcgctttgttgcccaggctggttttgaactcctggcctcaagcgatcctcctgccttggcctccaaaagtgctgggattacaggtgtgagccaccatgtcaggcctcaatttgttgtataaacatatacccacaagcacaatttcatgatcatatggtcaatcattgtattttttgaggaactgccatactgttacccatagtagctgtaccattttacttttttttttttttttttgagacggagtcttgttcagttgtccaggctggagtgcagtgttgtgatctcggctcactgcaagctccgcctccgggttcacgccattctgcctcagcctcccgagtagctgggactacaggcgcctgccactacgcctggctaatttttcttttttttgtatttttagtagagatgaggtttcaccgtgttagccaggatggtctcgatctcctgaccttgtgatccgtccgtctcggcctcccaaagtgctgggattacaggcatgagccrctgcacctggccccattttacgtttttaccagcagtgcacaatggtgtgctccacatctttgtcaacacttggttttttttttkttttttttttttaaagatagagcctcactctgtcacccaggctggaktgcagtggcacgatctcagctcactgcaacctctgcctcccgggttccagcatttctcctgcctcagcctcccaggtagctgagactactggcgcgcgccaccacgcctggctaatttttgcatttttttaataaagacggggtttcaccatattggccaggctggtcttgaactcctgacctcgtgatctgcctgcctcggcctcccaaagtgctgggattacaggcgtgagccaccacgcccggccgccaacacttgttattttctgtttttttactttaattttggtagtagtcatccgaatgaatatgggattgtattttattgtggttttgatttggatttccctaatgatcagcaatactgagtatcttttaatgtgtttattggtcatttgtatatcttctttggagaaatccatattcaagtccattgcccgcccccccgcacccccccctttttttttagtctcacgctgttaaccaggctggagaacagtgacrcaagttaggaactgtagcctccgccccctgggttcaagcgattctcctgcctcagcctcccgagtacctgggactacaggcatgcgcctaatttttgtatttttattagagatggggttttgccacgttggccaggttggttttgaactcctgacctcaggtgatccgcctgccttggcctctgaaagtgctgggattacaggcatgagccaccgggcctggccgttgcccattttgaatggagtattttgttgtcgagttttaggagttctttgtgtgttccagatgttactctgtgatcagatatataatttataaatattttcttccattctttgggttgcctttttactctgttggtaccgtggtgtttttttgtttgtttttgagaaatggtctcactctgtcacactgactagagtacagtggtgcaatctcagctcactgcagcctcaacttcgcaggctgaagcaatccttcracttcagccttccgagtagttgggactacaggcatgtaccactatgccccattaatatttgtattttttgtagagacaaggttttgccatttgcccaagctggtcttgaacwcctgagctgaagcagtccaactgcctcggtgttccaaagtgctgggattccaggcatgagccaccgtgcctagccaatatgtgttttgttacagattttgttgttgttgttgagacagagtcttgctatgtcacccaggcttgcatacagtggtttgatcatacctcactgcaacctccaactcctgggctcatggatcctcctgcttcagcctgtcaggtagctaagttagaggcacatgcccataaaaatagttttgtagagagggagtctccctatgttgcccaggctggtcttgaactcctggctcaagccacccttccacctcagcctcccaaattgttgagattataggtgtgagccaccatgcctgtcccagaaaagtttttaattttcataaagtccattttgtctattttttctttttttgcctgtagttttagtgtcatactcaagaaatcattgctaaatccagtgttgtcaagcttttgctttgtgtttttctctgagagttttatagttttagctcttaaatttaggcctttgctcttcagtttaggattttaatgaagagaatgtggaaaggtgctagtcataattttctcttcttgcttgcttgttctcatgcttgctgccattttgatctttgatcacagactagtatttaaaatgatacttaacagtgccttcagcttactttgcattttcctctttctggttctcatttcatttatagtagtggcttataattccatggtgttagctctttctgattttaaaagatgcagactgttttataatacaacctccctgtgtttagctgtcaaataccacaaatataatacaaggakaatttaattcttttctagccttagaagtcactmactgggtataggtagttgtatcagcagggatcagttaattgggtgccctggattggaatgttggtgctactaggaataatgataatattgyctgggtagtgagtataggatgaagaaggaagtgtaattgtgtaggacataagtattattttatactataattgtgtgtttttttaaaggatttggacgtggcagagggagaggggcaggaaggttctcaacccaaggcatggggtaagtgatagccatcctatttttataattatttacttccctagtttttattctgcagttgcttctaataccctacatctaatttagtcatcatggtgaatctagtgttttctatacttaaagagatttacaaataagaaaaataatatgaataaaattgatcttttaaacaggcattagagcagggtttctagccttggcattattgagattgtgtattggataatacttccayggggtggtaggatctcctgtatattgtaggttgcttagcaacatctctcttctctgtactattaataaatgtcagtagcacttcgcctgaagttgtgacaaaatacctatagacgtacctaaatggcactgcctaagagccattttagttaatccagccattgtctttgaatgctaagtaaatgtaatgcttatttatgtatgagtgatacctttttcctgaattgaaatagtaaacattgaacagactcaaaggcactaaaatcagaggtttatttcttgtttctgggtgtttttttactttttgttgcttctaaaacattagctcccattggatttttaggaagagttttaaaacatcctgtggaagccatacgtagatgcagtcaaggaaaggaattggctccaagaaaagccctttgtctctctctaacttcaggcagcactcttggtgttaatgccttctagaagtagtggtgcctcatgcaatctgccttctgcctaagctcctttgaggaaaaggagggatgaaaacacagggagcaaactctcaggagcactttaagacatagccctgctcattagctttaaattgttttgtggatttttctgtttacttcacattcctttgtgaaaattttaaaggtaatatttgttttggctcatgttagacctctgaaccatgattcgattaaactgggtgttcagtttaggattttattgaaaagaaatagaggtgctgaacaaaatgttttcttctttatctaatgtttctgtaaaggagcatataaatctaagctgtaaaagccaaacttggattctgacttgggaagaaaatacctgttgcctatttatgccttatttttcagcaggactctcataagagctcttattctgccttgaaagattataygtctccttgtctgctttaggatgcagaggaccgtgtttcaggaaaataaggctattataccagaatgtgtggaaggtccctaggcaacttctggttttcacatctgcatctccatggctggcagaattagttatatttaaataggggaaggagaggtgatgtcttttacagtggctgtgagaaggcactgggcttgtttggtggaagatcatgtatggttaatattttggcttaggtgtttgcttcttttgcctttattatttctttatttcaaaccccaggacatttaatccygcagactattcagattctacatctacagatgtgtgtgggacaaagctagtagtttgggaagctgctcagaatggtgcagatgagggaactggtaagtgttctgtttttgccagagatgagttttaaatgtttgagctattaagagttgtatgttctcatacaaagatgaagtctaaatgtgctgatggaaaagratgaaaaacaggctactgtcctacctctgaaactattcttagttggttcttaccacccraagtctgtcacatacaaatctcatgatgacaaggaatttgattttyccttctgcaagctaagaaagaggctatataaggtaattggcataaatcagcacaaacccacactctgatcaaagtatgtcacagatatatagaatttctgaggagaagattttttactggaagtacttsccatttctaatggtggattctttggccagataatgtatgataatgtggtagatgatagatgggtttgtagcaacgttgcctctgcaggtttttctgtatcatgctgtttctggattatttattttctgaaattcttggggtaaatattggttatttatatagagttctttgtacagtaattattgagattatacttatagaaacataatttagctgggcgcggtggctcacacctgtaatcccagcactttgggaggccgaggcagatggatcacttgaggtcaggagttcgagaccagcctggccaacatggtgaaaccctgtctctacaaaaatacaaaaaattagccgggcatggtggcacatgcctgtaatcccagctactcgggaggctgagacaggagaatcgcttgaacccaggaggtggaggttgcaatgagccgagatcgtgccattgcactccagcctgggcaacagagcgagacttcatctcaaacaaygacaacaaaaacgaaaaacagaaacataatttaacacaatgaattataacctagacttagaatatagctcaataaattatcaaggccaggtgcagtggttcatgcctgtagtctcagcatttaggtggccaaggcgggaggatcacttgagccagagtttgagacgagcctggttaacatagtaagacctcatctatactaagaaaacttaaaaaattagcatggcatggtggtgtgcacctgtggtcccagctgcttgggaggctgaagtggggagtgtcacttgagcctggcaggttgaggatgcagtgagctatgattttgccactgcactccaacctgggcaacagagcaaggcgtgcctgaaaaaaaaaaataatgcacacaaacatccatataacatcaaccctagccaaaaaataagagagtaccaccagaagcacgactaaccaactgtaaatagagaaactgtaaagagggtcaacaaaatttataagttgttatttgaaaacactagtaaaatcgttaagcttcttatgagatcatcaagggaaggtgagaacgtgaataattggttccaggaaggagaaaaggaatattgatatggatcatatagatattaggagattataagataactcagcttgagctcaggagtttgagaccagcctgggcaacatggtgaaactccgtctctgcaaaaaaaaaattaaaaagttagccgggcatagtatcatatgcctgtggtctcagctacttgggatgctgaggtgggaggatcacttgaacctaggaagcataggttgcagtgagctgagatcgtgccactgcactttagcctgggtgacagagtgggactctgtctcaaaaaaaaaaaaaaaaaaaaaaaaaagaattatacacggtatttaagtttgcttaactggttttttttgggggtgggggggtgtttgaggtggggtctctgtcacccaggctggagtgcaatggcacgatcttggctcactgcaacctccacctcccaggttcaagcgattctcttgcttcagtgtcctgagtagctggaattacaggtgtccggcactatgcctggctaactttttcgtatttttagtggcagggtttcaccatgttggccaggctggtcttgaactcctgacctcaaatgatccactcaccttggcctcccaaagtgatgggattataggcgtaagccaccgtgccccaccttcttttctttctttctttctttttttttttttaaagagagagcatctcactctgttgtccaggctggagtgcagtagtgtgatcatagctcactgtagccttgaaccattgggttcaagccatcccaccttaatctccctagtacttactgctggaactatggcacacaccactgcactgggtgaattttaaagttttttgtagagataagattttgcattgttgtggargctggtcttaaactcctggcttcaaagatcctcccacccagccagtgctaggattattgacatgagccaccatgcccagcttagtttgtttaacttttaaaaaacaagtcaaatcaactcctagatgcatacccaaaagaaaggaaaatataggttcacataaaatcttgtacaaaaagattgatagcaacataattcrtcattataaaaaagtagaaacaacccatacttcctgttgaacaggtctgtctggggggaaaaaacctcaaatgtttatcaatggatgaatgtataagcaaaatatagaatatacatagaatggaataatgttcagccataaaaaggaattaaggtacatgctacaacatggatgaaccttgaaaatagtatgcagagtcacagaaagaccacatatattgtattttatgattttatttatctgaaatgtctaaggcaaatttatagggacagaaattagcttggtggttgcctagagatagaactatttgggaaaagtggtgagtgactacaartgagtatggagtttgtttttggagtgatgaaaatgttctagaattagaggtgatgattgcacaaattgtgaatatactaaaaattattcaactgtctgttgtaaaaggatagatttcatgttatgtgtattgkatataaaaatatagaaattagtattatccatttaacaaaattaaggagaaaaatccgtatgattatttcagtaaggaaaagtgttcaatattcgttcatgattaaaacaaacagtgtttctgagtggcaygtgggatttgagcctgataatggcccttgattccaccaacatggagactttgtaccgcgtcccattagtgctcaaatgtcccaacctgaagctgaagaagcygaccaggctgcacatgccctcggccatgactatgtatgccctggtggtggtgtcttgcttcctcatcaccagaggaataatttatgatgttattgttgaacctcaaagtgttggctctgtgaccgatgaacatgggcatcagaggccagtagctttcttggtgtacagagtaaatggacagtatattatggaaggacttgcatccagcttcctgtttacaatggagggtttaggtttcataatcctgtaccaatcgaatgcaccaaatatcccaaaacccagtagatttcttcttctattcattggatttgtctgtgtcctgttgagtttttttatggctagagtattcatgagaatgtaactgccgggcaatctgataagttagagtgccttttgagaagaaatcaatggatactggatttgttcctgtcaatgaagttttaaaggctgtaccaatccactgttgtgaaatgtggaaaagaatgaagagcagcagtaaagaaatatgtagtgaaaacactggaagtgtagcttggagtaaaatttcttcttggtatcaaagagacaagtttatcacagtattttttctcctgctgacctattgacatcaatgatgttgagtgacattttcttcttagtttttcattttttaaagaaaatatactccagtttacaaatataatattgaataaagtgattattttttacagcccctttaacttgtttttggagatgacatttctgattttcagaaattaatataaaatctggaagcaagattccataaattgagaattctagatggctgatcagctttacctgtggtgctttgccttttaatagggagtgtgataatacattatttcagatacgtatgtatgactgtttcctgaacaataagatctatgaaaggagcagaaataaataatttttctaattaaaaacaaacaaaatcctggcagttaggaatacaaggaatttccttaatcagataaggaatatctgtaaactttcagcaggtgttacagtcaatggtgatatattgaatggttttcctctggaacaagataaaaacacatgcggtcactgcttccattcacactgtactggaggtcctagccagtgcaataaagaaaaaataagtaagtcataaggattggaaagggagaataaaccgttgttttttgtgattgtgtaaaagaatctgtagacaaattattggagagtttcacaagcacaagatgcaagacacaagtttcatgaaggcatgtatttctataaatcatcaacaaacagaaaatggaaaaaaattgctaatagcttcagaaaacaccagatgcctaggaataagtctaatgatatgtaagatatgtaagattagaaaaaatataaaacaatattgagagaaaataaagaagacaataaatagagggatataccactttaatatattttagtcccactgttgtgacatttagtttttactgactyagtctttgaatttattaattcacggtggtccgtctcatgtaaattttccccactgatttttaaaaaaaattagatttgttgatgtagtttttatatgtatacacatatattctcccctttttagaggtacagaggatgaattctaacaaatgcatatagaattataaccatcattaaaatataattatggtacttctttactagcagtgaacaattgcaaacaaagaataagaaaaacagtactttttttagtagtaccaaaaaaacaagaaatagttatttctgactacgtatatgcaagatttgtatgttaatattatgcaacatgttgggaaagatcaaagaagaccctcataaaagrgaacatattcagtgttcatgaattagaagactcaatatctttgaaatgtcatttctctccaaattgatcgatagcttcagcacaattccaatcaaaatcttagcagatttttgacaacttgattcttttttttattttattttttttcgagatggagtctcactctgtcacacaggctggagtgcagtgttgcgatctcaactcactgcaacctccatctcctgggtgagtgatctcttacctcagcctcccgagtagctaggattacaggtgtgcaccaccatgcccagctaattttttttttttttttgtagttttagtagagacagggtttcaccatgttgggcaggtaagtattgaactcttgacctcaagtgatctgcccacctcagcctcccaaagtggtgagattacaggtgtgagctattgtgcctggccttgacaacttgactctaaaatttttatataatattaaaggaactaaagtagcctaaacaattttgaaaaggaaaaaaaagttctaagacccacactccctgattttttatttttttgagatggagtctcgcttcgtcagtcaggctggagcgcagtggcacgatctctgctcactgcaggctctgcctccygggttcacgccattctcctgcctcagcctccccaagtgcctgggactacaggcacccgccaccacacctggctaatttttttgtatttttagtagagacggggcttcactgtgttagccaggatggtctccatctcctgaccttgtgatctacccgcctcggcctctcagagtgctgggattacaggtgtgagccaccgcacccggcccacactccctgattttaagaactgctctaacactgcagtaagcaagacacataaatcaatagcatagtagtttagaaataaacacatatacatatggctaattgttttttgtcaaagattatgaggcaattcaatgccatacattatactgtatacaaaaattaccctccaaggttacacttaaacatgaaacctgaaagtacaacttacaaagaagatatagtggcaaatcctagtgattttaggttaggcaaagatctcttatatagaatccgataagcctgagtcataaaagagaaaattgacaaagtacattttatcaaaaattgtaaaattcttctgaagagaaaaatgaaatgatagaatgagacgtagtcttggagaaaatgtttatataaaatccatatttgataaggacttatatacaaaataaataaagaactctcacaattcagtaataagaaaacaaccccctaaaacaaatgagcaattaaaaatggggggaaaaaatggaagaagttctagaaatggatagtaatgattgtacaacattgtgaatatactctgtgccactaaattgtacacttggagagggtcagaaatggtaaattttctgttttaacacggagactggtgaaggataattcctgtgactctataattattttaagataaaaagttaattaaaagcaaaatatttgcatttataagggaacatgataaatggatagcaaacaaatccgtgagtgtgctcatcattattagtcattggagaaatacaaagtaaagccacattgagttacccccattcacctattaaaatkgctttaaaggaaatgaaaaattccaagtgctggtgaggattgtggaataacaggtactcatatacatgcctggtgggaaagcatacctatcatacaatctgacaatcccattcttagatttttataaaagtggaatgaaaacacatccaaacaaaaatctgtatgtgatattatagtgcttttattaatacctccactgatgtttttttttcttgcttcttttttttttaagagatgggggtctcaatttgttgtccaggctggagtgtagttggtattcacaggcgtaatcttagtgcactacaacctcaaactcctgggctcaagtgatcctcctgcatcaccttcctgtgtagctgggactacagccctgcaccactgtgcacagcttccacacagtgtggaagaactgtgtgtggaagctgtgctggcttccatggctttgaagccgaatgttgtgcaagtgttgaagcagaatgttgaattagtcaattagttactttttttaaaattttctctttcctcctctctcttttctttcatctcctcccacttattatttaaagtagcagatttcttgctgaaaagcatttagataagcaaaaccaatttgttgtagaatacagttaaaggatgtcagctgatggtgctggctgtttttccagaggcctcacagaatggtattggcttgttgataagagagttatgagtccaggactcagccttataggctcagaaacccaactgttgacagtataataaccacaaatctattcctgatatgagggaccctcaaattaaccaaactagaaagacttgtgtrtactcagaaggctaatttataaattttctaaaaactggtacctgttgaacagattagaatactctctttgatgagtgagaagggagcttggtaaacatgggcgtgagaatgagaataattgaagtgatttgagtgtccaagagccatcaaggataagattcataacttgatttgcagtgacctgtaagagtatggatttcaattacatttcactatccttgggcagtaacgcagcatatacatagctttgacagtgaccatcttctctgtgatgaatactttcattcttttcatatgtttaaaccctcaattttacattggtccacagaactggcatcaaatactcacaacatagctcaggatctgtcaaacaaaagttcttatggactcaaaggtatgaatacttaattttttaatttttaaaattaagaatcttataaattgcttgyaatatctttcattttttatcaaagytagctaataaaaatttatcagataaatgtttgtaaactatacctatttatttggtaatcagatttgcagtttgctaatggaaatgttttattgattgactttcaaggtgccacagaattttcatcattattttccatgttcctaagtggccttaacatacattcgttagaggactaacaccaagttaaattgaacataaaacattcatctccaatatattgttttaagctgaaaataaggattgttgaagtttttccgttatattttgtggtgtaggtctaatgaccaaattaaaattttaatattccaaaatatgattaggacctgagcctttgccttctgtatttaatgtctggaattttttatagtctgtgtgggtatggctagttcctgcaacaacgtggcacttgcttctcacatgggagtttcccctgtaatttcctgacttaccactctatcatgttgcatctctgcttataactatctgtttcgctgtttttccttcaggctacatacatagtgccttgtacttgcttttaaatgtactcagattctcaccctattatgcaagtccaaagttgtgtttaattattttcaaaatactgctctcaaagtggtaggccagtcttttttatttttattatattatttttatttattttttttgagatggagttttgctcttgttgcccaggctggagtgcaatggtgcgatctcggctcactgcaacctccacctcctgggtttaagcaattctcctgcctcagcctcccaagtagcygggatttacaggtgtgaggcaccactcctgactaattctttgtatttttagtagagatggggtttcaccatgttggccaggctgatctgaaactcctgacctcaggtgatccactcatctctgcctcccgaaatgctgcaattacaggcatgagccactgctccaggccctattttttaawtatttatttatttatttatttatttatttatttatttttgagatagagtcttgctctgttgcccaggctggagcagtggcatgatctcagctcactgcaacctccgcctcctgggttcaaacgattctcctgcctcagcctcctcagtagctgggactacaggcacacgccaccacgccyggctaatttttgtagttttagtagagacggggtttcatcatattgaccaggctggtcttgaactcctgacctcgtgatccacccacctcggcctcccaaagtgctgggattacaggcatgagccaccatgcccagccttttttaaacttttaatatgtctcctgaattgccatggtaggccattcttactacatatcatgtataaaagtctgttttaacttactacattaactgtacatatagtggctgagctgtgcaattttaaaaattagaaaaaataatgtatattttaagctttagagtactttaatatttyttatgtaggtttttgtaatgtttcatcattgtttttctcctggaaattttcctttatatccctgtgtgtgtatgtttatcttcgccatcaagctttctcttacaattctggctttcattaacttcatcctccaaatttccagtgtattagtggtttctcagacagaattaaatgttttcggttttgaaacatctgtattttacatccaaatattggcacagtttacatcacatttcacagagagccaccccaatctgaaatcaggtacatcctgttaaaaacattccataaataaggactctttttctaggaaacaatcatcattttacttatgaggaggtcagttatttggctgtttacgtgattctaaggaaggtagacatggttacctgacttcttttgtctcacaagcatgctcctcctcttccctctccatacacaacttttggagagaaatggaattttgtttgtcagatgattaactcctttcttcttatgaaggaactgaaaacatccataatccctctttctggggttgtcgttaatttcttagtgtatttcctttaaaaccattatctatgggcatttttttcatacatgctgtaaacaatggccctctacttatataagatctgtaagtaagtattttttgagtagcaacacttttgaaagtacttasatgtgttatggatgagtattctgtaagaactgtttgagcgcatcctgtgtactgactccagaacttaaagcagcagacttgatatgagcaagagtaatgttgaactttgctggagacctattaggaagccatgtagtagagctaatattttatwaaaaggatgcttctctmaatttgataattcagtaatccacctgaaatagggtccaagacagatttgccttaaaatgaaatttgttgttttgaagactatatcggaagaaatcaaaccattgttaaatgtctatatttktgctacatccatacttttcttactcatggcagaattgcttggatgtgacctatattgaagcaaaatccatttgaaacactgatttgaggttatgtagatagtgactactagtcaagttgcatttgtaaacattatttcaaagagaaggggagaaaagaaatattactgattttaccgagaatagattaagaacgtcatgtttcttgggttgtaaactaaattgctagtgaggcgtatgtatcttttttccccgcatagtacacaaaaaggaatcatttggactgagactgtatttgactttgtggtataaactttgattgctgttgtttcccaacaggggcttggaagaattctgtggaagagtggacaacagaagactggactgaagatgtaagtgtttgctgtcagatgagacctttctttttttttttttttgaaatggaatttcacttttgttgcccaggctggaatgcaatggcgtgatcttggctcattgcaacctctgcctcccagattcaagcagttcttctgcctcagcctcccaaatagctgggattacagatgtgcgccaccaygcctggctaattttgtattttttttttagtagagacgatgtttcaccattttggtcagggtggtctcaaactcctgacctcaggtgatacacccgcctcaacctcccaaagtgctgggattataggcgtgagacactgcgcctggccgatacctgtctttctttcggtgtttggtggggactttggtgcttggaagaaagagcctgagacatcttatctcatcttggcttcttttctggcatgtatcgtagccagggtttttgagggttggcttttttagcagatgcttcttaaaaggaacttagattttcagatttttaagaatatttgtttttgtgcttaaaaatgaccaattgtcaagatgattgggagattggaaaaaaacaaacaagaaaaaaggttgaggtgttaggctgggcatagtgactcacaacagcactctgagaagctaaggtaggaggatcacttgaagccaggaatatgagamctgcctgagtaacaaagtgagacccctgtctctacaaaaaaaaaaataataaaaaaattacctgggtgtggggttgtgcatctgtagtctcagctactcaggaggctaaggcaggaggatctcttgagcccaggagttcaaggctgcattatcattcgaccgccctctagcctgggtgacagagcaagaatccatcttaaagcaaacaaacaaaatttaccaggtgttaagtaggattgattttttttttaagcttatctgtgttttgtttgacctgatagccagctgacactgttgcccagatttgtgaactattattctttagaatattttcattaaaggggagtctgtattttggatcacagttgaaattaacctgaataagtttgctctggttccatgcccaacctcttccccttttgactagaagaacctttttttaaaaaaaattcctttattgcacagatatttttgagcatgttacactagcttctgggtactgtcagtctataagttctgctttcagcatagtattttttttggaaaaataagttaaataataaagagaaaaaagggataaataacccaataccataaaattttatacctcttttctgtttgactgtcaagttctagaactcttgagtttggtatctgtctgacacagagtttgagcagacattgagagggaaataataaatgggttacaaatacagatcctcaaaactatatacaatgacgcacactttgagattctgtctttttctctgtctccatatgtgtttccatttatgctaacaggacctgctttgaatgagaaacaagaaacatgatttctacttgacttgtttaatgaccttaggcagggcgttgttccttgggtcttactactccttcacacacagtattatttgggttttaagtggtgtttgaacaacccactaccatagatagattcattttaccttgtaaaaaataagtactttaatttttttttttttgagacagggccttgctctcgctctgtcaccaggctggagtgcagaggcacgatcttggctcactgcagcctccgcctctgggttcaagtgattctcctgccccagccacctgagtagctggaattatagatgcacgccaccatgcctggccaatgtttgtatttttagtagagacggggtttcaccatgttggccaggctggtctcgaattcctaacctcaggtgatctgtccgacttggcttctcaaaggtctgggattacaggcatgagccactgcgcccggcctttttttaattttagagactaggtcttgcactgttggccagctcactccagccccaaactcctgtgctcaagggatcctcttgcctcagcctccaagtagttgagattacaggtgcgtgccgtcatgcctggcccttcctttaaaaaaaaaaaaaaaaaaggccgggcacagtggctcatgcctgtaatccagcattttgggaggctgcggtgggcggatcacctgaggtcaggagttcaagacaagcctggccaacgtggtgaaaccgtgtctctactaaaaatacaaaaattagccaggtgggatggtgggcacctgtaattccaattacttgggagactgaggcaggagaatcacttgaacccgggaggcacttgcagtgagacaagatcacaccattgcactccagcctgggcagcaagaatgaaactccatctcaaaaaaaaaagggggtggggaaccattcagtgttttattatcatgtttagatatgtcaatgtttatagtagttctcatttaytttttctctttttcgtaaatcgatttaatttgtaagtttcaggcaaaaatggattcactgggaatattaaaatatactaccttggggcaggcacagtggctcatgcctgtaaccctagcactttgggaggctgaggcaggaggatcgcttgagcccaagagatcaagtgcagcctgggcaacatagggaggccctgtctctacaaaaaatttttaaaatagctgtgtgtgatggcaggtgcctgtagtcccagctacttaggaagtagaggtgggaggaatgcttgagcctgggaggttgagtttgtagctgcagtgagcctcagtgatcatgtcactgcattcttgcctgggtgacagactaaggtctgtctcccaaaaaagaaaaaaaaacccttcccacacaccctgttttggaataggatgcaacttaggcccttcttgttgacttgttgaaccggtaaacaatttagcacttttatattgttgaagaaaatgaacacctactgtctcctctacctcctgcttacacatagtatgtcatgcaggaagtctggttttatacagtgtttctgagacatttagagttgataagaattatgggaacattttgagtagcatttttatgttttccgtgttacctcattagatcaacattttccagcctttcaaagcygagtccccacattgaaaacataaaaagaatatgtatcttttattaatgtcagttgaggtttcaaaaaatttatcctgaatgccctaaaagtgagttaaaacagtgtgcatatatcccaaaataattatgctgagtgaaagaagccaggaataaaggtttggatactkttatgatttcatttaaaattctagaaaatgcagcctaatctgtagtgtcagaaagcatgtgagtggttgcctggggatgcagacaagttgtgggattgagtgattccacagggacaggtggaaattgtgggggagtaaagaatatrttcaccgtcctaattgtggtgatggtttcatgggggcctatgtatgccagacttattcagttatttggtttgaatatttgcggtttattggatgtgttagaatgtgataaaattaattttttaaaaataatagaaactcatggtttaataaaaatgaaatgtaaaattactgatcaattaagtactaaagacatctgtctttggggggagaaaacatcgattatttcacctttacaaacttcttaatgacttcttctttttttttttttgaggcaggatctcactttgtcccctaggctggagtgcagtggtgtgatcatggctcacggcagcctcaacctctggactgaagcgattctcctgcctcagcctcccatgtagctgggacaggtgcacaccaccacgaccagccaatttttttttttttcctagagatgaagccttacttctggcctcaagcaatcctcctgcctcggctgcccagagtgttgggctttcaggtgtgagccaccattcctggccaccttctcaacttctttttggcatttctgttagcattgttggygggtttattggtattctcattttgtgtaatgacaaatagagaagtgagtctgcggttgagccctggtttgagtgtttcactgtgttgtttaccattagtctcatcattttcctgatttgaagtcattcttgtaggcctttcaatctaaaattaccttcacttgcagccgggygccatggcttatacttgtaatcccaacactttgggaggtcaaggtgggtgcatcacttgaggccaggaattggagattatcctgggcaacatggcaaaaccctgtttctactaaaaatacaaaaattagctcggtgtggtggcgcatgctggtgcgtgcctggaggcccagctactcaggaggctgaggcgagatgatcrcttgaacccaggaggcacagattgcagtgagccgagatcacgtcactgcactccttcctgggcaacagmgccagaccctgtctcaaaaaaaaaaaaaaaaaattgcattcacttgaaaattacttgtcatggtcacttgtatatttcattttctttagaatagctgttatgcgaagtgtaagagactactgatgactacaaatgatcaggaagtcagtgttttgggtttagtagtatgtagaataagattaaatttttcaactttccatacagctttctgaaacaaaggtcttcactgcctcatctgctccagcagagaatcacatcttacctgggcaaaggtaaatactttttgccatcttatatttgttattcaaagcattacagaaatcttttgcctcaggaaaagtattttcatttttgggtctctttctattttttccctttttatccaaggctaacttttattttaccactacttggtaaatctgacagagcttcaatcattttctaattgatgtatccactgatgaatttgttagcagttgttgcagacatcatgttaaactttttttttttttttttctattttgagacgtagttttgctcttgttgcccaggctagagtgcagtggcgctatctcggctcactgcaacctccgcctctcgggttcaagtgattctcctgcctcaagcctcccargtagctgggattacaggcatgcrcccccacgcccrgctaattttgtatttttagtagagacagtttttccatgttggtcaggctggtctcgaattcccaacctcaggtgatccgcccacctcagcctccgaaagtgctgggattacagatgtgagccaccacacctggcccttttttttgttttgttttgtttttttgagacggagtctcactctgtcgcctaggctggagtgcagtggcacgatctcggctcactgcaacccccgccgtcctgagttcaagtgattcttctgcctcagcctcccaagtagctgggactacaggcgcctgccaccacgcccggctaatttttgtatttttagtggagacggggtttcaccatattggctaggctggtctcgaaatcctgacctcgtgatccgccagcctcggcctcctaaagtgctgggattacaggtgtgagccaccgcgcctggcctaaacttttttaatggttgctattttcacttttgtagacctgtttttttttttttttgacagaatgaacttaatacattgtattctttggtttcttcatgtaccatttatttagatcttctgaaactaatacagatctcttattttatttgagttctactagttttactctgctagattacagaaaaggaaggaacttatgggataaccacattcttagaatgtacactgaaacaaatgactgaagagcatttatttatattctagttttcacactaaacacctttgaaagtggtttcaaagtgtagtgatctggaaagataaaagactggttacatatgataccttagaaatgaaggcagttttgaacctaacaggatcaatctcatgctaaatgagatggtgatgagatttcattgtagggaaataaaaatgattaatgattatgtcttatagtatattgttttgagattgtttggagtttgttgttaaatgcacatattctctattgtatttatgattcagtgaatttactgggatcattgtcatgaaattcaacttggctatagtctataagggagaggaactcaggctaggaactttgccatgtgtcaggaatgagtcttgaattgtcctgtaatctgcctgtcttattggcatggtgagaatgtcagttaggagaactgatgggaactggcctttgaaaggattcaatggcattcattacaaggttaggtaatacggtgcatctggcaggtcctactacactaggtaagtttagaaaagagttggtacaggaagtttgtagctcattgttgtcaggtagtccaaattggaatatctgtctggggggtgttttaagagttctggttaacagtatatttgttattatactgtgcatttattcctgaatattttaaagataaaattatatgggcgtgtgtgtgtgtgtgtgtgtgtgtgtgtgtgtrtatacacacacttaaatgtattatgggatagaatgtaaaaatttaagataaatatgaaacttggccaggtagggtggctcacgcctgtaattccagcactttgggaggccaaagcaggcagctcacttgagagcaggagtttgagaccagcctgtccaacatggtgaaaccctgtctctactaaaaatacaaaaattagctgggcatggtggcacacgcctgtaatcccagctactcgggaggctgaggcacgagaatcgcttaagcctgggaggcagaggttgcagtgagccagggtcacaccactgcattccagccttggtaagagagtgagacactgtcttagaaaaaaaaaaaaagtgaaacttattgaattgcttactgcaggtgaggtcttcattccctagaaatatggatttattaggaactctggttttaggtaataaatgggtaaaatattctaggtaaaatgaaccaaacttgagaaaattgtttarttttactttattgctccaggttttcaaatcagtttataatgtgttagtcattactttgaaaatttctcaatacaccttttgattctcttctctgcaaaaccctgcttcagtctctgtggcttggtatgttcttttgtgtggatgatgccctccttttgcccccttaaaccccattttccaaaggttctcctcatttgatttttaatgtaaattcactatatattgattgacttctcacattcatttgttggtaagatttgcttatgactggttcctcattgctttttgtctgcttagcattgatctggtagccttgctccagaagcctgttcctcacagtcaagcctcagaagccaactcctttgaaacttcccaacagcagggctttggccaagcccttgtcttcacaaattcgcaacacaacaatcagatggcaccagggactggcagctccactgccgtcaactcctgttctcctcagagcctggtaactcacttttatttcagtgtgggattttaagaaatatacccattagcaaatgtattctagaatatgatacatgctttataattactttctaaatataaaaatatctacagtaaggccgggcatgatggctcatgcctgtaatcccagcactttgggagctggggcatgaggattacttgaacccaggagtttgaaaccagactgggcaaaactctgtctctacgaaaaaagcaaactaacaaaaattagctgagtgtggtgttgtgtgcctgtagtctcagttacttgggaggctgaggttggagggtcacttgtgcccaggagtttgaggttgcagtgagccatgatcatgcctctgtactccaggctgggtgacagagcgagaccctgtctctaaaacaaaacatcaaaaaattctacagtagatcttagtccagaaaacaatgatgtggtaatttccaagcacatatctgatgattccatgtggaatttaactacctgagtttcctggacaaagataaaaatttttttatggtttgtcaaattctttgaactgatgatcactcttgagattgaaagtacccctttcttctgaatgatgttttccttgtgttttgtttcatattatgtctctatagttagtatattcaatttcttgttttccaattaaatgcgaaagtttatcagaattgacttgctataaaatcatgtaaaaacagtctgagtctgcctaggcgcttacattttttgcttttttttccccctaagaccgtaaaataagctacattttcttaaaatgccaaatgattaacagaggcccttatagtttggatgtgtttttattgaaacagtgtcatttagtactgtatgactgacttccaatgtgtgttaagctcccatccagaaggaacttcagaaactgttagtgaaggctgtgaagataggcttatggaagtataagcttagatcatagcttatacaagaatgttgctttagaatggtgaactgaagttcctacccaactacaggaagttctgagctggcaaggggaagttagaaaggtctatggatgcagaactacagctcttactagggataattattttagtttgttgctgtgtttttcctgaaatttattgctgagaaacagaattttctcccgagtcaaatcgtttgttttaccctgataaaattgagaattgaatatttaaacttttccttagtattttctactctgtgtagccatatcatgtgttgggcttggggacttggtgtttttagtatcattggtatatgaggtggtgtcagtgcttgaagtagaacagccsaaggcttctctattttgagaaggcctaataaaaaccctgatttttaattgacgcaccagagtcttttcctcctccgcctttccctctgctactggtataattatgtaatgcccttgctgaaatctatgtgtgtccactgaattgataagaaggacttgagtttttacagcaatcttcagatatgttgctttatgtagtgaccagcatgagaatgaccaacatgagaaggcagaataagaattgtttgtgtggcgttgtattagagcagtggttctcgaccctactctaatctttaaaaatcactgggagctgggcgcggtggctcacacctgttattccagcactttgggaggccgaggtgggtggatcacctgaggtcaggagtttgagaccagcctggccaatgtggtaaaaccccatctctactaaaaatacaaaaattagccaggcgtagtggtgggcgcctataatcccagcttcttgggaggctgagtcaagagaatcacttgaacccgggaggtggaggttgcagcgagccgtgatcatgccattgyactccagcctgggcgacgagagaaactctatctcaaaaaaaaaaaaaaaaaaaaaaaaaaatcattggggaggccaggcatggcatggtggctcatccctgtaaatcccagaactttgggaggctgaggctggaagattatgagatgccaggaatttgagaccagtctggcaacatagcgaggcctcatcttgctaaaataaaataagctggttgtcatggcacatgccctgtaatcatagctactgtaatcccagctacttgagaggctggcatgggaggatcacttgagcccaggaggttgttctgtggccctccagcctgggttgacagcaataccttgtctccaaataataattaataatgaacctagtaaataacagcagcaacagaagtgatgatgatatttcccaagtctctaaaacaaaacatgtcctcatctttgggattgggatttgggcactgtgtgtgtttgtgtgtatgtgcatgtatgcacatgtgtgtattgtatacattttaaaagtctctccattgatttaaatgtgtaggtggacttaagaggcctatgctgtgtattacctaggacatggcagtagtcattgattcagtgatttcgctgtgttgtaaagcacatagtgcatttgataaaactagctgatgcatgttagggattatgtaggataacaggatgaagagagtcatcacctgggaagccttcattaaatcagtgggcttgagctggatttttgcaaattggtagcaacctcagaccagtgtattgggcaacctgaaaaaagaatctggagcagtgataagtaatgttagcacaactgtttcagtatgagcaatctctgtcacagctgtccataacctaatgttttactcaaagcgaagttaggatttccatccaagtgggacattccttgtctttgaatgttgataatagaagtaattgtttcaacttacttgagggaaggcaaagtatttgtttttgaccttaaatggatatgaaatgttatttttgggccaggcacggtggctcatgcctgtaatcccagcactttgggaggctgaggcaggtggatcacaaggtcaggagatggaaaccatcctggctaacatggtgaaaccccgtctctactaaaaatacaacaacaacaaaaaagccgggcgtggtggtgggcgcctgtagtcccagctactcgggaggctgaggcaggagaatggagtgaacctgggaggcggagcttgcagtgagccgagatcgcgccactgcactccagcctgggtgacagagcgagactgtctcaaaaaagaaaaaagaaaagaaaagaaatgttatttttgatgaagaacttatatttcagaatgatcttgatatgtaaaaatgtagttgatcttccattgtcttttctagtcataggctttcattctctttggatctcgacctgacaggacagatggggcaggagtaacattgtttttcctgtacttatttatggaacgtatttggtgttcttagtcatctaaacaacttgaaatgaaaatagcagtgtctatggtatttgctcaacttcaaatacctatgtatcgcagtgtctcattttggaatagtaaccactgaagttcagttctttgacctgtatttgatcttgtgcgtgtgtgcgcgtgcrtgcgcgcacacacacatgagagacgagtctagctctgtcacccaggctggagtgcagtggtgcgatctcaccttactgcaacctccacttcctgggttcaagcgattctcctgtctcagcctctggagtagctgggattgcaggcgttcaccaccatccctggctaatttttgtatttttagtagagacggggtttcaccacgttggccaggctggtctctaactcctgacctcaggtgatccacccacctcggcttcccaaagtgctggggttacaggtgtgagccactgcgcccagcctgacctgtatttgatcttgcagggtcatctcacactgatctcttctttgactgtacatcttgtaatcattaaagatgaagactgtggttcacagactaggaaaataatgtgtttttgttggtcaagcatatctttgtcatgtatttcatggcattcctctttagtttttttaaatagtgatatttaattgtgaacttatgacatcactttttattattttattttatttttatttatttatttatttattttttgagatggagtcttgctctgtcgcccaggctgtagtgcagtggcgtgatctctgctcactrcaagctccgcctcctgggttcatgccattctcctgcctcagtctcccgagtagctgggactacaagcgcctgccaaaactcccggctaatttttttgtatttttagtagagccggggtttcactgtggtagccagaatggtctcaatctgctgacctcgtgatccgcctgaccttgtaatccacctaccttggcctcccaaagtgttgggattacaggcgtgagccaccgcgcccggccaacatcacgtttttaaaaattgatttcttcaaattcatggcaaatatttcccttccctttaacttcttatgtcagaatgaggaaggatagctgcatttatttagtcagttttcattgcatagtaatattttcatgtagtattttctaagttatattttagtaattcatatgttttagattataggttttaacatacttgtgaaaatacttgatrtgttttaaagccttgggcagaaattctgtattgttgaggatttgttcttttatcccccttttaaagtcatccgtccttggctcaggatttggagagcttgcaccaccaaaaatggcaaacatcaccagctcccagattttggaccagttgaaagctccgagtttgggccagtttaccaccaccccaagtacacagcagaatagtacaagtcaccctacaactactacttcttgggacctcaagcccccaacatcccagtcctcagtcctcagtcatcttggtaggtatacattgtttgtgggtttgcccctactgaggacgtttcaagctttggcagagtgtgttgacttgtgaagactaatgtggaatttgtccagagatgtttctttttagtagaactcttgcagtttctcagttaaatcagtcttcctttgttatacaatacttgcatttatttgtttttgttgttgttcttgatagtttcattattgttggtagtaattgtggtggtagtacatgccttgaaaagtatggtaaaagcatgcaaatatgaacatctaacactttgtgtaaatgcatggacagaattttctgagctctcttagaagagggtggtgatagaacatagaatgtggaaaacattttaagactttttttttttttttttttttgagatggggtcttcctgtgctgcgtaggctgatctccacctcctggcctcaagcagtcttttaatctcagccttctgagtaactgggattatagatgtgcaccactgtatccagcctagacaatattttactctattattttatttttttttttttgagtcaggatcttgctctgttgcacaggctggagtacagtggcacagtaacgcgtcactgccatcttgacctcccaggctcagtccatcctcccacctcagcctctctagtaggtgggactataggcacatgccgtcactcctggctgatttttttgtatttttttaatgtgacaggggtttgccatgttgcccaggctggtctggaactcctggactaaggtgatctgcccacctcggcctccaaaagtgctgagatcacaggtgtgagccaccacrcccggcctggacagtattttaactatcacactctcatgctttctcattctaacattttgaagtatcaactatgatttcatcaacctttacattccgtggtttgtattgtaaaggtcccatgtgtagactggatgttttctaaactaaactcccacagaaattgtgacattaagccaccattccccaccagcactcacatgccacactgtattaaggaatagcaggggatttcattcattgtggagctggccatgtgggctggtttatggttagggcatatagagagacagggaagcatattcctctgttctgtgaaatgacttactgtgttggaagtacatgagaccactccggggtttgaagcgatgtctaccaagggaaatcattagagactcagtgcccaaagtttttgctggggcaagaaatgtaggtaccctgtgcctacattttttgctatagcacatagcaaaattacagattcctagaaggaaagcagatgttgagcataaaccacattgtttatacagacattcttagcacagtgagccactcttaataggttagtgtgttggcaccctttgccaagtacataccagcagtccaaattctcagacattagccaaggtccagtcatcaagcaggcctttttgagaggaattgtaggtccctatattaactttttctgcacacataactagtgagtgataggactttttagatagaaccatgctattcccatattctttataaaacctgtgtgtttggtgcatgcctataataccaagttcaaaaatgaatgcgcctaaaycagctctgccatttgtttttttttaaattaaattctgttgacactcagctagctgggcacagtggctcatgtaatcccagcacttggggaggcagaaggaggaggattgcttgagcaggagttcgagaccagcctgggcaacgtgatgagacacaaaggctaaaatattaggttgttgtactatctggccccatagagaaaaagagggccaacctctgtcccatatggtagaactggcttttcaaatcagtagtgaaaaaacgctttattaaaaccgtttgaaaaatgaagttggatctctatgccaaaatgccagtgggtcagatagttaaacataaatagtgaatctagaactataatagagaaaacacaggagaatttttttgttgttctgtgtgagggagacctttctgggtatggcagaaaacaccaaattaggcagacaaacaatgaaaaaaatactcaaaatttgtatcatagacaaaaagagttaatttccttaatataaaaagagtaaaaataaagcagatcaacaaacaggttaaaaaactggctaaagagataagaacagtctataagtaaagaacacttaagtatatgaaatgatacttagcacatttgtatcattttagtttgtattttttaataccattttccaccaattaaaccaggagattcaaaagtgtttgatattagagtgtgttaaaaaggatgtgttctatctgtggacagtaattttataatatttatcaaaattcaaaatatatttaccctgtgaaggggcaactttatcctaccagttgatcctacaggtatacttgtacttgcacaaaatatcttacatacaaatgtattcattagtgcattgcttttaatagcataagatttgacctaaaagtccattaatrtagtactggttttataaaatgatacctatgtgtactagatttctgtgtagtcaccaaaatgagtatgaagtagctctttgaacattaatgtgagacactcaatggaaattaaatgatttgtgagacagtaaggtatatagtgtgtgtatatatatgtctgtctgtctgtctgtctatatatattgtgatatagtatctctgaaagagacattcaggaaaaccgggtacagtgtttgcctttgtggagcaagtatgggagagtggtgtggaagagaaacataatattcgtcatacatattcttgtatctattggattttgttttttgtttgtttgtttgtttgtcacccagtctgtcacccaggctggagtgcagtggcgccatctcagctcactgcaagctccgcctcccgggttcacgtcatagggcctgcctcagcctcccgagtagctgggactacaggtgcccaccaccacacccggctaatttttttgtatttttagtagagatggggtttcaccatgttagccaggwtggtcttgatctcctgacttcgtgatctgcctgcctcggcctcccaaagtgttgggattacaggcgtgagccactgcgcccagccatcttttggattttgtaacatcatatatatatatatcaattagtccaaaaacttaataagttttttttttttttaatttttggatgaagacatggtcttgttttgtcatccaggctggaatgcagtggtgcaatcatagctcactgcagccttgtactcctgggctaaagcaatcctcccacctcagcctcccaaagtgctggcattataggcatgagtgactgtgcctggctcaaatttttaacagttatgtagaaaatccataaaataataaaagtatgattctctgttagctaatggtcaggtgtgtatagcaccataatattgttctcacgagttcatcactccctatgcttaaacataaaccaaatctctctggataggaaacaaggtgtgtacccatttaggaacttttcccgtttatcataaatgaagtgttacacatagtgtgtgtaaaacctaagaaattcaactggaaatgatttggagaaattggtggtaatagaacacttcatgttctattgaagaacattgtgaagccattatgcctcattaattgctgcttactttttttagacttcaaatctcaacctgagccatccccagttcttagccagttgagccagcgacaacagcaccagagccaggcagtcactgttcctcctcctggtttggagtcctttccttcccaggcaaaacttcgagaatcaacacctggagacagtccctccactgtgaacaagcttttgcagcttcccagcacgaccattgaaaatatctctgtgtctgtccaccagccacagcccaaacacatcaaacttgctaagcggcggatacccccagcttctaaggtgggcatttcatcatgaagtcaccgtcctaaagctggaattatttttacattcagctctagtgggatactaagttttggaaactggggtacagtgtttttcaagcacatagcttattgattgcataataaggatatggccatttctgagtgaccagactagtattagagggaatgggtttgtgctgagagccacagrtccttatttcaagtacagatttgaagatctggctcagagaactgttgttcttgagggttttgctgtatcccatagttggaggatgcatggttccttgaccaggtgatactttcatcattggtgagtccccaaaaatagagtagtcagctcagtgttcacttcccacccaccatcacaactcccccgcattgctcttagatgcaggtggtgatattaatgccaaccattcctgtttaacttttaatttctcctttttttttttaaatgagacagggtctcgccgtgttgtccaggctggtcttgaactcctgggtgcaaatgatcctcctgtcttggcctcccaaagtcctgggattacaggcatgagccaccatgcccagccaacttttaatttttcttagcttgttttttttctttctctttttagaaaagtcttagcctattttctccttgtttctcactccttcttcttgccagtattgcctgggaacctaaatgcttgtttggctctgttataggcctttgtgacctggaatctgtgacctctgttcctgacacgacagctttgctttttcagatcccagcttctgcagtggaaatgcctggttcagcagatgtcacaggattaaatgtgcagtttggggctctggaatttgggtcagaaccttctctctctgaatttggatcagctccaagcagtgaaaatagtaatcagattcccatcagcttgtattcgaagtctttaaggtactgaatttagtcctttgttatgaagcaaaatagaccctaagagagatcaactggtggaaaagaatacatcctgtggtaatagctatcctcagtgtttatccagaccttccatcatctccataagaaaccccatacctgtagcagacagtctcagtttcttcattgccctgccccttagcaaccaataatctgtctctggatttgcctacctggacatttcatataactggaatcttggaatatgtggccttttatgtctgatctttcacttagtgtaagttttcgaggtacacccatgtttaatgtatcatttttattgccaaatatttcattgtgttgatataccacattttattcattcattagttggtggacatttgggttgtttgctctttttgactatagtgaatgatgctgctatggacatttggtttcaagttttgcatgctttcagttctttgggatgtatatcccaggagtagarttgctgagtcatatggtaacttaaccattcaggaaactcccatactgtttccactgtggctgtagcatttgacattcctaccagtagtctatgagggatctaatttctccacatgtttgcagcagtcattttccttcagtggaatattttataaatacaaaatctcagattttagttttcttttcttttcttttttttttttttgagatagggtcttgctctgttgtccaggctggagtgcagcagcatgcttggctcgctgcarcctctgcctcccaggctcaaatgatcctcctgcctcagactcctgagtatctgggattacaggcgtgcaccaccatgcccagctaatttttaaatatgttttgtagagacagggtttcgtcatgttgcccagactggcctcaaactctggagctcaatgaatctgcctgcatcagcctcccaaagtgctgggattacaggcatgagccaccggcctggctgactttgttgttgttgttgttttagttttttcacattccagaggcaaaacctgatatttgtttaagtttcctttttaaagatggtctcaaacacctggattccttaaagaatcttcttattttttttctttttttctagacagagtcttgctctgtcgccaggctggagtgcagtggcgcgatcttggttcactgcaacctctgcctcccgagttcaagtgattctcctttctcagcctccagagtggctgggattacaggtgcccactgccacgccctgctaatttttgtatttttagtagagacggggtttcaccatgttggcaaggatggtctcgatctcctgacctccggatccgcccacctctgcctctcaaagtgctgggattacaggcgtgagccaccgcacgcagcctaagtattcttaaagatgtccccctatctctcagttaaattaggtgggtctcatttgggataataaattgatgcagtagttgcatctcgtgaagctgtttatgttttttttttttatgaagctatttaaagtaacaaaattatgttgaatatttttgactcttttcagtgagcctttgaatacatctttatcaatgaccagtgcagtacagaactccacatatacaacttccgtcattacctcctgcagtctgacaagctcatcactgarttctgctagtccagtagcaatgtcttcctcttatgaccagagttctgtgcataacaggatcccataccaaagccctgtgagttcatcagagtcagctccaggaaccatcatggtaagtggtattttagtttttttctcagaagatgtccgtcttatttggaaattaatgtttggttaaattatgcttcttggatatgattttattttacaaattgactaaccttttgagtagaatccttatagttcattgagtttgtttatagtgggcatctctagcacccatgctcttgagtgtgtggatagatstgcaggttcatacactttgtggagaaaaccaagcatgcgtgtagtatgagcactttggctgtagtactgggtacttctacattgtctgaaatatctctgaatatttcatgtactgctttctctctgattgccccatttgctttgaatgtatttgcttcttcatcactgttaggtatttttgtgttaaaattatgtattttctacctagtttttgttaataatactggactatagataaaggaaccagatctatttttgatatagttttaaagttttacccttctagattcttgctaactgcatatctgatggtcattgccagttgtattgctttctgttaagttgagatgtaccaatatctcctgagaatcttagaaagaaacttaaaaaagaacaagtatacacatttcatgtcacactagtaatacttgaacatcattctgtcccaggaaattaaaataatatggatgacactacaggcataccttggagatactgcaggttgttttataccactgcaataaagaaagttgcgctaattttttggtttcctagtgcatataaaagttacaatgtggatatcttaattaaagatactttattgataagaaatgctaaaaattaatakgtgagcattcagtgtgagcaattctgtggattgtttgttttttgggggagtacaggttcttgctttgtcacccaggttagagtccagtggcgygatcacagcacactgcagccttgacctcccgggctcagtgagtcctcccaccctagcctcccaaagagctgggactacagacatgcattgccatgtctggctgacttttgtattttgtttagagacggggtatcaccatgttgcccagtctgatcttgaactgctgggttcacgcaatccacctatcttggccttcttccaaagtgctgggattatagggtgagccactacactgggctctttgttccttttatcacttgacattattttgtaaatatgacatgatagcttaggatttcagctcaacaactctgtatgtccaaggtttctgagtaaatttttaagccaacaatttttattaacagtgctggaacttgataatcctatgagtaaatccaagcccttgccccacaagaacccctcctagggtgtatacaccctcacacacacatttgcagcatcttacttggtgtaggcagctgagaaaagtatagatatgcttccagtttaggaagaagcctttctagagccaaagaaacgacactgtggtggttcccatattaaatctgcctgcatgcatccgatgtcttaactgcatttgaattaaggaatcttgtcgtcgtggccttcttcctcctcctcctttttttcttctttttcttttcttcttctttcccctctccctctccctctcttccctctccctcctctccctccccctcctctttcccctcctcctcaccctcctccctcctaccttattttttcttcttcttccttccttccctctttcttcttcttccttctcctcttcttctcctccccatcctcctcctcctcccctcctcctcctcctcccctcctcctcctcctccccctccccctcctccccctccccctcctcccccccttcctcctccccttcctcctccccttcctcctccccttcctcctccccttcctcctccccctccccctcccccccttctccctccctctccttctcttcttcattttgatacagggtctggctctgtcacccactgaagtgcagtggtgtgatcacaactgcctgcaacctcagcctcccgagtagtggggactgcagacacatgccaccatacctggctaatttttttgtagagatggggtttcatcatgttacccaggctagtctcaaggaatcttgtcttataaagcacacaaatggctgagagcattaaaaacacataggaatctgggcgcagtggctcactcctgtaatcccagcacttttggaggctgaggcaggcagatcacctgagatcaggagttcgagaccagcctgggcaacatggtgaaaccctgtctctactaaaatacaaaaattagcctgatgtggtagtgcgtgcctgtagtcccagctactacttgggaggctgaagtgggagaatcgcttgaacctgggaggcggaggaggttgcagtgagtggagatcacaccgttgcactccagcctgggtgacagagcaagactccatctcaaaaaaaaaaaaaaaaaaaaaagacataggaaatcaaataatgttattaagctatgttttctgagattatgccactctacctctaatgagacataaaatcacaaacaggaatagaatcttggaacatataaactgagtaaaatggagctttccatgttttgtcttttcatcattcccttcaactaaacatttagaaaaatatttgtgtcccttgtccgtcttggatggatcatcctcccttcctttttctcttccccttccacagcctggaatatccacagattaaaattaccttctcagagatgctttgacagaaataagttagagtctatatcctgacagatgggcactgaaacaagaaaaaccatgtgaactatggaaatttcaatgacaagcttttttttttttttttttgagatggagtcttgctctgttgcccaggctggagtgcaatggcgtgatcttggctcactccaacctccacctcccgggttcaagcgattctcctgcctcagcctccctagtagctgtgattacaggcacccatcaccatgctggctaatttttgtatttttagtagagacagggtttcaccatgttgcccaggctggtctcgaactcctgacctcaggtgatctgcctgccttggcctcccaaagtgctgggattacaggcgtgagccaccacgcccggccaatgacaagctgtttttgtttcaacataagtttttgagaagcttatcgtgtaacatttcttacataatctaaacaatcatgttgggctgggcatggtggcttatgtctggaaccccagcactttgagaggtggaggcaggtggattgcttgaggtcaggagtttgagaccagcctaagcaacatgacaaaaaactctgtctctacaaaaaatacaaaaagtggctgggcgtggtggtgcgagcctgtggtcctggcaatttgggagactgaggcaggtggatcacttgagcccaggagttcacaaccagactggacaacatgatgagaccctgcctctacaaataataataataattaggtgtgatggtacagacctgtagtcccagctactcgggaagctgaggtgggaggatggcttgaaccaggaagcggaggttgcaatgagccgagatcacaccactgcacacctgcctgggtgacagagccagacactgtctcaaaacaaaaacaaaaaaacaaaagaaaccccccaaaacaactatacacaatgtagttgtgtgtaatgtagtgtgtgtaaatatatgtatctattttttgagagggaggtttgctgttgttgcccaggctggagtgccacggtcccggctcactgcaacctctgcctcctgggttcacgtgattctcctgcctcagcctcctgactagctgggattacagccgcccaccaccacacctggctaatttttttttttttttttgtattttttaaatagagacggggtttcatcatgtttgccaggctggtcttgaactcctgacctcaggtgatcaacccaccacagctgcccaacgtgccaggattacaggcatgagccattgtgcccagcttaatttttttttttttttttttttttgagacagagtctggctctatcgcccagtgcagtggtgcgatcttggctcactgctacctcttcctcccaggttcaaatgattctctttcctcagcctcccgactagctagaactacaggtgtgtgtcaccccacctagctaatttttgtagttttagtataggtggggtttcactatgttggctaggctggtctcgatctcctgacctcaaatgatacgtcctccttggcctcccatagtgctgggactacgggtgtgagccactgcatcccctgtcaacttgatactatgtattctcaactacatgctagataattttacttatttacaccccagacgcagttaaattgaacctttgtcagacttttccctctgtatattgctacttgttgattttccatcctggttttagacattagttcttgatgtgctaccatgcaatataattttcactttttttttttttttgaatcaccaccagtctcactttattttttagaaagagtttgtgttggattgttctccttcctaccttaaatatttagtagcattcaccagtacagctgtctgggccagaagttttctttgcaaggagttttgtaattgtaaattcaattccttcaattggtagagggctattcagactgttttttttttttttttttttttttgagctggagttttgctacagtgcccagggtggtcatgaactcctgggcgcaagcagttctcctgttccagcgttctgagtagctggattacaggtgtgggccactgtgcttcagtttcttttgctgtttgtgtatgtcaaggaatttgtccatttcatctaagttgttaatttactggcataaaacttcaatgtatttctttcctgtccttttaatgtttctgagatctatagtggtattgtctcctttatttatttatttgttttgttttgttttgttttttgagatggagtgttgctctgttgcccatgctggagtacagtggcgcaatgtcagctcacatggtggctcacacctgtaatcccaacattttgggaggctgaggtgggtggatcacttgaggtcaggagtttgagaccagcctggccaacatggtgaaaccccatctctactaaaaatacaaacattagcctggtgtagtggtgcgcgcctgtaatcccagctacttgggaggctgaggtaggagaatcacttgaacctgggagatggagtttgcagtgatctaagatgcgccattgcactccagcctgggtgacagcgcaagacaccatctcaaaaagttacctttaaaaaaaaattatttgggtctgggtgtggtagctcatgcctgtaatcctgtgcttttggaggccaaggcaggaggattgcttgagcccaggagttggagaccagcctggtcaacatggcaaaaccccatctctacagaaaatacaagaattagctaggcatggtaggatgcacctgtagtcccagctcctaggcaggctaagggggaggatcacctgaacctggggatgtgaaaaaaaatttttttgaacatttttgttcttgcatgagagtttgttgtttatcttccctttattaaaaaatagaataaaagagataattgtttcttgattaagctacatgttgtagaaagtataaaaagccactcaggtaatgatttcattttgtaagtttatattctcttctcttcttttccttatagaatggacatggtggtggtcgaagtcagcagacactagacagtaagtatagcagcaagctactcttgtcatggctggtgccaaccaaacagaggaagaggatagctcacgtgatgtggaaaacaccagttggtcaatggctyattcgttaaaaagcagcccttttgcttttttgtttttggaccaggtgttggctgtggtgttattagaaatgtcttaaccacagcaagaaggaggtggtggtctcatattcttctgccctaatcagactgcaccacaagtgcagcatacagtatgcattttaaagatgcttgggccaggcggggtggctgatgcccataatcccagtgctttggggggccaaggcaggcagattgcccaagctcaggagtttgagaccaccctgggcaacatggtgaaactctgtctctactaaaatacgaaaaactagccgggtgtggtggcggcgcgtgcctgtaatcccagctacttgggaggctgaggcacaagaatcgcttgagccagcttgggctacaaagtgagactccgtctgaaaagaaaaaaaaaaaagaaagaaactacttctaaatcaaaaatttactattcttgttcaggaaagataggctcattgtctttaggacctgaaggactgttgcttagaaagagagataaatgttcactgtggacatttgggagaaaatgagaccccccccccccgccacttccaacagctcagtgattaccaaagatagtgcaggtaaatccgttaattgcttcttttctgtagttggccagcttgactgatkgtttatagtagttttctttctttattcaggaaggcaaatgggtggggaagccagaaagactctttaaataggatttcctgggagtgcggatattgaacttaagcagaccgaggtgagcctcagttgaaactgtaatgacagatttggagccccaggattttggtttgacatttgctggtattgttgggctgccaaggctgtttggagattcgttggtcgttctgagcttgttggatgacagaggaacttttgactctagcagtggtagtggcaggtttcttttgtctaggcatgggtcgagaactaaagtatctgggaagcagtgtacattaacctacttttcatttcccatactctcttctccctcacttcctcctccccttccctccccattttgtttgtttgtttgagagaggcttcctgtgaagctgttagcatcataatacaaggcccagggcggtatgttttggggtcttagttttaggtgaggtgtatctgtggtgtctttatacagtttatctatgaacaaggtttatatatggaagagactgccaataaaaagaaggcctctgtaagaactgacctaggtgtaagttgaccctttcattgcttatgtttgtttttgacctgcccttcctttagagactcaagtgctttccctgggttttagaagggtcaaggttgctcctctttcctaactggaaaagacaatgatgttttatttccaagcacatatctgagttgtatgtgtggacagcactgagactgagtctttccacagctaggactgagtgtctccacatcctttctgaagcctacgaagctcatttatgtgctctgagatacatctattcaagcacataccaaggaaatgctcaytgtgcatttggaagtaggtgttggacagttggactgcagatgttaggtgtctgtgtctctccacaacataggcatcaaccccaatctgccttacgttggccgtgagcattggtagagtcagcctgacttggcggaagcacgtgtaggtggtcttgcctgttagcttcttactcccccttgctgtgccctttgaggagtttgcctcacgttataattctacatattaggctcagcacctgtttttctttctggatgcatctacagcttaggttcctttaggtgtgaaaagtatgtccccatataggataggttgggttataaaggtgtcatttcctattctttgctgcatcttgaacagctgaccatggtgtggtgtcctttgatagtgttgtttgacagacaaagggctatctggcgatatgcttggcattttcctggggaatgtaactttatggacgtctcaactgaggctgacatgtcacaagataytgagcatattttcaggcacttaggattggttttagaaataaacagatctgcttcttacagctacttcatctgttccagctccaaagacaacaggccctccctctgccctcccgtctgtgagcwccctgcccagcaccacctcctgcactgcacttctgccgtccacatcccagcacactggcgacctgactagcagccctctctctcagcttagcaggtatggggaaggtgtgggcccaaagtgagaagtaccttggggcaagtcctggagctcctgtagaaggttgctttcatgaacagagcacacttgttgtctctgacgtgatgtcctgggcttttgcattacgactgtagcttaggttttggccaggttgttccttaaaaccaccagatrtggaaaccttgcctgcttgtacckcctcygctggcacagagcactgggtcccctgggagtagggtgaggccagcagctccctcctacctgtcttcaccctccagagggtgcctgagcctagcctctctgggcatcgctgggcccatgtcactgaggtggaatgagaatgatggatttctgagcaggtgtctgacttgaactttccatggctgaagaaacgatgttattagaacaaggtgtaggaaaatgggtggcgttgctacctgtgtcttctgaggagtgttctccatcactctttagctaggagcaaaagtggatttgatgggaattggcatgtggagttgagcataggaactttgatccctcgttcacagattgaatgggattgtcaaggatgaccgtgttcttagtgcaactctgtcttcacttttcgcatctgaggagcaaatggatgtcgttgagggaagctggctctggagttttccagacctcatggcgagtcattcccgtccaccaggaccccatcactgggctctgtggggataaggaatgaggatgggtctgaagccggtcctgtgctagggactatgataagtttgaatctagctmactgacccacgtgsgtcttgttcatctggagtcacttgttcaggtggacatacggcgctctgttttgtcttctagttcgctctccagccaccagagcagcctctctgcacatgcagccctctcctcgagcacgtcacacacagtaagtgtctgcgcggcttcctcttcctccgccatgcttggggagcctggagcttagtcacatgcagctggggcttcagtctgatttttagtgtctgataatctagagttgcttggctgmaatgtcttgatggcatgatctggttcgagcttctgatttcctgggcaccatctggggacatcttgctttctaagtttgtagcgcctgggaagaatcattgcyccagaccttatctgtcattggcaggagtgtcaggtggtgaccttgctcccaggaatttgctgtttgatctttcctcgtgccttctttcctgactcagacgcagagattgcaagaaggtcaatgttggagaagggagtctagatggtggagggcaggagtggaagcaaacatgcactgccgagaagccaggcaggagggctggagtcggcgcgccagctttaattttcctcatatgccaaagagtagccctagattatggttattgaggtgtggctcagtgggtcgtggagccgtgagcatggctttcagtggtaggagtcagccagattgtggtgggttgcggagtgaatggtagtgagatggagaggagggaggaggattgtagagggcatgcaatgaaaacttaagagaggctggagcctctattgggaggatagaaaggtgcctggattaacaaaaagtgcatgctcctggacaacaggaggtgttgggcgaggttggagtaggcaggtccacaggctgggaggaaggattagggtgcagacgaatggaggaggcaggaaactgatgaacttggtgtcctctgaagaagacagcagctcaccagcagagtgaggtggtggaaaagggacatcctgtcctttcctctggatctggctaatgctgtggctttcatactctagtgttccaagtcaaaccttacacagaatcttttatcataaaacacacaaactgccactttcaaaggagagcatagtgtggacacctctgcctgtccctctgcccctgccctctgtggctcatgggagtggtgagctgacctcagcaggagtgccgtggagctgtcctctgtgtccgtgccactgctgcctgggagcccagtgctcctgcactcatggggagctgcactctccatctcctcaaaaaaaaacctccagaycatgtattccagcctgccacagccagaatcgtctcatccagtgggtcccatactttgtcagcatgacagaactgtgacattgctaatacagttgtccctccatatatgcaggggattcattccaggaccactgcatacaccaaaatctgcacattctcaagtcccacagttgcccctgtggaacccacctataggaaaagtcagccttccaaatatgggtgttttcaaattatgtatgcgtgcattgggttgaaaaagaaatctgcctgtaagtggacccatgcatttcaagcctgtgttgttcaggggtcaactgtttgttcataatatttcatctgaaaagttatggaaagatagacaatgaaaagtttttctgtctctcatctacttggctctacccttacattttctccatccttttaataaataaaagtcaaaacacgcagtgcatacaygtagtcatttccccattatcatccgctttttttttttttttttttttttgagatgcagtctcactctgtcgcctaggctggagtgcaatggcgcaatctcagctcactgcaacctccacttcccgggttcaagcgatcctcctgcctcagtctyctgagtagctggggttacaggcgcataccaccatgcccggataatttttgtatttttagtagagacgggatttcactatgttggtcagactggtctcaaactcctgacctcgtaatccacccgcctcggcctcccaaagtggtgggattacaggcgtgaaccaccgcgcccggccatcatctgccctttttattctttttctcttgttacataaatgagagtattttatgtacagtgtccttcaacttttttttccccacttgtgtatccccacaagtgtatcttgatgtttccatgttgaaacttaagggttttttgttgttgttgttgttgtttccccacagttctgctttatgatgttatttaaggttatttaagcagccgtccatttagggtcgttttcagtcttgataccacagagaatgttgcatttgataacctacatatgttgtttcatgtgtatagctgtatgtagcgggtcagtacgtgatgtggaacagcaaggcatttatgattttatacacatttgcagattgccccgcatagtgattcaaccctgtttacctcccactggcggtgaatgaaatatcctattacaccatgrcatcctcaaaatggtgttattaaacatttgtatttccttaatatgttagcagaaaaatggcccatcagtctagtttttaatgaggttgtacatccttttttttatatatttgaaaaccatttgatttcctttatgtgagtttttaatttttattttatttatttatttcttattatttttctgagacrgagttttactcttgtggcctaggctggagtgcaatggcatgatctcagcttagtgcaacctccacctcccaggttcaagcagttctcctgcctcagcctccctagtagctgggattacaggcacacgccaccaggcccagctaatatttttattattttaatagaggcagggtttcactgtgttgaccaggctggtctcaaactcctgatctcaggtgatccacctgcctcggcctcccaaagtgctgggattacaggcgtgagccaccgtgcccggcctatgtgagctatttatattcttggttccttttkttgtcaggtctttggtctctatttctatattagggagcccttggtgatgggaagtacaggtatttttccctaagtttgctgtttatgatttttttttacatagatctgtgtattttcttccattttcttgtagttatatctttaccactctccatcaatacataaaggaaatctyagcatcttctcctgcctttacttctctgggcctgtcctggggagttgactgcatagggcccattggatggactgagcgaagccttgaaaattagtgttgactttttaattcagcaggttgatgtactcccagttctggaagatgagggccagagacaggaaccctgtcaggcagctaagggagaagagacttgccagatgactcttgagtccctttcagcaagtcaggacctagttccctagtgagcatctcttagcgatggagaatgttcatttttccttccgagattaaaaggttgtatatrtccaagtacacttgcgagcactggtcagagctgctccagatttctgtggcagttggtggggagtctgcctccttagtgagaacctagttggtgggcaggccagtgcatcctttggcccgctcctggtggggctctctccggcctggtcctgcccatctgtgctgaaggaacaagacgccttggagycccaggaaaccatgtttttggctgtctttaccttggtgaatctgttctggatgttagctctgtaaagccagtgcccaggcgggtagtgacctgtgggcatgggatggcggcggagagttagtctgcgcaggcaggttgggtccttctcctgggcccttcccgttctttggcttttcttctacgagtttatatgctgctttctatgtcctggtttggagactggtctccctcttacagagcttttcttcccttttttgagacttgccttgtccacctaggtgtgccccccacctacctgctcggagcttgaagttcttcataggaccctgttgctagggttgggcagctaggcagggcttctgggactcggggctgatggagcatccgctggttcactctttcttcacaggggtaccttgtcaaacaggcataagtggcaggccatgcccttttaggtgggcactggtgaggcattggtggactgaaaggtgtcaccaggttttggagcaaaggcctctctcagcctcctgtttccagaccacagtggctgagaatcccaatagaagggaaatctccaaaagattgagacttacrctgggcttcctgtggcctgtgctcgcctcttctcagactgtttgctttgctctgaggtaggtacttgtcccatattcagatagtctgtgttcatttatgatccgaagttatcttgggatttctatgccctcattttggatgccaagcatgagcaacttgaaggatttttacagagagttgtggtcattaaagcttaatgttartagttttgatgttcagtttatgtattgtatcctgatggctggaaccagctgctatgtgaggggccgcagtgagcactgagcacagagcctctcaccttaagggagcctgggtggttacatcattgcctgcctgctcagccktgagacttgggcccaagcgccaggccaggctctccccagcaccctcctcctctgcctccagatccatgtgtcctggcttttcttttgccagcatgccagtgtggagagcgcctcttcccaccagtcctcagccaccttctccacggcagcgacctccgtctcaagttccgcatcctcaggcgycagcctgtccagtagcatsaacaccgcgaacagcctctgtctgggtgggacccccgcgagtgcatccagcagcagtagcagggccgcgcccttggtgacctcaggtatttgctccagaggcctttcctgcccacccctgagcccctcaaaggtgcctgcttggcgtcccaggaaggcagtgcaggtgtcaggagagtctcaggcccgccgagtgcgctgcgtgttccactgaccttgaggcccaatctccccacccctgatggggatgaattcttccttgcaggattcctggcctctgcgtgcttctagcttttcagtctttcctctttgttctttcctggagccgagttgacattgtgacttggaggggccagggatgacttatggtgggctccacgactgcagacctaggctgtctgtaggcccagcagactatgatttgatggtcgctgctaaaaccgacttcgaactcagcctgtccctctcctggcactgcatggcttccttgccctctttggaggaggcagattctttttatatttctctttgctcagtgcagtgggaccttagggaytgggggaaaggggctgcttttgtctgggcccggaactctctgacgttgaaacaacctcagtgtggtggccgggctttctgtctccccttcactgctttgtagaatgaccctctgcctcattcggccactgcccttctttgaacccatctggggtagctcagtgactgtgcctcctcctgaagcagctgaggactctcactctttgtggtgaccatttcactccatttgatttttccctctatacaggcaaagcacccccaaacttacctcarggggtgcctcccctgctgcacaaccagtacctcgtaggtcccggaggactgcttcctgcctacccggtgagtgtatggcggaactcctggcctgcccagctcccctggcctcgggggctggcacctggcaggaacctggcgttgggcccaggttgcccaccttgagctgcccttccatccctgagcacccccgtctctgccccactgagccctggtggtcttcttccatctagactccgtgaaggcaggatctgttcccgtaacagctaatccagatcccattccygggtgtgttagagccccccaaccttgttttgactcctagatggacctgggcttcccagggtgtggtatgtggttyctaaaatacactttctggttctcrcacagatctatggctatgacgagctccagatgctgcagtcacggctgccagtggtgagtggggtatggactggtcggagcagagggttcagaatcttttacatgtcccccctcttatggtcttggctgccacactctctggcccttaggatcctctgcctgaggaacctctmagcaccactactgagaaagctgttttcatctggcggttgtgccaggygtgaccatagctttagcacagagtatccagtgctcatycctgggaaacatgaaggcctttgggacctggggccctggtaggccatgtcccctgttaaatgttggtccttatcttccctcctccatcttgttttctctctcttttttaaaaagaaaaaccatatgacacaagacatggaggttgcytacgtggccctggagttttatactgtcttcctcttcctcagagtaccatatagtgtctttggtctgagatggccagtgactgctcttctgcaatcagctgagtgagtggcttgagctgatggtctttaaggtctcttctgggtctggcctcccatctagatttgtgagaatgcctgccctgggacgtccctggtggttgcagccttactctgagaccagggttgcctctttcttctgaccgttggtgccagaatgcagtgtgggcctttcctgggatagccacatgaacagaactgtggggacagaggggaataggcccgctccttgccctgcccatgggcaggacttcctcctgggagccactgtcttcttgctctgccatttcccagggcacttgtcagagagttgcaggcagtttggacaccacctctgctggatacagtctttcctgttgctggaggaagaggctttctcccttgtgcagtgatgccttcttycccgtgggtgttgctcccttctctgctgcaccacaaagagctgacggagctgctcttgtttcagaagagtagccctttccactggctggccgtatttccagaagcagaggcctagcctgggagcggagcggcttctccccactgtgcaaaccagcagccctttaatctgccggccaaaggcccaaactgcaggaggtggtgctgagccccgggattcattctgcttcaggggctctccgtggtctccacacttattcacagcactcttttggcttttatcactttgtgccttagagaaaacaccctctggagcccaccttttgagatatgttgctctttctatccctcgggttgtttgttcacctctgctgcttgtgagcctagttcctgcctggagawttctcgtgttctgtgaaagtgctcccccttctgggctttctctgctcccgtcctcmgttgtgcagctctgtgtgttcccagctctgcctcttccgggggttctaggctgctatgggtttccgggaggtttcctggagggtgtgagtgccattcccagmcaggatggctcctttctgggatcgggcacagcccaagggctttgcctttcctcaggggccaggtgtgtccaggagtgcgaggccctggatggtgagtgagggtcaggtcagacctcccctcctccacgaagctccactgtgctttgccgtctctgtctccacactttgttgtatctgccatacttcccccaagtcctgggccaggggtgtccaatgttttggcttccttgggccacattgaaagaataattgtcttgggccacacataaaatacactaacattaaagatagctgatgagcttaaaaaaattgcaaacaaatttcatgttttaagaaagacgaatttgtgttgggccacattcaaagctgtcatgggccgtgggttggacaagcttgtcctaggccatgtcagtgttttgagagcagtgtaggtggtgacaggccagttctgggcttcacctggggtcctgcttattcccgtgcctacctggcactgccccctgtccccccttaaacctttcaggcccctgcacttctgttgcctcctttttcaggtctgctctgtttagtcagctttcctagctgctctagtctctcacacagaaaagccagcgaagttggttcagcccgaggcattcacacaagcacctgcctgtggtgtcaaatggatgtgtgaggcttggtctccagcagctctgcctggtgaagctgcagggttggccggtctgtgtgcttatgtgttaggcaggccgcctagttgcacactcttccgaggggcaccatttacttggcgttccctgggactgctggctctcaggcatggagtctgtttcaggagtgtggcgtcaccacttccatgtgctggttctgctctcctgggagtcaagcagggccagtygctgatcaagcctccctggtctctcctaggactactatggaattccctttgctgcacccacagcgcttgccagccgagatgggagcctagctaataatccatatccaggtgagtttgctcaatggatgaggagtagcccggggccggcctagcgcgaactccaggagctgggaagcagcaacagcaagctgagagaggcctcttagtagcctgtgctgagctggcagccagacctgttcctgtttgcagaagccagtgtggcctttctctggttggaggaagggcagtggctggagtcagtgctctttcctaggtgatgtcacaaagtttggccgtggggactctgcatcccctgcacccgctaccacaccagctcagccacagcagagccaatcacagacccaccacacagcccagcagcccttcgtgaatcctgcactgccacctggctatagctacactggtcttccctactacacaggcatgcccagtgccttccagtatggscccaccatgtttgtgagtatttcagagggtgtgactgtgtctcctggccttgggttgctggcaggtggaaacctgggacctatcttccagcagggagggagggttgtgattccactccgtcttacctggtcttcagaaactgttcaggctggggacaaggtcacttttcccctgctgtgtttagatccagcatgtgttgcactaatgaaaacacaggtcccctgtggttgtgggtatgtcacctgctgccttaggctctggcaggggtacctgrccagcctcagcttgcctcttcctacactaatacctcatctgcttgyccccccaggtccctccagcctcagccaagcaacatggggtgaacctcagcactcccacacctcccttccagcaggccagtggttatggccagcacggctacagtacaggtgaggggtacttcccagacagagacacatggggttagacaggcttgcctggctcacacttgcctcttgtaccctgccaygctaggttatgacgayctgacccaggggacagcagcaggagactactccaaaggtggctatgctggatcatcrcaggcaccaaacaagtctgcaggttctgggcctggcaaaggtagtgtttacctctcctttccaggataaggcctggagtggtgggctcctgcctgatcccctctcaggcagggcaacccctgagtgatcctggaggtggggagcctggagctgggaacaactgctgtggggaacaactgcttttcctcctaggagtatcagtgtcttcaagcaccactggtctacctgatatgactggttctgtctacaataagacacaggtgagggacaaaggtgggttgggtgtataggtttttgagaggttacagcccaacctgaccttcaccattgtcttctttgccctgtagacttttgacaagcagggatttcatgcagggacgcctccacctttcagcctgccctcggtcttgggctccacygggcccctggcctcgggagcggcccctggctatgcacccccaccattcctacacatcttgccagcccaccagcagccccactcacagctgctgcaccaccaccttccgcaggatgcacaggtgagtacagtgatggaggcagccaccctaytctgggccaggggttctgctccagcctygacagccttcccttctcctcttcctcagagtggctcgggtcagcgcagccagcccagctccctgcagcccaagtctcaagcctccaaacctgcctacggcaactctccatactggacaaactaaacccagaagagaggggtgggctggggcaaggcttatcctgggcaggagagaacacacgagcacgtatttgggagcccagtgccctttcctagaattcccgacatgtgtcagccatgcctctgtggggagtctgcctcccagactggctactgtatgtaatgtatttatgtatgtatttgtaaatgtgatagaagtctgggggggagttgggggatggcggcagatgttagccaggtctgccctccccattcaagccccttctccactgtagcaaaataagcacccccaccccatctgccttcaggtcttcttcacagcctgcactgcccagtgggccactaggggcagtctctggaagggctggttcaaggctgtttgggtataggggtcaggtaccaatgaagaatcacgacttgtctcactcctttggaaattgttttctttcctgtgtaattacttcatacctctgtttttgagaaactgttccgtttgtcatctgtcatggtctccttccaccaaatcttsatctgggaatagcagcggtatccctccacccaagtatggccacytgtttgtcttcatrtagaacaggggcttctggtctggtcatgtccctagagacttactagagactggctgaccatgaaaaaaaaaaaaataatctgagttattcagccagtcagctcccctttaaaaatctaaggtatctccaagcaacacatctccattctagttgtcttgaaccacgtgggcaactgtttcaggggttttctcttgcccaatccccacctaataaagttctgagagcatgcatggtctctgtgtggtgtgactgaagggcagctcagggcagaagccctggacttcacagggctaaaggagatcccacatggtcatagtcttctgacacaggctataaaggcttgaaatggttttcctttttactggaccctcttggcccaaatcacaatggctgtaaggacagctaaacctccttacagggcccaggccatgttgatcaaagttaacctggcttttcttatagctccttaagagacttagggatagggcagtgtcccacagagccctgtccactggataccagggcagggtaatttcttttccaaatctcagtggacttttacaatctgaagcaaagccaagaactgagagcagggttctaggccttaagggagagtatgaacaggtatacctgtcttttgcttgtcatcaactgaacataatcttgattggcagtcaaaagctatggtagaacacgtgactagtgagggtgtcatgaggtaggctggtggatccggggctacatatctgctccagaaaagcccaaccaaccattcaccttgtgtcaggtcagaagccagggagtaaccaagggccataggaaggaggcagatctcctgttggccaaccacaactgtgctccaatccagcaggcaggaagctcagggcctagaagtgttgcccaaggtgctacagcctctcttttcactcctaaatcgctgcttcagatcaggttaaaggaggaaataaaatggctagtcaggtgattgattgattgattgtgtcagaaccagcctggggtcacaatctactttttctgcttttggcctctacaattgagagcgatggtcctgtcatcagatgggaccgatactcctattaacccacagcttgggaccttacctagaaaaaaggtaagtgtctacaggtaaaattaggacttttattaaatagggtgatctgcctgatccctgctattagcagcagtaagttaggaaaacaaatgacagtgaaaatgtttgcctaaggaaagcagcagagcacccctcaatccttcactgacctacttgtatcagctcccgttttcagaatcaagtttaacaaatggctacgtctataaggagcttgaagggactggggatacaccagggaggtgagttagttagaaaggcagattccccagttttggtttttgtctaatttttcagctgagccccagcgtaatctgcaaacttaacagtgataatgagaccaccttttagttttctttaacacaaggtaaaaaaagaagagggtcatttcatggggaagtagcaatacaggtattttatttcacattttattagtagacagatgggcagaaaaagacaaaataaaccactaaaggggaagtcaacacaaaatccgtcagataatcttttctcataagttaaactgaagcaaaacatctacaatttcagctaaaactattaaagtcaggtgtgtcctgctggtttcagaatagttgaaaattgcatctgaatccttttagttgtaaatgtaaaccttgtttgttttatcaggatgggaggggtggagagttcctttccagtggagagctgcacatttccccttccaatcagtttcttacaacatgtgccccaaacgtaaggaaaccagcaagtaaagaagcaatttgccagggtaagggaaagaaggttctacaaaaaagtttgactaatagaaaataactctggaatgattgataaaaggagaaggggggaagactgaaagaatcaacagcagaatcatatacttctccacccagcctcaaaatacacagaactgaagagcatctagtgaggcctcaattagaactaaaaggaatctaaaaatgcaggattttgagttcatgtcacatcaaataataagcaaaactgtacgtacatggttccggattgagcctgagacctccactcccagaagggggaaaaaaaattacaaactcaagtattttccacagggatgtgttctcagggacagagctctggaaccagcctctgggtttcgttcagtcagtctaaaataccagaatgtccacctgctagcaagagacttacccagtcttctggaactgattgtactcatcagaggcaaacccagcccttgacacttttaacaccccaaagggctgaaaggtacaacctccacttggcgctccggctccctgagtcaatgtctaacagaggccaatagggcctgatggaacagctgtgcagcagagcacctcccgcaatgccagggtgctggggctgccctgggagtgagatgctttagcaaaggggaatgaaaggcttaattttagggctccaagagaataagaccaagctactggctgtaaacttgcatgggggtttgggggcattttgggggaggtaaatcagcactgtgagaggctttggctccacaagatttgcaggttaatctggaagcattacttacaaagtatggggagtaaaaaggtagttccaacatctatgagagtttgtaatcaggtaacttgacaatgtattacgaagctgctctgttccatggatctgactaaaatcactagattctgggtgcaagtagcaaccctggccctgtggagatcacagattctgggaccaggctcaacagtgtcccctaagagccttgcttgttaaacagtcccatttcataccagaccaaactttagaggctgggaagggctgctgggaccaaactttagaggccgggaagggctgctgggaagaagtcatgtgtttgggagtttgaagagtgaaaaccctgagatcagaatggaaggaggagctaaggaagtaagcgtcacctactctggccatcctaggatccctcctgccccgtccctaatctgccctttggttctttctgagttacgagccaaaggaggagttgacactagtgcccaggggtctgaaataggactacagtcagtccttgctgcattttccttctgaaatctgattttacattatagcggtttcctccaaataatgccctcctatgatctggtgcacccccataacaaccaaaaattaccttcaagttctgaagtctcctggatggtgaaggctgctggatctcaatattgattgaagcaacacgattgagatctggaaaatcaaagctgcagcaagtgcattgcaggaagatctagccttatctggcctaaaaactgcctgcagtcaactccctcagccctgccacaatttctatgcataattctgcttgcactccacagcctaagtatgttgaaaggagaaaaaaagttcagatcacatccaatgaagaaggcggtaactcgtctcacacacatccaagtttttcactatcagtataagcagctcgatgaaaaccgaaatcttaacacatgcacctaggattaatactgagtaattaaaagtggctacttaaaaaacaaaaacaaaacgtcatggtacgagtgtatttttgatgggaaggccatgctaaatctataaaacagatgtttcctctcccaacagtggtcaccagtagtttcaactttttccccccagtagcatcaaccaaacttagcatagtgatttttaactctttgctcccacacgcactcatcccaacttccccgcttgccccactccctggggggaaataaccctgcctttaaaataaatagcaaccaagtgctcagttctatggaaagtatgaatatttatttcaggctttcgatcccaatcgatttcaaaaaacaaagtctgatttctctcctcagagcagctgaggcctccatgttacgatggtttcatggagattgaaggagcacatttcatcaggcttagcacaaagtccctgatgcccaccatgtcccagccttaggaaaggaaagaaacagaattcaccaccatggggctgaacgaatgcacacacactaatgtaaatgagcagctaaaccttggcaaatttgtttttttttttttttaaagtttgttttgtgggtttttttccattttcttttgctacccagtatatgcagcacttgtgaactcccaacaggttcccagctttaaacacattaaacatcttgaaagactattgaattcttcaagaatctaaaaacagaccaaacgtgttttgctgtgaacattctgtagagacgaagtgaggcgggagtttgggttcatgttttttaaaaaaagaatcaatatagtgatggaagggtaaagaatgcaagaattcagacattctgtggagggttactctctctccattaaaggtccataaaaaggagcaaactgagatccataaggggagtcagcaggagctgtgtgtgtttccccacccgctgtgaataggtttttgctgaggggccatggccaggtccccacttgctcccctccctttggcctgagatggcagggcagtacaggggcactgaaggagcacgtcacgactcctcattcccagaatcatcatcatcataacagtcggcatcttcctcctcctcatcttcatcatcaatgtcgtcatcatacaagtcgtcgtaaagcaaatctgagctgttgtcattggaaggcactttagttttgatgcagtattccgccagggttgtggggaccttcactccatccttttctgcttcggccttagtggctgaaacttgtttcctgaagggaggttgacacagaaatggtttacggtaagtctttttttaagacagatttataattggccttaaataatcaatattacttatgactcagctctccaaacttcagtacctgcctgaaagcatctgacagataccctgtactacaccaaatgctttcaacccactgggtacaattttgaagtaaactttgactttttaggaggggaaatacactgttaatatcaagggagtttaaagcagtggatcaattatagccagaatcacctcgtcaactggctgtcctccgattcatgtaagggccaataggtcggcgacttaagaatcagaacaggtattgacttagtgggcggaatgtcatgctttgttgtttgcatgtgtgaagcacagggataactgccagaataagaatagataatagaagggctaatacgcctcctagtttcttggggctagatcataaaggttgcatatgtgaataaaacgtcccactctggtttaatgtggggtggggtgcttaggggattggctagggttttggcctagtcacctcaccaccaaactcaagtgccccaacaattcttaatttaattatcctcttaattttcactgacagtaaaattcaaatgcctatgccagattccagtgtcttgcacgacccactcttccccacccaagacggagtcttgctctgtcacccaggctggagtgcagcggcgtgatctcggcccactgcaacctccatctcccaggttcaagcaattctcctgcctcagcctcccaagtagctgagattacaggctcccgccaccccaccgggctaaattttgtatttttagtagagatggggtttcaccatgttggccaggctggtctcgaactcctggcctcatgatctgcccacctcggcttcccaaagtgttgggattacaggcatgagccactgcacccggccacatgacccactcttgtattttctccagcccttcaacacattcaccctggtctttttttggcatctcggacacaccttgttgatttttctgtctggaccagttgctcttcccctgccccacacatgcctggctccttcctgtcactcagaatcaaggcctcagatattaaggcttaaatatcaccttagagaaggcctggcctgacaacccaatttaaagcagccatctagtcattctttcacattatcctacttagcactatctagtattttttgcttgctcactcttctgtctccacatatttgaatgtgagcgtaaatgtctttcttagtcccatttccccagtcagtgcctagcacatagcctggcaca

SEQ ID NO: 96703 - DNA, 19010 bp, Homo sapiens
gctcacgcctataattccagcactttgggaggccgaagcagacagatcacctgaggtcaggagttcaagaacagcctgaccaatatggagaaaccccgtctttactaaaaatacaaaattagccaggtgtggtggcacacacctgtaatcccagctactcgggaggctgaggcaagagaattacttgaacccaggaggcggaggttgtggtgagccgagatcacgccattgtactccagcctcggcaacaagagcgaaacactgtctcaaaaaaaaaaaaaaaaacccatcaaagactccctggtttagtagtgcctctctaagagagcagggaaacacccctgcctgcctgtgtcccccccaaagcatcacttctccacattacaagcacacacaaagtggtaagtctaagtaggaatttatttacacggacactcaatcatagataaggcgctgtctaggatccacatgcgttccctggagctacttggcatcaggcttcttgtctccggcttcaagcttgagactctccgggggttggcgatagactgggaaagcctcccaggggctgttcaggtcaaatttgcggaactcttgggccaactccaccggctctgccaccacccgcttcacttcatcatcataacgtaactgcaggagcaaaaggcaggcttgagcactaaggaagtccttattatagctacacaggagcctacttttcacaaggctattggtgacttccccagcccattcctctcggttactgactcctgtcccagcctctgtcagtaagtctccatccatacctgtgttacccgtcagatcacatcccaaccagctagagtgtgtgattccaaaatgtaggatacctctcatgccctgccagcaccagtcagattcccctgctcaccactcccacatcaggagctccgaactgactgctcacccacccacacactcttacaaggtaatggtaagcatttgcccaggattagggagtagtcggtggctgaaaagagtaaacctaaactggcagatacacaacctcaggcccggtgcccttggcatattcacagtccagatctaaagcagtacatttgacacagcttttcttgttacttggggatcaaatggataaggtaaggatcatcaggtgctagagtgaagaggcaaaccaggtgaggcagatagcaggagtggggtgaaagggagaagcgagggagatagccctgcccagaagtagcccaagagggaaataggagcatgcaaagcactaacacagcaggagtgactgggaactaaaagagcagggctggagcaccacatctctgcatttctaaacagttactttgctataaaattcacgagtgataatattacacactatcttcctgcaaataacctgcagcaccactgaaattctttattcacgttactggtcccacctcagaggtaatttttgagggctaagcatctggtgtcttccccgtcactgccttcccagagagtcagggcagggtaaaataatcctctactttcaggttttagggacagactgtgtcgtcaaggctgccttgatcattaaaatgatcattacaataatggataacactggccaggtgtggtggctcacacctgtaatcccagcacttttgagaagctgaggcgggcagatgacttgagcccaggaattcgagaccagtttgggcaacatggagaaaccccgtctctacaaaaaatacaaaaatttgctgggcatgttggtgcatgcctgtagtcccagctactcggagggctgagaggtgggaggattacttgagcctgggcggtcaagactgcagtgagccatgatcgcaccactgcactccatcctaggtaacaagagtgagaccctgacacacacacacacacacagcatcaattgagcctttacaatacagcaggcttcatacatcatttatttatttagagacagggtctcactctgttgcccaggctggagagcagtggcgtgatctcggctcactgcaacctccgccttctaggctcaagcgatcctcccacctcagcctcttgagcagccaggaccacaggaatgcaccaccatgccccgttaatttttctatttttttgtagagaagaggtttcaccatgttgcctaggctgttctcgaactcctggactcaagcactcctcctgtcttggcttcccaaagtgctgggattacaggcgtgagcctacacatacattatttaatgccagccacaaatctattaaagtgctattattattgccattttaagatgagaaaactgagttacagtcaaaccaagtaacttgccccaggttacaaaaatgaagctaggatctgaatccagggcccatgctcttaaaccaccacaatccacagaccgtatttcttgccattcccagggatcccctgggttctctgcaagtccctccctgaggctgctgtcccagttccaaggctcctacctcaacatagccagatagaggaaagtctttccggaaaggatgtccctcgaagccataatctgtcaggatccttcttagatcagggtggttagcaaagaagactccaaacatgtcccagatctaggaaagagaccacctcaaacagccaatccatcaagactaacaacagggggaaggggctacactgcatcccgtagtctgaaccagttctgcaactgtggcccagaggcaggtccaccatatccggtaactcacctccctttcataccagttggctgccttgaacacagagacagcagactcaatgggcgtcagctcatctgtgtaggtcttcacacggatccgtgagttgaagcgcagagacaacaggttgtagacaatctagggagaacagaaggatctggagggctgagatgggagtccctgattgggagagttctgccctgtgaccctgccttctattctgaacctcaaaacctcaagattctcctatgcttacaactacttccaaaggcccaggccacagctgtagcttagcatgtcagcatgcctgtgtttgctcatgctattcactttgtcaggaatatttccctggtccatctcacaaggctacctggtctcctactcatattttagattcagcacaaacattctctcttttcaaagaagcctcccagacagggccaagtgcccctcctgctttcttaaagcatccctctaatatcctttgtattatatgttactacagtaagctgtttaggtgtctttctccttcactagagtgtaggggactcctggaggacaaatacttcatgttatttctctctccatcccagagtctggcaaacagtagataatcagtaaaatattaatagctaaatgtattgaaaacactgtgtgcaagcaatttacttgaactatctcattggatccttacaaccattctataagataaggacagctttatatttattttcccggtaagaaaatgaaagctcagaaagattaaacaagggccgggcatggtggctcatgcctgtaatcccagcactttgggaggccaaggcaggcagatcacgaggtcaggaaattgagaccatcctggccaacatggtgaaacccagtcttcactaaaaaaatacaaaaaattagccgggcgtggtggcatgcacctgtagtcccagctactcaaggggctgaggcaggggaatcgcttgaacctgggagacggaggttgcagtgagccaagatcatgccactgcactccagcctggcgacagagcaagattccgtctaaaaaaaaaaaaaattaaacaaaatatttgagttatctgaggtcccacagccatttagtggcagaaccaagatccaacttcagatctacttgactctgaagttccagtttaactgctgtgttctattgtatgttacaaactgaaattaatatccttacccccaaaaccttctcagatctcccaactgacctcaaaacggttttgccgagttgggacgtccactgctgtcaagtcaaccagagatttgaactgtgcattggtgtgatccctgaggaaagtcagcactgggatgacgccatcaggatggatacagacctctaactcattgaagcaggacacctgcacacatgaaagtgaggggagagggaacaaagagctactgagggaacagctaacttcagctggagtcacctggtttaatgctgagagaaaagtccaagcttgggatggaggaatctgtagtttctttgaaacaagtctgcccactcccacatgccctgcgaacatggttctttcttgacccagacccaaataacattagtaagtattacctgaacttgttggacatacttgggcaagatttcagccacatactctccaaaagctgagagctgcttgtgggccacatcattccgtggtctgacagtggctggaaggaaaaggcatatttaaaaaagaaatggagaaggcaaaagccagccctgcatgcagtctcttaggcttgtaagggatgtcaaatccaggaaagactccctgaagcaccttgagaaaggtgcatgtgaaaggtttcccttctagggaatacagtgatgaaaacttggggaaagtgccaccttaactacacggtcctcagaaagactcttactatagcagctggggtgttcacctcttctcaaaattactccacagttcttccctcacattgcctgcatttctgctaaagcagtagtctcagttctcctgtcagactaagagctgtttgaggatgggaactgaacttttgcctctctgtagctccttagcacgcaagtttataccaggttctcaagctaagaacttaagggcttgaagatccctcacagactctctctctccttaaaagtgtgtgtgtgtgtgtgtgtgtgtcaatgagaaaactgaggcccaggtgtgtgtgtgtgtgtgtgtgtgtgtgtgtgtgtgtgttcaatgagaaaacccaggaaaggagaaatgccaggtctcctaactcccagtccgtgtatcttgactgtaacataatatgtacatactcattcatgcaaccctaaaccactgagcaatcacacatcacaagctacagaataatggttaggtgtttctgcctctggcagcaggcaggcctactttgtcattcactaggtctttgaccctgggcagtttaattctttggactgtttcctgatctatagtaagaagagtaagatgctatctaccccataaggctgttgtgaggacgaaataagatcattcactaaaacgcttagcgaggttccaggcacacattaagcactcaattaacgctaggtactattattacagggctctgaggcctaaaggttatattgcttgctttcaaagagctgacagtttaatcagacaaaaaggggatgattgaaatggacaaggaacaatcagggccataacaggcctaagggcacagggagggctcgattctgcatgcagggtgaagaccactgcaagtcagatctccaagatttgccaggaggacgtagggaagggcatcctagggcaaggacaggcatctaaggggccccgccgatagttcagagaagagcgctgcccgcacatactcacggcgcgtgtcggccccggcgctctcccgcctcaccggcagcaacagaacggagggtcgcccagtccctgcacagggagataaaaggcacagacgcgcgggatgagccctgaggagctctctgcactgggcacgccgctgcgcctgaccccggtctcagctggctgcccgtgctcacccctggtcagcgccgaggcccccaagatcccgcgccaccacagcctggctaccgccgccgccgccatgttactcagatgcagactaggcagcggacggaaagacagcaggacacggagccccaagggcacggaccggaaacggaagtgtgcagcagatcttcttccgggcggacgtggagccggaagcggaggttccgggctccgggatgaaaggagggaacgcaggtgagaaagcgagacaggcaggtagggaaatcgtgaggtgagcgtgrtcctagctccttgtggcagagcctagagagaaggcgaggacgctgaagaaccaggcgggtgagaggaggggagggggcgggcgttctgggttctacgctacacacccctcccccgctctctgagccaagcttttgacgagggcgggcgggcctgagcgggaagaacggtttccctggcgaccgtttccaagacgactcaaggtggagcggggacattgcacagggtgatgggcctcccagtgccccggcctgggggcggatggaytcaagttctgggacgcagccatagggagtctttcgagcgagcggggaagtgtgggggaagcagctcagaagasagcaaatgtaagacccacggatatcccaggctaggcttcatatggagcgtcttaactccatgcgctgggaaggagaggacctggccactaggccggggccaggggtcctttttgtctgattctactgcccctgagcttcactagttttatgccccagttatttggttagtaaggcttttacgatcacaggcctctcccagccctttgctttcatatattgacctaaatcccaagtcttttgttaacattatggaaaggaattattccgtgttttctcaggaaaacacccagagttggaacttttatttatatcattagcggaggggcgccactggggataacgaacccagatttggttaaaggatagcgtcagggacatcatggayagggccaggactaaggccaatctggacccactttgctctcacttcttccttttccctccctgagttggacagttggattcacagactatggctgtgaattcctcaggttactcaagatggtgttgctttgcagacagctggcagagagagaagttggctagcatggaatcaccagaggagcctggagcatccatggatgagaactactttgtgaactacactttcaaagatcggtcacattcaggccgtgtggctcaaggcatcatgaaactgtgtctagaggaggagctctttgctgatgtcaccatttcggtggaaggccgggagtttcagctccatcggctggtcctctcagctcagagctgcttcttccgatccatgttcacttccaacctgaaggaggcccacaaccgggtgattgtgctgcaggatgtcagcgagtctgttttccagctcctggttgattatatctaccatgggactgtgaaacttcgagctgaggagttgcaggaaatttatgaggtgtcagacatgtatcagctgacatctctctttgaggaatgctctcggtttttggcccgcacagtgcaagtgggaaactgccttcaggtgatgtggctggcagatcggcacagtgatcctgagctctatacggctgccaagcactgtgccaagacccacctggcccagctgcagaatacagaggaatttctccacttgccccaccgcttactcacagatatcatctcgggtaagtttagggaggggacacaccatacccagttacttggctatgatgttcagtgaatgttctagtttaggagaaaagaaccctcaagcttcctggtgttagtttacattattattcctgcattcttactgagataacctgctgagaaagattgaggtgagattcagtgtaattgctgtcagagacacagtgcgttagaggaagaagtcaggaaaattaaagcacaacatttaaccacacagagtagtgaggagtgatttgtattatactctaatttatcctgtacttcgtatgtcccagtgggtctaattacctatgtaaattggtgatggggcaagatatctaagactaaaaacttttttagtgatgggccaacgttaggaaacaatcctaaccttgcaagtgagatatagccatacttaaggtgtgaggttggccaggcatggtggctcacacctgtaatcccaacactttgggaggccgaggtgggtggatcacctgaggtcaggagttcaagaccaccctggccaacatggcgaaatcccgtctccacaaaaaatacaaaaattagctgggcatggtggcttgcacctgtagtctcagctacttgggaaggctgaggcaggagaatcacttgaacccggaggcagaggttgcagtgagccaagatcacgccaccgcactccagcctgggcgacagagcaagattccatctcaaaaaaaaaaaaaaaaatggtgtgagctctgtagcttagtaggttgcttccatggcacatgggaaaatatcgagtcatccattttgattttaaaaaagcaaggcacatactctggtttctcttcagattgtataaatcttttaccttttactaaagatttccatggagaggaacggttatgagtctttacccaactttttgagggctcatgtaacacatgagactatctttaaaaaagagcaaggtacgggccaggcgcagtggctcacgcctgtaatcccagcactttgggaggccgaggtgggcagatcacgaggtcagatcaaggccatcctggctaacatggtgaaagtacaaaaaattacctgggcatggtggcaggcgcctgtagacccagctactcgggaggctgaggcaggagaatggcgtgaacccgggaggtggagcttgcagtgagccgagatcacgccactgcactccagcctgggcaacagtgcaagactccatctcaaaaaaaaaaaaaaaaaaaaaaaaagcaagacccgccaggcatggtggctcatgcctgtaatcccagcactttgggaggccaaggagggaggatcccttgatggcaggagtttgagaccagcctggacaacagtcagaccttgtctatacagaaaataagaaaattagccaggcgtggtggtgcacacctgtagtcccagctacttgggaggctgaaacaggattgcttgagcccaggaggttgaggctatggtgatggtgattgcgccattgcacttctgcctgagcgacagggtgagaccctgcctcaaaaaaaaaaaaaaaaagcaattttaggttaatttcatgtatatgtgtatgtatgcatgtacacatatacacatgcccagcagtagtctaataaagtggttcacatctttaaagtcccttactctgaatttctctttcggattgtcattgaccatgcctttcctctggctctcacagatggagttccgtgttctcagaacccaacagaggcaatagaagcctggatcaactttaataaagaggaaagagaggcttttgcagagtcactcaggacaagcttgaaggtaaggcaaatctcttaattgttgagactgcatactctccatgcattcttgccatcagttaatttggcctctttttttttttttttgagatggagtcttgctctgtcgtccaggctggagtgcagtggcgcaatctcggctcactgcaagctccgcctcccgggttcacaccattctcctgcctcagcctccctagtagctgggactacaggtgcccaccaccacgcccggctaatttttgtatttttagtagagacagggtttcatcgtgttagccaggatgctctcgatctcctgacctcgtgatccgcccgcctccgcctcccaaagtgctgggattacaggcatgagcccccgcgcccggcctttttttttttttttttaagacggattctcactttgttgcccaggctggaatgcagtggtgcaatctcagctcgctgcaacctccacttcccagtttcaggctattttcctgccttagcctcccaagtaggtgggattacaggtgctgccaccacgcctaatttttgtatttttagtagagatggggtttcaccatgttggccaggctggtctggaactcctgatctcagatagtctgcctgcctctgcctcccaaaatgctgggattacaggtgtgagccactgtgcctggcctaacctggcctctttgtgtgtctgtgtgtgagagagagagatggagtttcgctcttgttgcccaggctagagagagagagatggagtttcgctcttgttgcccaggctagagtgcgatggtgcgatctcggctcactgcaacctctacctcctgggttcaagcgatttttctgcctcagcctcccgagtagctgagatttcaggcgcccacgaccacgcccagataattgttgtatttttagtagagatgggtttcaccatgttggccaaactggtctcgaactcctgacctcaggtgatccacccaccttggcctcccagagtcttgggattacaggcatgagccaatgcgcctggcctaacctggcctctttttgatggccagattatgaatggtcgtctctgttttttgttttgttttgtttgtttgtttttgagacagagtcttactccgtctcccaggctggagtgcaatggcatgatctcagctcactgcaacctccgcctctcaaattcaagcaattcttctgtctcagcctcccgagtagctgggactacaggtgcataccaccacgcccggctaatttttgtatttttagtagagacagggtttcaccatattggtcaggctggtctcgaactcttgagcttaggtgatctgcccacctcggcctcccaaagtgctgagatgacaggtgtgagccactgtgcccggccatctcttgtttttttaattttttgtatttatttatttatttttgaataagttatctctggcttgaagttgatatgagctggggagaaggatgtctttgtaaccccagtaccaccaatctatgagctttcaaagttccttgagaactactgtcatcaagttaacaatcttaatcaccctttgtctgaagcactagcttatgagagttttttaaaagctacaaggatgaatacaacagattctccgcccggcataaattgcctcaaagaaagtgactagaggagagttggatgccatacagtaattagagagtagtatgataaagctaggaacaagtgtgagggccaggatcttaaggatatgtgtcttagctgagccttagcctagaatttaacagctgtcatataattttaattttgccaataggaaattggggagaatgtgcayatttacctgattgggaaagagtcatctcgtacccactcgttggctgtgtccttgcactgtgcagaagatgactccatcagtgtaagtggccaaaacagtttgtgccaccagatcactgcggcctgcaagcatggtggagacttgtatgtggtgggagggtccatcccacggcgcatgtggaagtgcaacaatgccaccgttgactgggagtggtgtgctcctttgcctcgggaccggctccagcacaccctggtgtctgtgcccgggaaagatgccatatattcactgggtggcaagacactgcaagataccctctccaacgcagtcatttattatcgcgtaggtgataatgtgtggacagagacaactcagctagaggtggctgtgtcaggggctgctggtgccaacctcaacgggatcatctacttactagggggggaggagaatgatctggacttctttaccaaaccttcccgactcatccagtgctttgacacagagacagacaaatgccatgtgaagccctatgtgctgccctttgcaggccgcatgcacgcagctgtgcataaagatctggtgttcatcgtggctgaaggggactccctggtgtgctacaatcccttgctagacagcttcacccggctttgccttcctgaggcctggagctctgccccatccctctggaagattgccagctgtaacgggagcatctatgtcttccgggaccgatataaaaagggggatgccaacacctacaagcttgaccctgccacttcagcyrtaactgtcacaagaggtattaaggtgctgcttaccaatttgcagtttgtgttggcctaaggctgtggggaggggaggagaactgctcactccttttccctccccatacaaactcaaagtcccctgggccccaattcagagttatgttttttttggcacatactagaaaggcagtgcctcagcccttccctgaatccatggaggtgttctgtttggggctttttagactgctgctgctcagctggttgcttgaactgacagtaggccagcctgttctctgccattccctagtcatcctgtgcctcaccacagcttgcttagagcaagccttttctcagaccttaggcacagcctctcctctttacctgatcaatgttaaatgtaagcacccctgatcccaggacataaggaaagatgcccaattgtacttttgttctatagcctgtgaaatggctagttgatcatttttccacaaagaattaggtgttaagagttttccttcaggctttacttaggagaatggactaagctgaaggtgtacttcaccagcaagagtcaactctagaattcaggatgttccttctattgttttcttagccatctgtcaggaaatgtaactttggttttatttttggcttattccaaggggtaagccagaaaatagaaatgattatttctgattaatagcagaaactttttcaatctcaaatatataaggtgtctgctcttttaaaagctctaagctaagtcaagagctaggaactgttgatacaaataaaagtttttgaagggatatgtgtgtctgtgttgaattccaaaggggtgactttgaaggggtgagggtgtttcattccctcaggggaactcattacgtaccatcacatggctcagtctgcagcagtcctgactgcagcccatgctcccacttctccagataggatccctactccacagggccagtgagattcagattctgacagtggcaaagagccagaggtgagtctccttttttcaagtgctaaatgttttttgagttgtggtgctaaatattattaggcacaatattaggtacataatagatttttgttaaaatacttctttagccctattcaagaaaagatgatagccccatccctgtcctgtatcccatgaatacaagccacactaaatcttttcctttctagccacacaacagtgttatttcaagaaaacaaaacaagtcagagaaagaaaaattacctattacctattggcacatttctgttacgtcaagtctgggcttaagccctgttggtcctgttaagctctttttgttctgtatcaagcaggagtgtcttgagttctttctaatccccatacatcatgtctttgaaatgacaaaagtcccatcctttgttgcccgtgcagtaatctgcttgtggaactctttaagaacatccagctggccaggcctgatgtggatgtatgaccggatcttggcgatggctcttacagcctcctctggactccatttgtgcacctgaagtacagggttgggaaatcagcagagaaagaaagaagcaggtgtcaaggtgcccttgacccatgagcaggtgctaaaggactctgagatttcatttctttggaaactctattttgcaggcattaaaaatcatgctgcttgtattataaatgggagagtactgtaaccactgcagtcagccagtctcacaatactatgcaacaggtcaggtggaaagtcagtctttctacccaattcttgctctgccaaatcctagaaaaaggaagttgcacatgggaagctgagatcctaagttcaagactgcctcagcctactccacgtcctctccgagctgggcttttggttacaagaatttctaggaacgagtatgcaatagatgtttttatgcaacttgtcaccatggctagaaaaacaagtaactcataatttaaataggagggttaacatgtcctaaggatactcattggtttagaactcaacagaaccaagaaaatacagatttctaacttgctagttcaattctcacttggtgcaaaataccctcctgagaccctgcttccagcagagcccttatgaccaaaattttaatattactcaactatatacacactagtccacagtaacacaaggccagacttagctattcacatgacttagaaaatgctctgtgggagccagacattttgtaacttaggttacaaaatgatgatggactacagggtatttgtttctcctaaatatttttaaagcatcccacctgccaattatgacacattaataggcagaatccagtttggagcctgtttccagaaactaatatccagaactttactctggaatacttgaagaaacttgagtactataaagctgaaaatgatcagcactattatctatgatattgtttcctgacatggtattagaacaagtgtctagccttttgctggggttgaatggcttttgcaactccgtttttagagtgcccgctataggccagcacttgatgtaatttcttatttaaacttcataatacatttagtttgagaaaacatgttgcataaggcagaagtcacttttgctgatcctcactggcaggcagcagagccccaggttaccctgtcacaaggctcaggtgctttccatcataccaaaccacctcccaacagcctgaaatcaagcacacagctccttccaacaaggcccaccagtagaccatgctattgaagttctggaaatctgctataaatgggaccagaaagactttttttttttttttttttttgagacagtttcactctgttggctatgctgcagtgcagtggcacaaatcacggctcactgcagcctctacctactgggctccggtgatccatctcagcctcccaagtagctgggactacaggtgcacaccaccacactgagctaacttgttgtattttttgtagagacggttttgccatgttgcccaggctggtctcaaactcctgggctcaagccatcctcccatctcaagcctcccaaagtgctgggatcataagtgtgtaccacgatgcccagcccagaaagaactttggtacctgaatcaggtatgctgccaccatagtggcactcctggagcgcccagccttacaatgcacgtaaacacactggcccagcgactggtacttgagagcaaattggactcccttctggaggttgtccaaggtggggatcccagtcatgtctactgtgctgagccgcagctgctcgactcctagtctcttccactcctggaaccaggtccaccagtatgaaaaagagaatgaaaaaaaactatgtgggtgggatgataaggggctcccaagaagcagcaaagcaacaaggaagtttcagggtttactacaatgggaatacactgttgcctgttttctaaaatagaaacttcttacagaaatgcttttttttcccattccaggtgaggacagaaatgtctttaaaatggctggcctacatggttggtttttcatcaagcaacagctatgctgctgagttagaattatgtccaagatttaaagtgttcctttttttttttttttttttttaaagacagagtctcgctctgttgcccaggctgtagtacagtggcgtgatctcagctcaccacaacctccacctcccagtttcaagcgattctcctgcctcagcctcccgagtagctgggactacaggcacgcgccaccaagcctggctaatttttgcatttttagtagagacggggtttcatcatgttggccaggctggtctcgaactcctgacctcaggtcatccgcctgcctcagcctcccaaagtgctgggattacaggtgtgagccaccacaccagcaggtaaagtgttcttaaactaccctttgggtacttgaatatttagctgcaagatattagctatatacattttagctgcaaaaaattcagctgcaaacgtcttaacattttattttggccgggcatggtggctcacgcctgtaatcccaacagtttgcaaggccaaggcgggcagatcacctaaggtcaggagtttgagaccagcctggctaacatggggaaaccctgtctctactaaaaatacaaaaattagccatgcgtggtggtggatgcctgtgatcccagctactagggaggctgaggcaggagaattgtttaaccctggagggagaggttgcagtgagcagagatcgcaccattgtactccagcctgggagacaagagcaaaacaacatctcaaaaatatatatatattttattttagagacacgatcttgctatgtcacccaggtcagagagcagtggtatgcaatcatggctccttgcagcctcaaactcctaagctcaagcagtcctcccacctcagcctcccaagtagctgtgactacagctgcatgccactgtgcctggctaattttgttatttttgtgtgtgtgcagatgggggtctcgctatgttgcccaggctggtctcaatctcctagcctcaagccatcctcctgtctcagcctcccaaaatgctgggattacaggcatgagccaccaggcccagccagtgtaatttttttgcataattttggcacctgtgtagtgattcagctgcagatttggggtacaatattttgccaaggctttctatttctctgtccataagtctcttttttaccactgttttttgagggaacatatggtagaaaatagggttatcattttaaaattaaaacaatgggccgggcatggtggctcatgcctgtaatcccagcactttgggaggccaaggcgggcggatcacaaggtcaggagatttagaccatcctggctaacacggtgaaaccccgtctctactaaaaatacaaaaaaattagccgggcatggtggcaggcgcctgtagtcccagctacttgggaggctgaggcaggagaatggcatgaacccaggaggcggagcttgcagtgagccgagatcgtgccactgcacttccagcctaggcgacagagcaagactccgtctcaaaaacaaaaacaaaaataaaattaaaacaatgcactgaccttcattagtgcaatgttatcacttagaagaaataggtggccaggtgtggtggctcacgcctgtaatcccagattttgagaggccaaggtgggcagatcacctgaggtcaggagttcgagacgactttggccagcatggcaaaaccctatctccataaaaaatacaaaaattagccaggcatgctggcaggcacctgtaattccagctacttgggaggctgaggcaggagaatcacttgaactgggaggcagaggttgcagtgagctgagattgcaccattgcactccagcctgggcaagggagtgagactccatctcaaaaaaaaaaaaaaaaaaagaaaagaaatagaaataggtctctggcaactgggcaaactttatgctttaagacttcagatatgctccagctactcttgttattaacctcttaataatgagtatcagagactttatggttctaaatgaagatcagtaattcttttttttttttgagacggagactcactctgtcgcccaggctggcgtgcagtggtgcaatctcggcccactgcaacttctgcctcccgggttcaagcgattctcctgcctcagcctcccaagtagctaggattacaggcgcctgccaccacgcccggctaatttttttgtgtgattttagtacagacggggtttcaccattttggccaggctgatctcaaactcctgacctcaggtgatccacccacctcagcctcccaaagtgctgggattacaggtgtgagagccaccacgcctggccaagtcacaaatattttcaaggtttcaaaaaaatcctcaggttgaaataatagtatcttcatcatgctatatcagtaaaacaaatgagaaagataattgtttagtgctattagatgccaaacgctataaagatagggcaacattaaaaaaaaatcaaatagctcagattgtagataacatcttctaataaccattgtggaagattccacaaacaggccagtcacatttaatgaaagttatgttttaggcctaaactttgttatgagagaactttggagttccaccatgatttctaatatatgactaaaaattcccccaaatcagagccaaatgaactctacagttttcaatggatagttttatgaaaaatttggggaggggagagtgttaagggggtgcttttcgtcttacagttggcagggccttcatctggaatccctaacactgggaatgctgacccatactcagagctcaaagtatagaaagaatgaatgaaatcaggaaggcatgggaaagttgcctttcaattttagtttctgattttggttaccgaaataagaatacattacatttgttcacaaaggagaaatcaggctttgtcaacttccactttttttttttttttttttgagacattgtttcactcctgtcgcccaaggctgggctggaatgcaatggcgagatgtcggctcactgcaacctccacctcccgggctaaagtgattctcctgccttagcctcccaagtagctgggagtacaggcgcacgccaccactcccggctactttttgtatttttgtagggacgggggcctcgccatgttgcccaggctggtcaggaactcctgggctcaagtgatctgcccgcctcctcctcccgcctcccaaagtgctgggattacaggcgtgagtccccgcgcccggcccaacttgaacttttaaataaacgcctttcacagcttctagcctacctccaggtgccatttagaggcacagaccggaggcaaagcagcttgagacacctggctccggtgcatggtgacctcccccacacttctctagccgtcccaggctcagggcggtgggcgagggggagcgggcccccgagcctgcccctcggcccggtccctcacctgtgaagagttgcacaggaacctcgtctcgtactcctc
